United States Patent Application Publication US 2004/0123343 A1 - sequence listing, part 17

SEQ ID NO: 46289 - DNA, 224 bp, Oryza sativa
  unsure (1)..(224): unsure at all n locations
  Clone ID: PAT_MRT4530_4916C.1
aaagctataaatagtcaagttaactagtaaaacaggggggatattgatatacatgaggggggagctaatgcctttgtacaacactacaaatcacgaatagcctgtttttaccacaaaccattagtaagaagaaagaggagtggctatgtaagtgactataagtcaggagtaactgtgactctgcgaaggttatttaggcacttattattnacaaattacaacaa

SEQ ID NO: 46290 - DNA, 3623 bp, Oryza sativa
  Clone ID: PAT_MRT4530_49170C.1
gggctgcaggaattcggcacgagggcagagcggacacgccggccgccgccccgcctgtccccggccgcctccttcaaattcgcctccaaattcgcactgattcctcacgctacccgcccatcgatctcgcgccatctcacaatgcggatgagggtctcactgctgctgctcgccgccgcggcggtggcggccgcggcggaggctgcgcagccgtcgacgttggccgggccgacgcggccggtgacggtgccgccgcgggacaggggccacgcggtggacctgccggacacggacccgcgggtgcagcggcgggtcaaggggtgggcgccggagcagatcgccgtcgcgctctccgccgcgccctcctccgcctgggtctcctgggtcacgggggacttccagatgggcgccgccgtcgagccgctcgaccccacggcggtcgccagcgtcgtccgctacggcctcgccgccgactcgctcgtccgccgcgccaccggcgacgccctcgtgtacagccagctctaccccttcgacggcctcctcaactacacctccgccatcatccaccatgtccgcctccaagggcttgagccagggacagagtacttctaccagtgcggcgacccggcgatcccggcggcgatgagcgacatccacgcgttccgcacgatgccggccgtcgggccgaggagctacccggggaagatcgccatcgtcggggaccttggactgacgtacaacaccacctccaccgtcgagcacatggtgagcaaccagcccgacctggtcctcctcctcggcgacgtcagctacgccaacctgtacctcaccaatggcaccggcacagactgctactcctgctccttcgccaactccacgcccatccatgagacgtatcagccgcgctgggattactggggaaggtacatggagccagtgacgtcgaggattccgatgatggtggtggaagggaaccatgagattgaggagcagatcgataacaagacgttcgcttcttacagctccagattctcgttcccatcgacggagagtggatcattctctccattctactactctttcgatgctggaggcatccatttcatcatgctcgcggcttatgctgattacagtaaatcagggaagcagtacaaatggctggagaaagacttggcaaaggtggacaggtcggtgaccccctgggtgatagccggctggcatgcgccatggtacagcaccttcaaagctcactacagggaagcagagtgcatgcgagtggccatggaggagctcctctactcctacgccgtcgacgtcgtcttcaccggccatgtgcatgcttacgagcgttcgaaccgggtgttcaactacacgctggacccgtgcggccccgtgcacatctccgtcggcgacggcggcaaccgcgagaagatggccaccagctacgccgacgagccggggcgctgccctgacccgctgtccacgccggaccccttcatgggcggcggcttctgcggcttcaacttcacctccggccccgccgccggcagcttctgctgggaccggcagcccgactacagcgcctaccgggagagcagcttcggccatggcattcttgaggtgaagaacgagacgcatgcgttgtggagatggcacaggaaccaggatctgtacggtagtgtcggggatgagatttacattgttcgggagcctgacaacctgcagcccgttcagctcggcggcggcggcggcggtcgccggagaggaggaggtggtgccgggatggtgagcttggccgcctactccccttgctccaccgtggctggcgtgcccaagaacaagggcaacggcgccgcctccagcacacacaaggaatcaatcatgcggcatgttgtagtacaatgtgccacttcatgggacactccaagaacgtctactactaatggttcacatgctgaaccttcagcagttgtcaaagctggtactgcccctctgattcaggcactgaaatcaactgcaaatcaagatgtttcttgctttcactttcctggacataatagagggaaagcttctcctccttcattgtcagaacttattggctcaaggacatttttgcatgacttacctgagctacctgagcttgatgatctcttctcccctaaaggtgtgattttagatgctcagaagcgagcagctgaactatttggatcatttaaaacatggttcctggtcaatggaagtacatgtggaatccaggcctcagtgatggctacctgttcccctggtgactacctcatcatacctcgaaattgtcatatttcagtgatctctgcactggttttgtctggtgctgtgcccaaatatatagtacctgagtacaattccgggtgggacattgctgggggtattaccccatcgcaggtggataaagtggttaaggaactggaggaggacagaaagaaggtaggtgctgttcttgttacatcaccaacctatcatggcatatgcagcaatatacaaggaattgtcaatgtttgccacctgcaaggcattcctgttatagttgacgaggcgcatggtgcccatttcaggtttcacagaaattttccaagcagcgcaactgagcaaggtgccgacttggttgtgcaatccacacacaaggttctgtgctcgcttacacagtcctcaatgcttcacatggctggagatcttgtggatgcagataaagtaagccaatgcctccaattgctccagagctcaagcccaagttaccttctactctcttctttggatgccgcaagggctcagctgagtgagaatgcagaatcttttgatgaaccagtatctatggctttagaaacaaaacatcagctgaggattatcccaggaatatctgttttggacttatcaagctttctttctgattttcctgctattgatcccttgcgtatcacattaagtgcttcagatctgcaattatctggatatgaagcagatgattttttagctgaggagcatcaaattgtatctgagctggtcggtacacaggccgtgacatttgcagtcaacttagggaccagaaggcatgatgttcagaggcttgtacattctgtaaagcatctgtcagaaaaatacttctctgaaaatgggtccagttccagaaaagagaatcctgctagtagcccactggacaagttctccatcaagttgacaccaagggaggccttctttttaaagaagaggagagtgtccatcgaggatagccttggtgagatttgtggtgagcttatctgcccttatccaccaggtatcccggtgctgatcccaggtgagatagtaacgcaggattcactgtcatacttgatggatgtcagggacaacggcatagcaatcagtggagcagctgatggtgagctcaagtccattatggtatgcaacgtgtgaactgatgactctgctattgtttcaagatatctctcagaaccacagatatgaacaacaatcatgtaaaagatgggactggtcacttggccaaatgatcgcatcacatttcgtgttctgagaaggaaaatattagttgtcaagctgcaacatggaaccaaaatatgaatatggtctatggc

SEQ ID NO: 46291 - DNA, 393 bp, Oryza sativa
  unsure (1)..(393): unsure at all n locations
  Clone ID: PAT_MRT4530_49171C.1
aaacngaaatgaagctgaaatcatataggacagatgttatttcatatttcctgcaagacgcatctcccattggcaaaatgcttcttgcagcaacgccactctgtcacgtacaaaatgcatggggattccagcgaacgcaagaacaacgagagggcctacatgtccttactacacagagcacgcggccaccgggtcaaaccatcgccgtcaccggctgcgccggcggatggtttcgaggagcctgcttgaacgcctctgttgtgccaatacaggagcccctgctgccatgctcgtggaccagctcggcgggaatgagtccatcctcatccgggtagggtgctcgccgacacgccttcgttggaacagcacctactccacgttacggtgcttcag

SEQ ID NO: 46292 - DNA, 611 bp, Oryza sativa
  Clone ID: PAT_MRT4530_49172C.1
atgagtaaaagacaagctaatcaagaaaagagaagagtaaaaaggaccagctacctagcgttttgttttcgcttcctcccggcaggcagcggcacggcaaaaatcactggcggcgcggccggcggcgctgccagcggctcggcgcggcgaaatcctcaatttgcagacgtgtttgatttgcggctcgccggtgctgcacatcctggcgagctggtccaccgccgtggagacgaggtcgaccaccaactgcttgtcctgctcctgcacgggcgccatgatggcgcccatatatgccaccgagtcgtccgcggctatctgctgtggcacgacgggtggcgggatgaggtcgccgcagcctatggccggcgcctgctcggcgagggagatgggacagcgatggtgacagggatggagggaaacgggcgagtggtagtagaactagatctcaaccctacgattaaatacgatcaacggcgcggattactttctactgcaaatagaaagcattggagtggggctctttcttctttcgtttctattcatgtacagtttagaaatgattttttaaatttgaaattttatttattgaaatttaaaaaataatttttggt

SEQ ID NO: 46293 - DNA, 300 bp, Oryza sativa
  Clone ID: PAT_MRT4530_49173C.1
atatggggcactgaatcatttttatttcctcaacctttttattcattcctcccaaaaagaccgatccatggaagtttttttgccctcatcaggcaagcatagcacacacacactgtggcaatggaagtgcttttaacaagacgctaattaacatccagagctaaaacaaacaagggggtcaatgcaaatccctaaaaaaaaacacagggaaaagtccacatttttttcttgttcccaactactccgtgttaccaccactttttgcggatttttttttacccttttctattcttttgaacc

SEQ ID NO: 46294 - DNA, 554 bp, Oryza sativa
  unsure (1)..(554): unsure at all n locations
  Clone ID: PAT_MRT4530_49174C.1
gccttgtacataatatcaggagtagcttgcattctcctatatcttgagtacaagcacattgctaggctgaggctccgtcatcttacttgtgcaatgcccaatccaagccattttactgtccttgttcgtggaataccaaaggaaaccaaagaatcatgcagtaatgctattgatgatttcttcaccaagtaccatggatcaagctacctgttccatcaagttgtttacaaagttggaaaagttcagaagataatggtaaaatctgcactcgaagggatgtgctgcatataaatttgaacatattgtaataaagaatattgctgattgtttattgggaattttaaaagacggccttgatagttgttgtcatttgatattaattttgggtctactatcttgtagttgggtaatcactgggggaaacaagcaaaacctatcacattcttcccactaatttgattctcagctctgtgcttntatatagaagtagtgttcattaatctccngttccngaaatgaatttatggctttgcatattttatttcactttcttc

SEQ ID NO: 46295 - DNA, 402 bp, Oryza sativa
  Clone ID: PAT_MRT4530_49175C.1
atggtcgcggcctcctcctccgttgacgccgacgccggccgccgcgccggggtcgcagccaacgacccccgcgccatctccacgccgccctcgccgttctcgagctgtctcggcaagccggctggcggggcgaggcgggagaggaggacgtcgggcggccggcgatgggcgacgggcgacgcagcggcagcgacgacctcctgttcctccgtgctctacgaggacagcgcctcgggcgccagcgacgaggcccccgccccgcgttgctcgctgctgccgttcgatctgaacctgccggcctcgtccccgaaggagccgccgccgcaccagaggggcggccagagcaagcggagcggcggcgtcggcgggcaagcgcggtggccgagaagcggcggcggatag

SEQ ID NO: 46296 - DNA, 331 bp, Oryza sativa
  Clone ID: PAT_MRT4530_49176C.1
aacgaccacatctacaccctcaagcggatctgcggaggaggcacgagcaccttcagcgccgggaccgaccttgtgtggcagagcgcccgcgtagcacgccccatggcaatgtgctcccagacgctcgtacggtttcacgagaacataactgcgagcatgaagccaccactcccggaccgatgcttaagcaacgcgctcgttgtggtgttagacgcccccagtgtgaaagacatcgaatccaggtctctggacatcatcgacggacaaattaatggcgcaagctgccttctatacgacaccaagatgctagcgacgtggatctgctacaact

SEQ ID NO: 46297 - DNA, 810 bp, Oryza sativa
  Clone ID: PAT_MRT4530_49177C.1
atggccgcggcctcctcctccgttgatgccgacgccggcgaccggttgaaggggtcagccacgagcggcgtgacagggctgagggtggcggccgacgaggcagcgacggcagctgcaacgcgtgagcaggccgccatgccggggtcgcagccaacgacccccgccccatctccacgccgccctcgccgttctcgagctgtctcggcaagccggctggcggagcgaggcaggagaggaggaggtcgggcggccggcgatgggcgacgggcgacgcagcggcagcgacgacatgggagtaggagggccgccccccacgccgccaccgcagccgccgacggcgcgggcgacagatgtgcaaccatggcggcggcctcctcgctctcccgtcgcgctccctatcggtgccgtccgcctccgcctcgtcctcctgcgcccgccctcccactccgacggcctccgtcacctctccacctgctgccgtggaggacgacggcggcctccttgctctctccgtcgcagctcctgttcctccgtgctctacgaggacagcacctcgggcgccgacgacgaggcccccgtctcgcgttgctcgctgctgccgttcgatctgaacctgccggcctcgtccccgaaggagccgccgccacaccagaagggcggccagagcaagcggagcggcggtgtcggcgggcgagcacaatggcggagcagcggcttcggtgggcgagtgtggctgcggagaagcagcgtcggtgggcgagcgcggtggctgagaggcagcggaggatagggagcggcggcggcggatag

SEQ ID NO: 46298 - DNA, 516 bp, Oryza sativa
  Clone ID: PAT_MRT4530_49178C.1
atggccacggcctcctcctccgttgatgccgacgccggtgaccggttgaaggggtcggccacgagcggcgtgacagggctgagggtggcggccgacgaggcagcgacggcagctgcaacgcgtgagcaggccgcctcgccggggtcgcagccaacgacccccgccccatctccgcgccgccctcgccgttctcgagctgtctcggcaaactggccggcggggcgaggcgggagaggaggttgggcggccggcgatgggcgacgggcgacgcagcggcagcaacgacatgggagtaggagggccgccccccacgctgccaccgcagccgccgacggcgcgggcgacagatgtgcaaccatggcggcggcctcctcgctctcccgtcgcgctccctatcggcgccgtccgcctccgcctcgtcctcctgcgcccgccctcccactccgccggcctccgtcacctctccacctgctgtcgtggatgacaacggcggcctcctcgctctccccgtcgtag

SEQ ID NO: 46299 - DNA, 258 bp, Oryza sativa
  Clone ID: PAT_MRT4530_49179C.1
atggtgtacccacaaagtcaagtacacactgcctcctccaagcaggctggcccctacatgctacactactacagccacaacccacaggaaaatcagaacaagctttttgctacaaaaatcagcacaagtctaactagtttgctagttgaagtggaaaacaacttaaggcctagaaataattgtggggactctgatgtgtgtaggttttgttggtggagcatggacttttgtagggagtggggcacaaggggcagttga

SEQ ID NO: 46300 - DNA, 2372 bp, Oryza sativa
  Clone ID: PAT_MRT4530_4917C.1
tttttttttagaccaagaaccagccaagtttagccagcataagattacattgacacttcagaagaggcccaatccaacaaacgtcccttctttggataggccgaaatcctgccacatccaaggtcaaaaaaccggcccatacatacggatgggccaggatggaggcccaaaaaccatgcatatcagaagcagttcaacagaacaggattgcaatgtaatcctaagcaggacctgaaattatttctcctgctgtatgagatattgagatgtacagacagtcccaatgtacactcaaagttccacaacaaaaagtgctcaaggtaaaatatcatatataaatatgagcatttgctaggtaaagttaaaaaataataataatgaagtgtgttgttcaacatctcaactacttcctccgtttcataatataagtcattttagcattttccacattcatattgatgctaatgaatctagataaatatatatgtctagattcattagcatcaatataaatctgggaaatgctagaatgacttacattgtgaaacggagaagtatctatctatgtatccatgctgttctagtttcagtagtactactgtcaccagaagtcgtcttgatcaccaaaaggagggccgcactcaagtccactatgcatttttcttcaagctaaaaaggtcattgtatagcacaaacagattatggtgcctccactcctttgtaaaggagattccagttgaccaaagtaaacggcagaatgtgagacttcatggagaatctattacaatgctagtctgcttaacttgtcttgtcactttctgtactaggaagctagtacaatggaattatacagaggaagagcattgcatccagttcgattgaagatgtgactaagaatgcatcgcaatcagttcgtcttctttgcatttcctgatgttaacatccatgttggtttcagatgaggaagacacaacatcacagcaatgccgtcttaaagccttcccaggaaccagatgtaatggctcagatgccacttttatttggtgaagattcctcaatggaatcaagttaggtgagcattttctaggcagctgcctagtgtaatcgcttttgatcttgccttcacctgaagaaatacttttgaggaagaaaagagcagctcttttgcactcatccctcgggtaatgcttggtatcaaacataaaaacatcagtagcattgcgaccccttttccacggcacaaacgttttctgcacagcaaggaggtcaggaagcagcacattgcctttgtacacctgaactgaataggacgcggctattgacactgtaattgctttcgaatggtcatagcacactgtctgctgaaggatccttgctggatcagcattggcagctctgaagaaatgcttcaccgctgttgcacggtccatacccgggtaaagaggatatacatgatcaaggtggtgcagtgaaactaaaggagtaagcggatgcgctcttaggagtccagatatgtccccatgaaggtcgatctggtggaatcctggctcgtgggtgagctcgacgccgagctcggcgaggcaggcgtggatcctggcgtcgctgccgtagagatgcgggtacctgaggaggcaggagtcgaggacgcgggcgaggcgcgcggcgagcggccagctcacggcgatgccgccgccgccgtaggccatggcgaagccgtgccaggcgttctgcgccgcggactcggagcgcgcgccgaggtaccacggctcgcgccagtcgtacctggagagcgtgtgcaggaggttcgggaggacgaacgcggtgtcgtcgtcggcgagcacgagccaccgcggcgggggcggcgtcgcgtggtggtggtcgtcgagctgcaggagctccttggcgatgcgcgcgacgcggacggcggaggggagcccgcgcgggtgcgtgtacgggaagcgggaggcgtcggtggaggagacgcagaagcggaggttgggcggcaatggctcggacgcggcggcggcggccggcgccgggccgtcgaggaagaggaacgcgcgcgcgggcgggcggagccagaggcggagcagcgggaggcggagcggcagcgtgcggcgggaggaggcgatgccgaacaccacgtgcgccagcgtcgtcgtcgtcgtcgccttgggcgccaaagacgacgccgctcgccgcggcgccggctcgtcgtcgcgccgcgtggcggtggcggtggcgaggaggggaggcggcggggaggggtggggacggtggatgaggaggaggaggaggagcgagaggagagggagggagaggaggagtgggcggagagggaggcgcgggcgagacggcggcgtcggcgccat

SEQ ID NO: 46301 - DNA, 370 bp, Oryza sativa
  Clone ID: PAT_MRT4530_49180C.1
ggaaaaaacagctttaactggaacaaaccgaggggtaatttacatatggggcccgaaaaataccggccctggggacatggctcccattgaggagcctttgctggtgggaaaggaaaaggttttcctacaaagggggggttaataagaatgcaaaaaaagaacccgattgtttggggccttttcctttccccaaggatttggcacgctttttcaaaaaatgggaattgggttgtgcaacctgtccaaaaagggcaggaactttgggaagttttgggacctttcagccccaaaaagggggcaaaatgggccccttaatggggcacttgattccctccaatttttttcggttttattggggttttcaaccccc

SEQ ID NO: 46302 - DNA, 752 bp, Oryza sativa
  Clone ID: PAT_MRT4530_49181C.1
ctagccgaactcacaaaggatgatagcgggagccacgatccccatcaccatcgtcgggactctccgactccccctcactgaagccctcgacggcgggagaaccccgaccagtcggggggctcggccctctccccgttgctcgacggggggagagcacgccgcgccggggtgcatcgccgcctcagggcgcgcttcaggtggtggaggcccttttgtggcacccccgctgccaacccggagccggaaaccccggttcagcggtggttggacgacgtggccaacctggtcaccgccgcgcagcggcaactggccgccggcagccggcccgcagctactggtacctcgcgtaccaccactgccctctcctcatcagcaaggaggagggcccgtcgatcggccatgatgtcacggcgatcgacagcccagacatcgtcgaggccctcgggaagccgagagcagcacgatagtcatatacgatgtcgtcatacttctcggtgaggttggggcggaactccaccagtggtcctctcctcctttacggggatggtctaagccgtgccgccgtgtggaggggaaggcggctcggacccagaaaccttccgcttccctttcgcgtcggtggccgggccttttcccaccccatggctcgggccaggcgccctgaagctgccgccaccgccggaaccgccggcccgactgccacctgctgccgaacagctatctgcaggtcgtggggaaggtggttttcgcgc

SEQ ID NO: 46303 - DNA, 290 bp, Oryza sativa
  Clone ID: PAT_MRT4530_49182C.1
tgataccaccttccgagtttcgcgttctcgccttgggtggaacgccacaaagtgttgagttctcggcctcctgcgccgatgggtggtataccggtgcctctagccctccagggaccgtaggcctggttccgccgcccgcctgctgccttggggtatcgagagggaatgagggatgggaggtagagtggagaggacggaggtagaagataaggcatgtaaccaaataaaatttctgtgcattgacggagtaagtagtgcatatctttgatttcaacaaaaaaaaaaaaaaa

SEQ ID NO: 46304 - DNA, 2312 bp, Oryza sativa
  Clone ID: PAT_MRT4530_49183C.1
agctagcagcgcctagtagttgctcacgagcctctgtcttggtttgcacctgcaaatggaccgacgacgacgaccacggacgcctcttctgaccgcactgttgctcgtctcgctggctgcggcggcggcggcgagcggcgcgccctgctccggtctatcaagccgctcttcgtcggcggcgagttcggctacggcgatgcctggaacgagagcaccgactgctgcggctgggaaggcgtggtctgcggcggcggcggcggcggccaccacgtggtgtcgctgtctctggtccaggccggcatcgccggcgccgtcgacggcgcggcgttcgcggcgttcacggcgctgcaggagctggacctgtcgtggaatcgaatctctgccttctctcttccatctgcaggaggtatgtgcgttgctgctctagttatcaaccgaactacactttcagagctgtaccttggcggaaaccagttacttacaacaagttggatatccaatttgacgtctcttagggtggttgatttatcccagaacttcttacacggatacaacggtatatgtaacctccatcaactagagtacctacaccttggtgtcaacatgctacatggaaccataaattcatgcttgggaaaactacaacaattgaagtacctgaacatggaaagaaactttctcatgggggagattgcaccgaacttacttatcaacttgaccaaactggagactatacacctgggggtgaacaatcttaccggcacattcatgctctcctggctagcaaacagctcaaacctcgttgatgttgtcctctcacacaactacaatctgaaaatcgaaaccgagcttgtgagatggacaccgttgttccagctggtatacttgaatttaagcaactgtgttatcaataggcgaagcaatggagttgtgccgacttttctgtcaacccagcttagcctatccgggatcgatctctcgcattgttcgctccaaggcaggattccaccctggctgttctacaatctatctgattttgtcttgctcaatggcaatagaatggatgtcattgatatggatgggcttggtggtaacatacctcaccggtgcaggtgcttgatttgtcagagaacaaaatatcgatgtcgatcccgaccaactttggaagcatttttcagtttttggactactgtgacatgtcctccaacaggttgtacggtgggattccatcattggcagaggcaacatcattggaggtgcttgacttgtcatctaacaacctcaatgaggaaatattgccaacattaatagggaatttgtcaattctaacatctcttctactctccaataatgacctgacagggcctatgccacctttccattggaatttgggtagtttgaagcacctcagccttgagaacaaccgattctcgggatggctatctccattgctgtcgaacagcagtaatctcaagacactcaatgtgagaaacaaccatctatcaggaatcatcccggatggcctcctgagcttccaacagcttggtgtgatcctccttggagggaatgattttcatggtccaataccattggacctttgcttcaacaactatctccactttgttgatctctccaacaatcaattctctgatttgccaatgtacttcaacgatgacccattctcaggcaatatcacagagcgcatgtctgtcgacttcacgacgaaaggcgagaaccttacctacatgggagagcctctagtgctcatgacgggcattgatctgtccatgaatcaattgtcaggcgccatccctccgccattaggtttcctgaggcagctcaagtctctaaacttatcacataaccaacttgttggcccgataccagagacattcatgtatatgcaggatatggagagccttgacctctcatacaaccacctcaatggcagcctgcctatgcagctggcaaatctctccttcctgtgctcgttcaatgtcgcctacaacaacctctctggtgagatacccttccaacaacagcttgggacattcgatgaatcggcattcgaggggaatgacaatctctgtggtgaaatcatcaacaaaaactgctcatcagtgctgcatcagaatcaaggagtgttcgacgccattgacacgtcacttgttttctggtcctacgtttttgggtgttttgcacttggattttggggcaccgtggcattgctgatatgggatgaagtgtgcaggaggagactgtgtgacttgatggatgctctaatgtttaagctgggttgggaatttgtgcct

SEQ ID NO: 46305 - DNA, 657 bp, Oryza sativa
  Clone ID: PAT_MRT4530_49184C.1
cccacgcgtccgccacgcgtccgcgaagcgataagccccgcgggagagacgagcgcgcgctccgctccgagcagaaatggcggcgaggttgtgggcggcggcggtggcgccggcgaccttaaaccctcctctcctcactctctccgcctcctcctcgccgtcgtcttctcgcctccggcgttcggttctcggacgcctgcgcagccgcgccccgcgccctgccgatttcgtgtgccgccgcgccaagaacgcggcgtacgacgactacaagttcccggaccccatcccggagttcgccgcgcaggagacgagcaagttcaaggagcacatgatgtggcggctggagcagaagaaggatgactacttcggggagcacgtggaggaaatcgtcgacgtctgcaccgagatactaggaactttcttggagcatgattattgcggacctgggactctcctagttcacccattcttggacatgaagggtgagatcaaagagagggggcttcctggggcacctcaggctgcgcgtgcagcgattgcatgggctgagaagaatatcgacaaggactggaaggcgtggaccggagaatactaggcctattttttccgccatttcttctgtttgttgtatgatgtatcagcggatgtatcactagt

SEQ ID NO: 46306 - DNA, 440 bp, Oryza sativa
  Clone ID: PAT_MRT4530_49185C.1
atggaaacgacaaggactactcggattgtatccatatggttttcctaattctacttggacaagggaacacctatgggtataaactcaagaccccctaggaggagaggggaccctgaacaatagatcaagtcaaaaaatccacagacaagccaacatacgtaagacaagacgtcagatatcgacttcagatataggcatggctagtcccctacggtgcctatggctaccatcaggatagatatagcactgtctttgatctcgccggatgcggattcgaggaggaaggctaccctgttgtcgaatacgagtcaatactacatatcgccaaatcgaccacagttagataggccacccccaatattgtactgtattgcatatatcctagcaccaacgatccccatactatgcaaataccggaatcgcaacatcaaacgtcgaca

SEQ ID NO: 46307 - DNA, 276 bp, Oryza sativa
  unsure (1)..(276): unsure at all n locations
  Clone ID: PAT_MRT4530_49186C.1
attgttttcatcgccaacgcgcccgtagcccccggangggatctataatgaaaccatgcggggggtcccacaaacccgaccgaccgctggccgcatgcgacgcccaccagggcgccgccacccccgccgccgcaggaaccgccgcgccgggcgtgacactcaactcgggccacccgcagccctccctgggcctcggcaccgagggcggcccccccgcggccgaccacgcggacaccaacccgcaccccggccgcctcccctacacccacctcgaca

SEQ ID NO: 46308 - DNA, 501 bp, Oryza sativa
  unsure (1)..(501): unsure at all n locations
  Clone ID: PAT_MRT4530_49187C.1
caacagtgtcccactggtgcaaggtntcaaacatcatcaagacaacctggtccagaaacgtctagggtttcaccaggacgagcaatctgttggaaggantggatatgctccagtgtggcgttctttactatgggtttcccttcaggttgtaagtattggggtatagtatgcaacagctgggttganccaggtaggtcgctcctgaaagggaaaatgtgtttgtaagcaaggtgttctngatgccgggttagagatgggacagtccctnctgctcntaaagtcaaatttgtggtcgcagaatntctccattttaccctgtgtagggaaagttattgtgaattgaggaattcttcaatgtaacctttgtgtttaccagtggttggaaataaaataacatggaatcagagttaagaagaaaatggttgaattggactttacagcacatctgtctccttaatacagtagacgacattcaacccctttggtgcttaaaaaaaaaaa

SEQ ID NO: 46309 - DNA, 403 bp, Oryza sativa
  Clone ID: PAT_MRT4530_49188C.1
cttactctttcctcctctcctctctctctcaccgactggaggttgggagcgggcgggagtggcggccccggcagcggcgggcacggcaaccactgtggcgggtggcgggcacggcgacagtctgcggcggcggatccggctgggccgtcctcggaagggcagcctcgatctacgctggtccttcgtcgggaaggctgtgcgacacccaagcggctgaaggatcaaggattcaaggccctgaggtggtatggcgagccaggagaagcccacgccggctcggcatgcgtctgcgcacccaccggcgccggaggtcgcgcctcttgtgtgcggtccgagggggatatttcacattgtgcaaggttatcacatattttttctacaagaatttgacattcacgctaac

SEQ ID NO: 46310 - DNA, 4179 bp, Oryza sativa
  Clone ID: PAT_MRT4530_49189C.1
atgtggttagttggcagtgtggtggatgctgcgataggatgcctggtgcaaagcatccttgggagcttcttcactgaacagatggaagcctggactcatgaaattgggcttgctgaagatatcgagaagcttgagtttgagatgaaggctgtggagagggtgcttgctgctgccgaaggaagaagtattgacaacaagctactagcccaatcactgggaagtctaagagatctgctttatgatgcggaagacgttatggacgagctcgactaccaccggctcaaacattggatcgaaaaaggtgaaggctccagtgctgctgctgataataatcctgggacaaactatgctgcttcatccatttcatcttctgcttatcaactaatatgcagtgcaagacaaaaaattactagctggatctcatctggcagaaaaaggaagcgagaagaggaagagccaactgatagcaccatgctgcctcatgatatcaaacgtgacatttctaagaggatcaatagaatagtgaacaatttgcagaaaactggcaattctgttagtggggttcttcagctagagatcccatgccgaggtttgacatcaaatcagaggcacagaatggccaggaacacacgcctgacaacttctgttcctattgaacccaaggtgtatgggagagatgcagataaggacaggataatagagatgttaataaatgagggatctagtgatctccttgtcataccaatagttggcattggtggtattggaaagacaacacttgctagatttgtataccgagatcaaaggattattgatcattttgatttgcaaatatggatttgtgtatccactaacttcaatgaagacagtagtggatgggataagctgttagctccattgaaatgtaatcaagtaaccggttgtgcggtgctagcaacaactcgaagaagctcggttgcacaaatgataggaacagtgaatgcattccaaatcagtggtctggacaaaaaggagttttggctgttcttcaaggcatgcgcatttggtaatgaggcctatgagggtcagcctagtttgcaatctattgggcaaaaaattgctaaaacactaaagggctgcccactagcagcaagaagtgtcggtgcacttttgaacagagatgttagttatgaacattggaggacagttcaggacaaatggaagtctcttcaagtaaaagatgatgacattatacccatcctgaagcttagttacgattatctacctttccaccttcagtgttgtttctcctattgttctctgtttccagaggatcactggtttaatgaagaaactttggtccaggcttggatatctcaaaattttgttcaatatgaagatactggagcgggattggaggaaactgggttgcaatatttggctaatttagtagattttggatttttccaaaaaattggctcacactatgctatgcatgatctaatgcatgaattagcagagcaggtttcatcaaatgaatgcgctaaaataaatggaattcagcttaatgtaattccaccaaacattcgacatttgtccatcataaccaccagccatgaaaatgatgctcctgaggattttctcattgagaaatttgaggagatactacagaagattaggccttttcaaaagctgaggagcttgatgttttttggacagagtagcacaaaattattaaatcccacacttactttttgcaaagaagcaaaatgtttacggttgttaagagtttatgtctcaaatgctggcatcaactctttacaaaattcgttaaatccatatcatctgcgctatcttgaatttattggtgcatatggggatgtcgttcttcctcaagctttgaccagtttttatcatcttcaagtgttgaatgtgggcattcatggaagtcatgatgtacctacttctatgaataatctagttaatcttcgtcatcttattgctcatgacaaagtgcaccgtgcgatagctggtgttggcaacatgtcatcacttcaagaactaaatttcaaggttcaaaatgttggcggttttgagataagacaactccaatccatgaataagcttgtaactcttgagatctctcatcttgaaaatgtgaagactaaagatgaagccagtggggccagacttatagataaagagtaccttaaaaagttgtccttatcatggaatggtggcagcgtgagccttgaacctgacagatcaaaagatgtgcttgagggtcttcgaccacatcataatctgaaaactctaagtataactgggtacagtgatcctaactctccaacatggctttctagtaatctctcggttacatcactgcagacaattcatcttgagaattgcagggagtggaaaattcttagatctcctaaaattcttcctttgcttaggaaactgaaattggtcaagatgtttaatttggttgaactctcaattccttccttggaagagttggtcttaattgagatgccaaagttggagaaggtattgactattaaagattgccctcaactgaatgagttcactcctttcggggccgagcagtggtttccgtctctcagagaactcaccattgggtgttgtcctcatataagcaagtgggaaatacttccactgagggaaatgcatgcgctcaagagtttggagttaatagacctccatgctgtcagacagttggaagtcccttccctgcagaagttagtgttgattaacatgctaatcctggaatgttgcagcgggctaacagcttcaactgtgcaaatgtccacttcccaaggggacaaggagtgcctatctggtctccgtgaactcactattcatgattgtccttgtttggtactgtcatatcctctcccgccttctgctctgacgtcccacttctctatcaaggggattccaacatatccaacaatggaaaaagaatatgggcagctcagcataacatctgatgagttgattatgcttgatgacaagatcttagcattccataacctcaggggcattgaatctttgtttataaaagattgtcctaatttagtctctatatctagtgaaggtctcaatcagctcatcgatttagagggcttatatgtaacaggttgtcctaatttcaccatgacaagcggccttgtcctcccatctgtcagatttctctcccttcagtcatgtgccatatcagggagttggctaacggaaatgctttcgcatgtgcggtctctcaagactttgaaattacatgactgcccacaaataaaatttctatccttcagtgaacctgcagcaatggaaggtgccagcagtttgggttcagcagcaacgcactctgatagggatgaacagctgttgaaaattccatctaatatcatccattctctaagagatctatttatttctaactgccctgatctagagttcggaggagaagagggagccctccgaggatacacctctcttgaatccattaaagttcagagttgccccaaactgataccattgttggtgagtggtaagatggaggttggatcgctgccaccatctctacgaagcttagatattgatatggatcctgagctgtctactgtatgggatctcaaactgcaggagcttgaacagggtgttaatcagttacagtcccgtctgctgtccttcctccctaccatcacaacattagtcatatcggcaagtccagagttgacatctctacagctgggatactccaaggcactggaagagttgataattgtagactgcgagtcacttgcttcagtcgagggctttggatccttgacaaaccttagtgacccgctgcaaacagctcattctctggcaagcatatccttctggcctgcacgaagcaagcgtggtgcgacgatgatgggtctgacagaggaacaagagagagcgctccagcttctgacatccctcgaatatctcatattttggcacttgccgaatctcctgtcacttcctgcaaatctagcaagccttacctccctcaagtggttacatatcggtgactgtccccgcatcacaaggctgccagagatgggccttccactttcactgacacaactgtataataagcatacatggattttgcagacaatggttcctcgtcgaaatcatttgagctga

SEQ ID NO: 46311 - DNA, 1077 bp, Oryza sativa
  Clone ID: PAT_MRT4530_4918C.1
atgccgtccggagaggccaagcgccgccgttcaccggcggtagagccggactacctagccgcgctcccaccggagatcgtcgacaacatcatctcccgcctcggcgtacgcgacgtcgtccgcacctccgtcctctcccacgcctggcgccgccgatggcgctcagttcgcggcctcgacctcgatttcagatcctccgaccccgccgccgccatctcctccgtcctgaagcgctccgccgcgcccgtccgtacggtcaccctccgagtcccccggcgctggttccaccgcgccgtccgctggctccgcctcctcccccgcaagcgcgtccagtccctccacctctacttcgagatgatctccatcatcgaaggcaagcacaacctcgatcccagcatcttctcttgcctagagctctcctcgttgagccttgcgggttgcaccttcccaccgccgcagccgccgtcgtttgtggggttcctgaagctgaccaagctctccctctccgaggtcgaactcccgccacacggggaaaggcagctggaggcgatgatcgccgcctcgccgcttctcctcgaattgtctctcgacaacgtgcacagcttccaccactcggaggtgtggttcgtccggggaccaaacatccggtcccttaggatttgggcagttgatcaggattttggctgcaggataggggagctcccgcgtctggaggatgctgtcatcttcttggattcagaagtcaccactcaagtcttgtgcaaaactttggaagggattgctcatgtggagagcctcgacttcaatgcacttatgcatcagttcagtgataatccaccagagaggttttcattcacatttcagaacttgaggtcattagacctgcatgcttgtctagaccaaatttcaagtacttcattggttttttctatactaagatgtgccccaaacctggaaaaacttgaaatcgaggttggttgttatgatgatttagtggatgatggaactgtcgaaggattcgcaaatgcgcaaacaagcgacgacattttccctagacttcgatgtctggttacatag

SEQ ID NO: 46312 - DNA, 1128 bp, Oryza sativa
  Clone ID: PAT_MRT4530_49190C.1
atgaaggtggccaagctttcgcagtctccgcgccaccgcagtctccgcgctgcactgtgtgtactgccactttcgatgagattgactccatctccgctagcgctaaaacagctgttgaaaattccatctaatatcatccattctctaagagagctagttatttctaactgtcctgatctggagttcggtggagaagagggagccctccgaggatacacctctcttaagtccattaaagttcagggttgccccaaactgataccgttgttggtgagtggtaagatggaggttggattgctgccaccgtctctagaatgcttatgtattgatatgggtcctgagctgtctactgtgtgggatctcaaactgcaggagcttgaacagggcagtaatcaggttccaccgccacctccgtcacttgacacattccttatcacgaatctcacagacaaggtacagtctcgtctgctgtccttcctccctaccatcacaaatttagtcatatcagaaagtccagagttgacatctctgcagctgggatactccaaggcactgaaagagttggaaattgtagactgcaagtcacttgcttcagttgagggctttggatccttgacaaaccttaggttcttgacagtatatgaatcgcccagcatgcctcaatgttttgagattctatcacaacaacatggggcctctgagatcttgtcccgactggaaaatcttcagatcagtgatggctttatccttactgtttccctctgcaaacagctcacgtctctgagagatctattcttctggcctgaacgaagcaagcctgatgcgacgatgatgggtctgacagaggaacaagagagagcactccagcttctgacatccctcgaacgtctcaacttttgggggttgccgaatctcttgtcccttcctgcaaatctagcaagcctgacctccctcgagtggttagatatctcagactgcccccgcatggcaaggctgccagagatgggccttccaccatcgttgaggagattatctttatgccgttgcagcgacgacctaagtatgcagtgcagaatggtagcaacggagaagctacaggtcgagattgatgacgaaactattgattaa

SEQ ID NO: 46313 - DNA, 376 bp, Oryza sativa
  Clone ID: PAT_MRT4530_49191C.1
cccacgcgtccgcagacctgtgcgatgatcagttcgcaacacaaatgccgcttacgcctctagaaatctgatgagctctcggacgaggtcttgcttatcggctgcctcatgctatgcaaatcactcctaattgacatttatgtgctaaccgggagctggaccatgctgtgcccactctaatacctcaccatgtacaacactgagaggcctggtcagctaaaaatgctactaccactatactcgatgatacgctcacgtgtactgaagcttctgcgcataaatggccactagctacgcgtgttatggcgtgtactagcagagcctgcagcaaacactgcgacggctagaggcatacgattacttcttgctcgggtgc

SEQ ID NO: 46314 - DNA, 2740 bp, Oryza sativa
  unsure (1)..(2740): unsure at all n locations
  Clone ID: PAT_MRT4530_49192C.1
ccaccactcaccaccccccaccccccacctccaccctcctcctcctcctccgcctcggcgttcgtgcatgaaaccctagaccccccccccctctaaacccccctccctcccgcaccccccgggatggccaaggcgctcctctcctcgtcgctgctcccctcgctgcagccccgcgccgccgccgcgaggctgcctatgctgacgctgccttcgctgcggaggcacgggggccgccgcgcgtcggcgtgcagggtgagggcgagcctccacgggctcgactcgatcgcggggctcgacctccacgccgcgctggagcgcgccgaggcggcgctctacacgctcgccgacgccgctgtcgtcgcggcggacgcggcggcgggaggaggagggggtggcggtggtggtggcggtgaagcggcggcgtcggtggcgcagaagaacggggggtggttcgggttcatctccgaggccttggaggtcgtgctcaaggtgctgaaggatggcctgtcagctgttcatgtgccgtactcttatggattcgccatcattcttctcactgttattgtgaaggctgcaacattacctttaacgaaacagcaggtcgaatcaactctggctatgcagaatttacagccacagatcaaagcaattcaacagagatatgcaggaaatcaggaaaggatacagcttgagactgctcggttatacaagcaagctggagtcaaccctctggcaggatgttttccaactttggcaacaatacctgtctggattggcctctaccaagccctttcaaatgtagcaaacgagggattactgacagaaggatttttctggattccatctttgggaggccctacaacaattgctgctcggcaaagtggtgctggcatttcttggctcttgccttttgtggatggccatcctccattaggctggcatgacacgatatgttatcttgtgttgcctgtgctacttgttgcttctcagtttgtctctatggaaatcatgaagccaccccagactgatgatccatcgcagaagaacacactgcttgttttgaaatttcttccatttatgatagggtggttctctttgtcagtgccgtcagggttgtccatttattggttcacaaataatatcctcagcacagcccagcaagtttggttacggaaactgggaggagcaaagcctgttgtcaatcaggggggtagtgggataattactgcaggacgagcaaaacgtacgagtgctcaaccagccccaacctggtgaagatttaaacagctgaaagaagaggagagcaagagaaaaggcaacaaagcgcttgctgcaggagattcagatctttcagcctcaacatcagaggatgaagagtcggatgatgagactactgaagagcagggaggacctgaggaaagatacaattccagtagcaacaagaaacttccaaattactccggaaagaagggcaaaagatcaaagaggaagcgcatggttcagtaggtgtgacagaacctgattggatttcatttttgtcattactggttaattcagttggccagtacggttgtgtagttgatctcggacacaattttgatgatcagttgggaaggctaatcttcaggtgcaggacagacacgaaacattccagtggtacaggtgttttgctggcacacagcaagatgaaaatagttcagtacactacaataggtttgagaggataggcatggcttgagtatgtgctacaacataagagtagtacacaaattattcttgtgctactctgcaatgtgggtaccaaactcacgcaggaattgcataattcatgctctacatgcatttatttccctcttgtaacctaataacattctttgcggagtatattgcagaagttagaacaatccagtcgcctagaaaaggtgaggaaaaaaaaatacattgctgaaaaaaaaaaaaaaatgggaggagcaaagcctgttgtcaatcaggggggtagtgggataattactgcaggacgagcaaaacgtacgagtgctcaaccagcccaacctggtgaaagatttaagcagctgaaagaagaggagagcaagagaaaaggcaacaaagcgcttnctgcaggagattcagatctttcagcctcaacatcagaggacgaagagtcggatgatgagattactgaagagggaggncctgaggaaagatacanttcccgtagcaacagaaacttccaattactccggaaagaagggcaaaagaccaagaggaagcgcatggttcagtaggtgtgacagacctgattggatttaatttttgtcattactggttaattcagttggccagtacggttgtgtagttgatctcggacacaattttgatgatcagttgggaaggctaatcttcaggtgcaggacagacacgaaacattccagtggtacaggtgttttgctggcacacagcaagatgaaaatagttcagtacactacaataggtttgagaggataggcatggctcgagtatgtgctacaacataagagtagtagataaattattcttgtgctactctgcaatgtgggtaccaaactcatgcgggaattgcataattcatgctctacatgcatttatttccctcttgtaacctaataacattctttgccgagtatattgcataagttagaacaatccagtcgcctagaaaaggtgaggaaaaaaaatacattgctgaacttacgtctacttt

SEQ ID NO: 46315 - DNA, 408 bp, Oryza sativa
  Clone ID: PAT_MRT4530_49193C.1
atggcggggacgcctggcaagcgccttaggtacacggcctcgaggcgcgttgggtccacgctcagcgacctccccgaaggagtcctccaccacatcatgtccttcttggactcgcgacaggccgtgcagatgtgtgtgctgttgcagcggtggcgcaacctctggcgctccatgcctcgcatcaacatcgactgcaaagagtcctcgcatcaacatcgactgcaaagagttcgagccttgcaggcccctccagaagttctacacttatgctcccaggcttgggacgctaataataggaagttttgccatataattgggataactaacattccctcgtcttatttcggtcgtgcactgttgcttcatgatagtgaacgtttgccagatttataccattgcacacaatag

SEQ ID NO: 46316 - DNA, 801 bp, Oryza sativa
  Clone ID: PAT_MRT4530_49194C.1
atgtgcgggagaggtggaggagtgggcggcggcgtgggcgcggggtgcggagtaggggcgcgaggtggagcggagaaggcgggcgtcgtggggaggtgggggcgccggtggttggagctcggctccaaccggctggagggcgtgacaggacggctcggccacggcggggcggcagtggagatgacgaagctggccgagatgtggtacctcaacctgagcagcaacaacctctccggcgaggtgacacccctgcttggtaagataaggtcgctgacgatgctggatctcagtggcaaccccagcctgtgcggcaacgacattgctgggctgaactcttgcagctcgaacaccatcaccggcgatggcaactccggtaagacgaggctggtgctcaccgtcacgctctccgtcgtcgccgcgctgctggtgtccatggtcacggtggtttgcgcgatgtcacgcaaggcgaggcgagccgccgacgtcgtcgtagagaaggcggagacgtcggcgattggcgggagctcgacggcggcggcggcagcggccagcttcgtcatcttcccgccgccgccccgcagtggccgcccccgccgccgccctgccgtggccgagccgtctcggctcgggccagctgtcgttgcgcctctgatctgctgcaaggaaaaaaaggggaaaaaaagatatagagaggaagaacaatgtccaggggcattttgcaaattttgcccagccagccatgtcagccatggcgacaaggaaatagatctactgttagagaagaagaggaactcgaggtga

SEQ ID NO: 46317 - DNA, 320 bp, Oryza sativa
  Clone ID: PAT_MRT4530_49195C.1
agggaaagtgtacgctgaggaccgatctgattctggtcgacacgcgtcgtcactcgtcgataaggtaactataatgagagaggaggtttactatggaatggtgactctatgatgatacagactacagacttaatgtatcatcaggatacacagtatgtaatgcgcgaaattgcctggtatcgacatctaggatcgtgcatgctaagttgaccggcgatcagctgtcgaggaaaatatggttatgacatcagaccaccagtacatatctcgaaagcatgaagaggataggatgttaatatttgagagggaagatctgttat

SEQ ID NO: 46318 - DNA, 859 bp, Oryza sativa
  unsure (1)..(859): unsure at all n locations
  Clone ID: PAT_MRT4530_49196C.1
caaagcaacacaagccatagcagcagagccgagtagctgagctcactgttcgatcgatcactagctcgctagctgcatccatggctgcttccaaggtcgctcccgtcctggccctgagcctcctcctcctcgccgtcgcggcgcacggctgcgagccccactgctccggcggcggcgcgccggcggtcgtcataccgacgccgacggtggtggtgccactgccgtcgttcggcggcgcccatggcggctacggcggctacggccatggccgctgcccgatcgacgcgctgaagctgcgggtgtgcgccaacgtgctcaacggcgcgctcggcgtgaacgtcggccatggcccctacgactgctgcccgctgctcgccggcctcgccgacgccgacgccgccgtctgcctctgcaccgccgtgaaggccaacgtgctcggcgtcaacctcaacgtccccgtcgagctcaagctcatcctcaacaagtgcggcaagacctgcccctccgacttcacctgctaattaattgagcatggaaagtgctcaaaccatttgcgcaaaattaatgcatatttatattatatttaattgagtttgttttcatgcaatggccattggtaagttgcatgatgcatgagtaagccggcctgaataagctattatccccccttgtgttagtttaattaatttgttgcatccgcattaatttgttgtaccattggaatcactcacttgtaatttgttgttgtataaccaatgcattgtgatcatcatcaattaatatattttcatttttaataaaaaaaaaaaaaaaaaaaaaaaaaaaaaaaaaaaaaaannnnnnnnnnnnnnnnnnnnnn

SEQ ID NO: 46319 - DNA, 255 bp, Oryza sativa
  Clone ID: PAT_MRT4530_49197C.1
ctatctaactgttgtcgacatgtcggtctgaagatctgactcgtagtcgacaacagggtagccttcctcctcgaatccgtgcccggcgaggtcagagatagtgctttcgtctctcctgacggtatccggagacaccgtaggggaatagccatgcctatccctgaagtcgatatccagcggcgtgtcttggcgtatgtaggcttgtatgttgtggcttctggtgggtgtatgttgattgtcatgggtgtcttccat

SEQ ID NO: 46320 - DNA, 685 bp, Oryza sativa
  Clone ID: PAT_MRT4530_49198C.1
gattcgagtttcaggtgtataaaagcgaccatctatcagaagacgaaagctggccagaccaaatcgggcggatcgatcgatgagggtgatcgaatggagatgccacggctagattatttatgcccctaggattctgggagctgaggaggaggatgatcacatggaagtgatgaggcggtttcacttagagctgtgcacgcacgggaggagcgaaccgcaagccgtgctgggtgaagcttggcagctgaaagcatgagagaaatggcttctgcgtgcatgatgagcatgagccttgttctggcttcctctgcctcctggtcatgcgagtctgatgcaactgggtgcatgtgtgtgcaagcaaatgcctccttgttcaattggagctctgggagagccagaaccaaccactgaaatctatctcaggaggaggggatcagccatgctaatggtttatctgaaattttatccgggcgcaattagatctagtgaaagtttagaaatcacaaacccctgatttcgatgtattttcttctttaactttgctgcgatttcacacattttgatcgtcttcacggtctgatacagcttggttttcagccgctcgcatgccgatctgatcttcgtgtaaaattttaccagattgtactaacattttgttgatgacgtaccggcgttattttgtaaa

SEQ ID NO: 46321 - DNA, 137 bp, Oryza sativa
  unsure (1)..(137): unsure at all n locations
  Clone ID: PAT_MRT4530_49199C.1
tttcatgcctcgagaagtcgtcntgccgactttatatagatgccgccagtgatggcagtatagaacttttaagcagcgcggcatcggttacttacaaaggtaatcggctcattacagagtggttcaaagtgaaatat

SEQ ID NO: 46322 - DNA, 493 bp, Oryza sativa
  unsure (1)..(493): unsure at all n locations
  Clone ID: PAT_MRT4530_4919C.1
ccaccactagtctttctctcctctcgtcgccaagcgaagcgagacagtctcgtgcgcctccggctttcctctccgacggcgacgcgccgacgtacgacgccgtggacgagcagcagcgctgtggatcgacgagcggcgatggcgaaggcgcggaagcagcagccgcagggcccgttcgccggcggggccgccgctggggagaggtcgttcctcgggttccagtaccaccaccaccaccgcggcggctccgtggcgccggcctacggcgacgacgacgacctccccgatttggcggaggctgatgttttggtacgcgccgtcgtcggaggggggcgcggttcatcgaggcggcggcggcggcggaggggagggaagggcttgnaaatcggcggcggcggctgcggcggagggaagcacaaggtgggcgggctgagccggccgttcgcggacgggcggcaggtggcggcgtcggcgcccgtgcaggtgcccgcgt

SEQ ID NO: 46323 - DNA, 3705 bp, Oryza sativa
  Clone ID: PAT_MRT4530_491C.1
atggcgaacactatggaacaagtacagcgagaggcgaaggatcgtgtgggtactctgccaagccggaggcctcttgggcgaaggacgcagggcgaagagtatatgccgaagggagacgacttcgccaaagcaagctccccccgcgagggccaaagaagccttttccggcccatcaagcctaggggccattgggccgacgatcgcctaacggcccatcaggagtccatgaacctctattacactatgtactcatttgtcgtttcgacaacagctggtgccgaccgtgtggacctccgagcgaaaccactgagagcgaatgccaccgaagaaggtcgtaaaggagaaggttacaaggcgaaaggaaagcgacgccggggcggatatggccgccgaagagggagcagagccttcggcgcctgtcgccgaagatggaggagcgccatctgcttccgcacctgcgctatcactaccgcctttggcccctgctacctctgtgcagaacagcagcaagcgtacgaggcggtccaaggtcgcttcggcaccaatcctccagtattcggcaggttatgtcccaccccaagtctatccacaagtgccgacccagccccttctgccataagttgtgcaagcgccaatgtacttcgccgggcagccatcgaccgcagcagtgcatccggcccctcacgtgcaactgcaagctcaaccggtcgctgcccaagtacatccttaaccgcctggccaagtgccacaaacaatggcagaaggggcttcagctctgcaggcgcagctccaagctttccttcagcagctcagccaaccccacaacatttcaagtacaaccccttcggcccgcccggaggggaatacaagtcaaggtgcgcctcgttggttgccttcgaatcagctaggtctggggacttcgccttggagtcaaggaccacagttcgactccatcaatgctgcttaggcgccaaccgttcggccgcaagcaccaacgccaggtttcggagcaaaccaagcaccaaaccaggtcgtcatgacatggtcacagccaactttcgacccattcatggcggtacagcaagcatcaccaatcgggccgggcagccgaatgccatggcccaacctcacgcgcaagccgtgatttcgcccttcgccacgccatacccgcagcaaggtgccatgaacagggcagggggcgaaaaggggctaccattgagtgggggaatcaagacccgtccaatcccaccccagttcaacttcccacccgtcccacgctactcaggcgaaactgacccaaaggaattcctctccatttatgaatccgcgatcgaagcggctcatggcgacgaaaataccaaggcaaagaggccgggggagtcgataagggagtacatgtgtcgcttctcgcaagcccggtgccaagttcaagacataactgaggcatcagtcataaacgccgcttcggctggtttactcgagggcgaactcacaagaaaaatcgccaacaaggagccgcagacgcttgaacacctatttcgcatcattgacgagttcgcaaggggcgaagagaattccaagcgacggcaagcaatacaagctgagtacgataaggcttctgtcgccgctgctcaagcccaacaacaagttcaagttgccgaaccacctcctctcgttgttcgccaaccccagccggcgatccaagcacaaccgccaaggcaaggattcggcggagaagcagttcaagttcttggccaagcacagttgatagtagccttcggcacgggggaaaacagacgcgaagagcaagtattgtttgatgttgtcgacatcccatacaactacaacgccatcttcggccgtgcaaccttgaacaagttcgaagccatttcccatcacaattatctcaagctcaagatgcccggcccggcaggagtgatcgtggtcaaggggcttcagccttcggctgcttcaaaaggcgatttggccataatcaatacagcagtgcacaatgttgaggccgaaccgcatgaccgggcgaagcacacgccaaagcccgcccctcacggcaagataatcaagatgcagattgatgatgccgaccccataaaactcgtatcactggggggcgacatgggcgaagaagaagctaagaacatcctagaggtactcgaaaagaacattgatatctttgcctggggccctgatgaagtgggaggtgtttcggcagatctcatcatgtatcacctagcagtcaagccagatgcaaagccaaggaaacagaagctacgcaagatgtccgctgatcgccaggaggcagcaaaagccaaagtccaaaaattgctcaaggcaggggtcattcaagagatcgatcatcctgagtggctggcgaatccagtgctggtgcggaagtcaaatggcaaatggcgcatgtgtgtcgatttcacagacttaaacaaagcatgtccgaaggatgatttccccttgccacggatcgaccagctcgtggattcgacagccggctgcgaactcatgagcttcctagatgcatattccagctatcatcagatttgcatgaacccaaccgacagccccaagacagccttcatcacaccgtttggcaccttttgccacctcaagatgccttttgaccatgcgtccgacctacaggagaccttcgacaacttgcgcgcaacatctcgcttacgccctggtgatggctcacgcaagcttaagcattactttcaggcccacaaagtcatagtgccatcacagtaccctttgggcgaaatactccggggtaaagaagttactggccggcttagcaagtgggcaacagagctatccccttttgacttacattttgttgcccacactactgtcaagtcccaagtgctagccgactttgtggccgaatggacaccggcattcgcccctgaacccgagctcgtcgaacagccctgggtgatgtactccgacggttcgtggtcgcacaagggggcgggtgttgcggcagtactcacttcgccaaatggtgtgccaatttggtatgctgcaaggctacagttcgacacaaccaacaatgcggtagaatacgaagccattcttttgggcctaagaaaggcaaaagcattggggattcggcgcctgctaatccgaaccgactccaagctggtggcgggccatgtcgacaagtcttttgaggcaaaagaagaagggatgaaaaggtatttggatgccgttcggtctatggaaaagtgcttcaccggcataacaatcgaacatttacctagaggccagaacgaggaagcagacgccctggcgaaatctgccgcttgtggtggcccacattcgcctggcatcctttttgaggtcttgtatgcaccaagcgagcccacggacagcttggaggtcctggcaatcgaccaggtcaaattgggcgaagacccatacgactggaggaccccgtttgtgaagcaccttgaaactagctggcttcaggaagacgaagcagaggcaaagcgcttgcaattcagagtcacgaagtataagatggtctcgggccagctctatcgctacgggatacttcaaccccttgcttcgctgcatttctttcgccgaaggcgaggaaatggcgaaggaaatacaccaggggctatgtggcgcgcactaaaccgcaagaacagttgcctccaaagtatttag

SEQ ID NO: 46324 - DNA, 3441 bp, Oryza sativa
  Clone ID: PAT_MRT4530_49200C.1
cccacttgtctgcagagaaacctcacttctctatatgtttggaatggctcctgtttacggcatttgatgcagagatatcaagccaaagtgcttcaaaaaaccagctttcgcagaaaaatgaacctgcaaagaagtctcttctagacaagacatgtgacctacttcgaaactttccagaatacatggatgttgtagtcagtgttgctaggaaaactgatggtcggcactgggcagatcttttacatgcagatggcggaagagaagcttgaggaagcgtctaaggcggcgacggcggccacgcagttccagcaccaattggataaaatcatctccttccagccaaaaatggcagagtggaatcctgagaaggatctatttgctgtggttactgatgattcttaggattgcctacatcgatacaattggcaaagcctatggagtatctccctagggatgtgagtcacttctagttgtttgctccacgatggtagaatagtatcgcttggtaccgtaggtggtttgactcttttgcatgatgttcagtgcgacaaggatttcttgtttggctatgaagatatcgttgcacgctactttcctacctcacatatgattcagcgtctcggtttcccgagttattgacacactgatctttcatatctttatgagtaatcatttcagggtttttcaagtgccacgtatcagttctttgactctctacttgttagttacagtccatgttgtatgtgtattagccatgttgggatatccggagaatggtcacctgctagtagtcctgtttttcagctttcagcagttccagaacgttcaatcattagtctaatgagtccacctcgtttcaatgcgctttattacgaaacgctcatttatggtgaaactgagaagataggaatgctagttgtctgacttgagccaacaaccttcaagatgcctaatcttgcggatgaatggggaactttctgtgttggacatggatgatggacatgaacaatcacttactaattcagttgaattattttgggtcacttgttcccaatacgaagagaagggtaatcttatcaaagaggtttcatggcttgactatggccataaggggatgcaggtgtggtacccatcccatggagaaaatccttttaaacaagaagatttcttgcagctggatccggagcttgaatttgaccgtgaggtgtatctgatggtcctggaagttcttatattgtaatgctgcagatggagaacttctcttttgtgcctctctcaaggatgttcccttcaaatatttacagtgtacaagagctgtcgcctcaagaggagtggcttgtgtcttttcatctcggcggcatgctttggtttatatccttgatgaagatgaggatgaggatgaggatgaatcttctgatatggaatgatcatttttatctgattcacaacagcttgcagctcatgcgcaatctcttcccccctcgcgcatctcgcccaacaacctcaccggcgaggcgcgcgcccggcgacgaggaccccgccgccgccgccgccgccgccgagatgtacatggcgtatggctggccgcagtcgatcccgctcgacccgggggactccgaccgcgtggtcctcctccgcgtcctcggccgctacctcctcgccgtctgcccggcctccctccacctttggtccgccgcccaccacaaggtccgcctcgcccgcctcgaccgctccccggaatccctcgccgcccacggcgacaacgcccactccgtctggagccccgacgccaagaccgtcgccgtcctgacctcgtccttctacctgtacatatacaagctgcagttctcggggaagccgctgatcatcggaggcaagccacaaccggggctctgcctcgcctccatatcgcaaataatcgtcgagaaggttcctctcgccaatgacgctttcataacgagcaatttcgtgtgcgacagcaagagtatgctgcttggactgtccaatgggcacttgcaggtcatctcctggaatgctgagttctcggacagcttcaagcttggctgctccgcatgttcatccaacagaactcccactgtcggagatgctttggtgtttgacccgcctagtttgcgagaaaattctgatgcaagtcctgcaccctgctgcacagggaattccaccattattcatgttgagttgtcagtgaagctaagattgctagttgctttgtactcgggctgtcagattggactttgtgcagttggtaagaagggattaaagcaaaccagcagcatcagagtagagagatggttgaacactgatgacgcgatgtgcacttctgtggcttctgatcagcagattcttgctgttgggtgcagtagaggtgttgttgatttatatgacctagctgaaaatgcaaggcatatccgcacaatttctttgtatgattgggggcatcctatatttcacagaattggccagttcttcatgttgttgcaagcaatgatgctttcaacagtccgagaactttcaatcatgagtccaaagagtccacctgtttcgatgcgcttcattcctgaaccaactgatgaaggaaagccgaaacatgatactaatggatcttctgacttgtcccaacaaccttcaagatgcctaatcttgcggatgaatggggaactttctgtgttggacatggatgatggacatgaacaatcacttactaattcagttgaattattttgggtcacttgttcccaatacgaagagaagggtaatcttatcaaagaggtttcatggcttgactatggccataaggggatgcaggtgtggtacccatcccatggagaaaatccttttaaacaagaagatttcttgcagctggatccggagcttgaatttgaccgtgaggtgtatccgcttggtcttcttccaaatgttggtgtagttgttggtatttctcagagaatgtccttctcgactgcagagtttccatgctttgaaccttctcctcaagcccaaacaatattgcattgtttgctgcggcatctccttcaggtcattgcgaagctggaaggccctgctgtcagtcagtactgtgcactccgtttgctacaagctacacttgatgaatctctctatgagcttgctggggagctggttcgcttcttgctaagatctggcagagactttgaaaatgccagtacagactctgaaaagctttctccaaggtttctgagctactttcaattacgttcaccattcaagagacaatcttctgatttgagaagtaactcaatgaaagagctcagcccacatattgcctctgtcatgaatattctggagaaccatgctagctatttgatgtctggcaaggagctttctaagctggttgcttttgtgaaaggaactcagtttgatcttgtgggtctgctcgactag

SEQ ID NO: 46325 - DNA, 269 bp, Oryza sativa
  unsure (1)..(269): unsure at all n locations
  Clone ID: PAT_MRT4530_49201C.1
attctcggtcggtcgcataatctgaanaaaagnaagtggcgtgtgctgtacactgctattgaacagatgaatgggttgtactcctagaagttagtctgcacagggcgtgtgttatttgtttatcatcattgtaaaatactagtactacatttcatctttctatcagaagaagaaaaaaagaactacatttcatttgagagatatacaatttactcggtgtcaaaaaaaaaaaccacgcccctgggccaactaatttcaaggaaacaacc

SEQ ID NO: 46326 - DNA, 360 bp, Oryza sativa
  Clone ID: PAT_MRT4530_49202C.1
gtatcagtattaggttttttgtgtcttacccaacaccgttgtagaggtctgtgtcgtatgtgatgattgatgcttggaatgctacatgagaatgagattgactgagattggaaatgagtgagtgctgaatgtgcaatgttgctgtgtgtttgcactggcatgccacttgaatgttgcaatgcaaagtgccacaatggaaaaaatgccatggagggagagaaaaatgaatgatggagaatgagactatgagtaaaagaaaaaaagtaaaaggaaaaaaccagcgaatctttcatgcttaaacatgtcgcgaaatgtttcaaagagcataaaatttattcctaaaaaaaaaaaaaaaaaaaa

SEQ ID NO: 46327 - DNA, 225 bp, Oryza sativa
  Clone ID: PAT_MRT4530_49203C.1
atggaggagagcgagcgcgagacgctcgtgaccgaccgacctggcgccgtagcgcgcgcgggcgcctcctacccgcgaaaaaaagtcagacgcatgggtggagactggagaggatggggagatgggcgggggcggacgcggcaggccgtcggcgcgcgggatgggctcgacattgagatcctgagcatggaggcggtggtggttggagaagaggggaagttctag

SEQ ID NO: 46328 - DNA, 877 bp, Oryza sativa
  Clone ID: PAT_MRT4530_49204C.1
ggattcagatttgaattcaaacaaaaagtccctagcggcttgggataaaggtttgtaagcctaaattgaaaggaggtttgggagttattaacctctcaattcagaatcaggctctactgttcaagcttttggagaaattctataataggagagacttgccttgggtgaaccttatttggtcttcttattatggtaacagaatcccacatttattgttttcttttgctctgagtcctaattcctcagtcgaaaaatctctctcagtcccttcagaggataatttcaatgtacctctgtctcaagaggccttgcaggagttccagacacttcagatttagttgcagcaacataatttggatcatgagaaagacatatgggcttttatttggggaactttgagatatagttataaaaaattctatgctctgaatttttgcgctttgcaacctccccagcaatttatatggttatggaatagcaaagttacttcaaaagtgaaagtttttggatggctgcttctgatgaatagattaaatactaagtatatgcttcatcataagcattttgcgcctccaaattgtgatctgtgctgtgttctttgtccttctcagctggtagaagatttacaacatcttttcttcctttgcccctttttgatcaattgttggaattccctgggcatagtgtgggacagttctctgccttttgatcagatatttttgcaagcaaggagtaccttacagatctgttgtttcatggaaattttttttgtaggtgcttgatgggtggagacatgagcgccacccgcgatgcaaaaacctttgcaaaaaccgaaaacctaatgaaacaaaatgttttcaactgggtgccatgaata

SEQ ID NO: 46329 - DNA, 279 bp, Oryza sativa
  Clone ID: PAT_MRT4530_49205C.1
atggggttgatggaagggtggtggttgtttcctccactctcaatcgagcccctaaagcggcaacttgatggtggtggggggtttgtctgcggcagggagcagggagtgggagaggttggtgccggcgcggtgccccgacctggacaaccagcacctgctactgcgcggcatggagaagagcaaagaggggaagctgagcgaaggcgcaggcgcatgcaggaccggctcaacatggacggtgacggagccagagtaggcgacgatagccgaggagactga

SEQ ID NO: 46330 - DNA, 795 bp, Oryza sativa
  Clone ID: PAT_MRT4530_49206C.1
atgcaggaacttcaacttctcctagtccttgctgctcttgtgctgctctccttcctctctcctgccacctcctgcacggagcaggagaagagctcactcctccagttcctccgcgagctctcgccggattccagcagcaagttctcccggtcatggcagagcggcacaagctgctgcacgtgggaaggcatcgcctgcggcagcaatggcacggtgacggagctctcgctgccgtccatggcgctcgagggccccatctctgtatcaattgccaacctcaccggcttgcgccgcctcgacctgtcgtacaattctctctccggcgagctcccaccggagttgatctcctccgccagcgtcgccttcctcgacgtcagcttcaaccgcctcaacggcgagctgcaggaatcttcaccatcactgcctcaccatcctcttcaggttctgaacatctcccacaatttcttcgccggggagtttccgtccacgatatgggagaagaagagtgatcttgtcgcgatcaacgcgagccacaacactttcagtggcgcgctgccgtcttctttctgcatcagctcgccatccttcgctgttcttgatctctcatacaacctcttcagtggcagcattccagctgagataggtaagtgctcttcactcagagtgctcaaggctagcaacaacgagatcaatggcagcttgtcagatgagctctttgatgcttccatgttggagcacctctcttttctgaagaatggtttggaaggagagcttgatggtaaatgtagtttgtga

SEQ ID NO: 46331 - DNA, 111 bp, Oryza sativa
  Clone ID: PAT_MRT4530_49207C.1
ggcgaattccaggaggaagaagacggtccaggacggaaaatgcatttttcccaagagttcgaggaagagcactacccgaacaagagaagatgccaagggaagattccctag

SEQ ID NO: 46332 - DNA, 180 bp, Oryza sativa
  Clone ID: PAT_MRT4530_49208C.1
gcgtttcttttcacaaaaatcaaacaacaagaaattggatggcctagtgtgtgaacttcctaaaccctagcgcggaggggagcttgaacaccatgaagccgttcgacctgaccgtctgcggatctcacagcggggcgggtcgcgatggagctgtactcgaaggaccttgcgcggactttc

SEQ ID NO: 46333 - DNA, 333 bp, Oryza sativa
  Clone ID: PAT_MRT4530_49209C.1
atgggcctcgagagttcagaactgccctatgggcccatgaagttctgggctgcccatcgagtaacgaacaatgatcatgaggaggaggatgcttgtgaagatcctgttgacccgttagagtgggacagctatgatttccagcggcaggcgggggtggcgagcggtggcggcggcggcaaggcgaggcggcggcagcagcgggagctcgcgctgctcgagcaaggcgaggcgacggcggtggaggaggaggcgagcgacggcagggtgcggctgaggagacgagcggcgacggggtgcggcggaggaggcgagcggcggggaggacggtggtga

SEQ ID NO: 46334 - DNA, 271 bp, Oryza sativa
  Clone ID: PAT_MRT4530_4920C.1
ccagcgaccgcgcccgagctctgcccgcgctagcgccagagagccgccgctcgctcccgagcgccgccgcacccgcgccatagctctgcctgtgcccgcgcccgagagccaccacgcccactcccgagcaccgccgcctgctcccgagctcgccgccgcgttcgccgcgcactccgtggagggagaaagggccgtgaatgcaatatgtatgacaatcacaatagtcaccttctgctccactacgatgtacatgacagaggtgatggcttga

SEQ ID NO: 46335 - DNA, 1071 bp, Oryza sativa
  Clone ID: PAT_MRT4530_49210C.1
aacgatgcactatcagtcgcgcggtcaagaaactacccccacgaagacacgctgcattgctgcagtgagaaccgacgtgcaatcaccgctgtacacgcgcttacgtaccaggtatagggagctcagtcagtggtccgccgaagtcggcgtcgagtgggtgcacagccgcgatccggaagcaccgacgagagaccgcagcgatagaggatcataagaaacgaccgaaagttacgtcgtagacaaagcggttttctcagttctggccagagcgccgaagagacttcgttggacatgtcttcaaggtctaccgcactggatcgacataatgcagcgcgcgcgcctgggaggaaccaccccacacctggcaccccacacacgaacatagaaagggagactccagagtcagtctgtagggatggcgataccgaatacgaacgtctactcatacttcgtcgcacagtggcgcggagcagcacaccgggggagcccaatgcccgcttagcggccaattccctactcccggggaggcacggccatcgtgcgtttgatacaaagccagggcgctacaagacgcgctaggagacctagacaaggccttgatgcgcacggaaccgcgccaccatactcggcccgacgcacccgcttcacgatggacggggcacctaccaggcccctcagctcctcgtcgttgcgcacggcgagctggatgtgcctcggcacgatccgcgtcttcttgttgtcccgcgccgcgttcccggcgagctcaagaacctcggcggcgaggtactcgaggacggcggcgaggtagacgggggcgccggcgccgacgcgctcggcgtacttgccggccttgaggaagcgggcgatcctgccgacggggaactggagcccggccttggagctccgcgacgtggccttcttggcggcgctcgagccgatcgccttgcccctaccagccatggctaagctaggattccgtcggcgaggaagcggaggccggagacgacgacgacgcggcggcggcggcgagcgagcggcggtggagtggagtggattgggttgcccggccgg

SEQ ID NO: 46336 - DNA, 475 bp, Oryza sativa
  unsure (1)..(475): unsure at all n locations
  Clone ID: PAT_MRT4530_49211C.1
atgccggtgggtggcgaggcgctagagaggcctccatccaaagccgcgcaaaacgccaccacccacaccacgctgcactcgcgacgcgagggaccccgccggcggcggcgcgaggaggagaaggagaaggagagagagagagagaggatgatcctggtggcgatcgtggcggagctgctggaggagtacacggcggcggtggcgcgcgccatggagctcctgctgtcgcgggcgccgccccgcatcttcccgcgccgcgtccgcttcctcgtcctccggagcctccccttcgcctcgccgccgccgtccccgctctctcccccgccacccttcaccgtcgccgccggcacccgctgatcgatcgatcgatcggtccatgacgggctccacgtacgtanggcaaccagcaaaganagtacgctggcttgctgaagtagtctcgccttcgaaatcatgaattaaactgatcgagcgt

SEQ ID NO: 46337 - DNA, 258 bp, Oryza sativa
  Clone ID: PAT_MRT4530_49212C.1
atggccaccccagcatcggcggccgccgaaggatgccctccctctctctcccgcctcgcgtccgcggtaggaggagccgtcgtctccccttctcccgcgtcggccatcgccggccgccgccaccccaacatcggtcgccctcccatccacctcgcgcccgtgctaggaggagccatcgtctcaccttctcccgcgtcggccgccccgccgccggccgccctccctctctctcgcctcgcgcccgcgggttcggcctga

SEQ ID NO: 46338 - DNA, 385 bp, Oryza sativa
  unsure (1)..(385): unsure at all n locations
  Clone ID: PAT_MRT4530_49213C.1
tcgcatgctctcccttatnnnngncggcatgcacgcaagtacaagtttatgttaagcttcctttttaacaatattttgctttagtgatattcagtgcagtgcaaaaatcgtatatactgcatgtttccttggagagggtatatgctgctttatttcctataggggtatatagtgatttttttaaatacacaaacaatggaaaggtttgttttccattttcagttaatacaaagctatacattatactaactatttaagagaatatttctattatcatgtgatatattataccatgtgcccaaatatccaaatttgggtgaatatattagcttgctttagtaaggcccataaagatgaacagagctttaggggggatgaatttgat

SEQ ID NO: 46339 - DNA, 380 bp, Oryza sativa
  Clone ID: PAT_MRT4530_49214C.1
ttttttaggaaaaacaagtaggaaatgaaaggttcaatcatttagtggttgtacttctggtcagacaacatgtattgttcttcgtggtggcgcagaccagttcatcgaggaagctgaaagaagtctacatggtgccatcattattgtgagtagagctgtcaagaacccaacagttgtgcctggtggtggtgctatggacatggaagtaagcaagtatctccgacgacatgcaaggacgatagttgtgaagtctcaatttttcgtacattcatttgctaaagcccttgaggttattccaagacaacttcatggcagtgctggattcactgtttctccctaagtagcaaggactagacagaaagctaaagctagagatggaa

SEQ ID NO: 46340 - DNA, 399 bp, Oryza sativa
  Clone ID: PAT_MRT4530_49215C.1
ttctggtcgatcgcccataaccacgggcacagctatttgaatagttttagtttggccagaggtgcacaactgtactcacaagacacaatccaccggcatgtcaacgcgcccggccggacacgtcaccatgttgagtgattgtgacgagacccttcatataaccccctctgaccaagcacaccacacctcaggtttcacccccactcctcaacaggcaatgagcagcccccctcgtggctaggcgaatcagcaagccgcataggccatcgcaaggcccatctgaactccatcacgcttacccttgcctggatgcgtcagccagaggaaagctatactacagatcaagcagtcacccattcccgcttgtggtaagcgcggtaagtcctctagtgcatcccg

SEQ ID NO: 46341 - DNA, 429 bp, Oryza sativa
  Clone ID: PAT_MRT4530_49216C.1
atggagaagatgcgtcgcaggcgacaggctgtgaggaggccggcgacgggctgtgaggaggacggcacccgacggcgggtggtgaagaagccgagagttggcggaggaccgaggcggggaggacggcgaacgttgctggtggagaggtcgcggacggctgtcgctgctaggaaggactcgaggccaaccaacgcggccgtcgcggcggcaagcgtgggcaaggagacggggagtaaagggatgaggaggaagggcggggtcgagccatggctggttcatcgtcttggctacggcgaggaagcgtcttccctgggagtgaggtccggcgccggctcccgtccgccgccgttcccctcccgcccgccaccattcctctcgtccttccactgccacgagccaccgccgccgttcccctcatcctcccactag

SEQ ID NO: 46342 - DNA, 749 bp, Oryza sativa
  Clone ID: PAT_MRT4530_49217C.1
ttgggccgtaggcccacttcctcccgcgcccttcctccttgctgggctggcccactccctccctcctctctccgggtcaccgacaggtggggcccacctgtcggccccttcttccacctccagccgacggtggcaatcaccgccgaaaccgccgcgccgccgccgctttccccgctcctcccgcacccactccgtgccccacgcccctccccacattgtcgcgacgccgccctcgccttcccgcccgcgccgcgcgcccacaaggggcggattcgaattttgaatccccccagctctctctccccactcccccacgtcggtgagaaatccggccgcctcccagcctcgtccgtccctcccgagcccatataaaccatccccgcattctcctcctcatttttcctttttccatcggccgctcccgagctctccaccgcgcccgcaccgtgcgcccacccgcagccgccatctccactgctccggccgcctctagcagccgctagggccgccgccgcaccacgccgccactgtcgtcgggttcgcgcggccgaggtccgcctcgtccacccctcatccgtcacaatccgtcgccgaagatcatccgtcacaatccgtcggtgtcccggagctcggccgctgttcgccgtcgccctccggtcgctcgccgtcgccgttcgtcgtcgcctcctcccgcgccgtccgaaccccggtgaggcacccctcccccgtttttccccttcctctccctc

SEQ ID NO: 46343 - DNA, 507 bp, Oryza sativa
  Clone ID: PAT_MRT4530_49218C.1
gtattgttcaccagctagttactagcgtcaaatgttgggtcagagtaccatcgtcagctgcttgaaaataccatgttatgtggtggcaccgcatcaatgactggttagttgccttttgtttttgatgtgcacctttgctctattcaaccttgtgaggtataggtcaaatagcgaaagggcctctaacgtaatggttaaggcttccgagtagcatcttcaggtcttggttcgatccctaatttcgggcttggttaaaaaaatcccctcgctgtgtcccatccgttctcggttatgtcctgcgcgtcacccctctggctgggcccttgcagagtgggcagaatggattttatcggtcaagaccatgtttcgatctcttcttaatttaatattgggagggcggtctttccctacccggccgagtttttttagctataggccaaatgcatatcaattagctgtatagggcaaggtatatcattttggtttaaacttacatatgttttctag

SEQ ID NO: 46344 - DNA, 258 bp, Oryza sativa
  Clone ID: PAT_MRT4530_49219C.1
atggcgctggagctcggtcatgtccacacatcggctggcggcgccacgtcatcaatcgaatgggattcctgcgctggacccatccccacattgtcgactcgacgagatctgagaaactctcgacgtatcgaaatctcctggtccttcggctgcacgcgatccgcgacactgaccgctgctcctcgccggcgcgccgtggtgcagctgccggtcagggatggcgaagctcaggggctcagggcctcgggttgcatttga

SEQ ID NO: 46345 - DNA, 235 bp, Oryza sativa
  Clone ID: PAT_MRT4530_4921C.1
gtgttcaccgcgtttacataaaaaaagttatttacaagagcatttttaatcttggaaaccaagaaaaataggagcaagtcaagccaccatagggacaccaaactccgggaaaaaacaagaagggaaagaaaaaaaaagtccccctactaaaaaaaaaaaaatcaaggaaaaacgaaatcttaagagaaccccgttattaagggaaaaataaaagactaccaccggaatagcaagc

SEQ ID NO: 46346 - DNA, 590 bp, Oryza sativa
  Clone ID: PAT_MRT4530_49220C.1
atgtctaaacttagtaccgtgcttcataagaaggatgacgcaaatgaacttttaatagctcttaaagctgagaaagaggaactagaagcagcacttaacagggagcaagtgcaaactatgcatcttaaagaagagattgctgaagcagaggctagaaatgcagagctgacgaagctccggcacagcatggggtgtggatggcggaggacgcggtcgccagcgacgagctccggcgtggccgccggcgtcgagctcccggcgtggcatggctgtggatggtggaggacgcagccttcctccggcgacgagctccggcgtggtgcggcgcgtggacagcggaggacgtggcccccggcgacgagcctggcgtggggcgtggcggcggcggacgcgaccgccagcaacaagcctggtgtggggcgtggcagcgaaggacgaggccaccggcgacgagctccgacgtggggcgtggacgacgcaggacgcggccgccggcgacgacctccgacatgaggcgtggacaacgaaggacgcggctgccggcgatgacccccgacatagggcgtggagggtggggccactggcaatga

SEQ ID NO: 46347 - DNA, 886 bp, Oryza sativa
  Clone ID: PAT_MRT4530_49222C.1
ttatttttgaaacggaaaagggaattattgcgtcagtgggctcggctcacggtggaccgagtgcacggcgatggtctacggaacgggcggccgagatctatcctatccaaaacggacggccgagatcaactcggtctaccgtggtctacggcggacggcgtcgatgacgtcagcggtgacgtcatcaccggcggcggctcagccttgcatgctcgccggcgaacgacggcgcagcggcgcaaacggaggacaccaacgggtagtgggcgacgcggcgaaccttaccgagaaacgaacggcggcggcggcgacgatcggcttgacgacgacggcgatgctccggcgatcctcggtggaaacggaggggtggacgaggacggcgacgacttggcgatcacgacggcggccttcccgagcgacgacgacgaccggagcgacggcgacgcacggctggacaaacggcggcgacggcggcgcaagatctcacgcggaggcggcgctacagacggcggcgggctaaggcgagggtggcggcgggggctaggaggcggcgacggaggcccatagcgaccggcgacggcgatggaaaggttagggttagaggagagagacgaatccgaatcgagctcaaatccatcggtttccaaacgattttatccgaagtttctatagaggaaaagatagaggagatcaaggggattatttcccctcaaatgatttggccggagcaggaaaggacaggtgggccccacctgtcagcgagcgagagcgcgcgcgcgagcggcggctcggctggtgggctaacttgggccggggagagagagagggcttttgggccgactttcggcccaaaacaaaaagggagattttaaaacctttttcaatt

SEQ ID NO: 46348 - DNA, 2377 bp, Oryza sativa
  Clone ID: PAT_MRT4530_49223C.1
ccccccggctgcgcttgttcgctgcgccgcccctccttcttttttttttttttttttttttaactaacataagatagtcattaattaagccgagatagttcagtgcttgaagattacatgccggatttttttttgtgggttttagagtggtttagactgaattacaacacaagatgacgacgagggtccagggacaacacgtccataatttacattcagtttcttcagtgcgaagtagcgagagcagctaataacggggagaactaaccaacacaagcatcttctagtattaaggaacacacgcccccacccacctaccgttgtagtcagtcactacaaaacatggccatggtggcgagccgccctgccaccatcagcgattcagctcattgtcatttcatcggcttcgactgatcctaccggtagtaagcctggtggtgaaaggctggggccattgcattgctgtagccgattccattgctgtatccagcataggccgggtaggtcatgggaggggatgggtatgacatgccgaggccgacgctggatacctcagatgggtggtggtatgcatagggctccctcattgccagtgtgttctggccacagtagagggggtgtgcagctggcctatcataagagtaaggagatgctgtaccgtaggaggcatgggacggggagcgaatgaatgtggcattggtcgtggtggtggcaggcgaagacggtgtaccggtgtagtcggtgagacggcctgccttggcagggggcatcggtcctccggtgcttgcccggatgcgcttgttggctggaccagagctaccaccgctggaactgcttgatgccgcctttttcttctcggtcttggccttctccagttcttccagccgctcacggagatcctccaatggaaactcagcttcgagtttgtggtcctcaacacactttataacagcccgcagtgcagactgctccttcttattggcattgctcccagattggccagtgctagtactcaggttatctgaatttgagggtatcttctttgaatcttcaaggtaggcttttaaaagaggggctggggggaatttttcctgaagaccagcctcatatgcaaagttcacagcatcaagttgctgccccttagtgataagctcttcaatgatatttaatgtaactatgcatactctaatcacactcccagcaataacccaagcaccactcgcggtaccacagcaatccgcactgcagctctgatctgcgattccatgaaggcctgaacaaattttatgagctttgcagtgactactgtatgctagatctaaagcaattaaaacgattctaggctccgcatcaacatccatctcatcctcgaggccgagtgtgatagcgagacgcggcatctgcctccgccacgagaagctcacgacgatcctcctgtagagctccttgtcctccttctctgcgactgcgaatgtcgcgacgtgctgcaggaacgcgtgcgcatccggtggcttggcgccctccaccccgcccttcttctcggccgcgtccttccactccctcgccatcccgcgcgccctctcgcgcgccgcctgcggcaccatggggcgcgccgccccgatctccgggtccggatcggccagcgacggcaccaccgcctccaggatgagcacgcacgcccacgccaggtcggtgggggacctcaccgcccgcttgtcgatggggaacacctcggagaccgcgtccatggcgaacctcgccggatcgacgcagcgcttgagcgcgtcggggagctcggcgcggagcgcgtccacctccttgcgcctcgcgaccacgaaggtgaagaacccggccgagtccatgctggcgcagagcgacctgagcccctcggcgattccagcggcgtcggcggaggcggagccggtcgtccccgcgtcgcccttggcgagggaatcgagccgggagagcgcgagcgagacggagccgtcgatggaggcctcccggcggcggagcgcctcgagcctgcgggaggtgcgcacgtcgaggaagcggcgcttggtgcggagcgtctcggagcgcgcggcgagacggcgctccagcgagccgaagtgctccgtgagctgctggtacaggcgcgtgcaggtcgcgagcagctgctgctgccgctccagctccgcgaagccatccctcaccgccgcgctcgtcgccgaatccacccccacccccaccaccgccgactccgccgccggagcggccatcgcgcaggcaccccccacccaaaccctagccgcggcgcccctcgatccgcgaaaccctagagctcgaggtgggggggtttgggctcgcgcgtccgcccacgcgtccgcccacgcgtccg

SEQ ID NO: 46349 - DNA, 410 bp, Oryza sativa
  Clone ID: PAT_MRT4530_49224C.1
aatcggccacctcatcgtagacccaatcggcggcgccgatggcgcctccgactactccctcccgcgccgccgccctccggttgtcttcctcgcggttgcggcttggcggctacatggggaagaagcgcggtggcacatggccatgggctcgcaggcgccgcccagggccgggaaccaggccgtgtcgctccgagaggagagctccgggaagacgcgcgccgactagtacttcatgcagagggagcgcaccctcgcacgtgacgcggcgtgggcgggcggggaggccagggctgggccccctcggcgccctggtggggcgacgcctgattggccctcccaaggtggccgtaattgcttacacgggagggttccttcaatggctctacttccaagattcctggaccacaggc

SEQ ID NO: 46350 - DNA, 454 bp, Oryza sativa
  Clone ID: PAT_MRT4530_49225C.1
ccctcccaagaaaaccccaaaagtagcaatgccagctaacgaccatatatgactcttgagatggactctagaatcactgagaccgaaaagagtgcagagtcaaaaaccccggagttccgttccgtccacagctgccaagggaccaggaggaccagggagtcgaagccagcacggagatgctcaggtaagcatgccctagaagatggccatcagtcctggagccagctgccacgggatggagagagggcagtccaaccaaaaggcgacagcacacggagtcaggcctgttgagcgaacacacagtcgagaaggatgtggttcgtcttctcaagctcctgagcacaaaagggacagaccgagtgggtatcgatgccacgctttttgagaagtgtttggctagatttcagctatagatcggaaaaaaaatgaaaaaaaattgaaaaaaaaggggaac

SEQ ID NO: 46351 - DNA, 1545 bp, Oryza sativa
  Clone ID: PAT_MRT4530_49226C.1
atgataggagctgcggtggctaggtggactggtgcggcaacaaatgacgttggtggcaagtgggttgtgttggccgggtatgctcgtggccatgggtgccggtggcgtgatggcaagcgggtcgacggtgggctgccctgcccctcagtgatggtggcagttgacgctatcatgggaattaaacttgagtatggtataaagaagaactggacaggtgatccgtgttttccagcacaactagcctgggatggtattaaatgcagcagtgtgagtggtaacaacactgcaaggataatatatttttttggatctgatggagatatgtgcaacaaaactataaatccacctccgtcaagaaagaaagtaaaaggaggagctatcatagccattgcagtagtggttcctgtgagtgcaattgttcttattctcgcgtatttgatctggagacagaaaagaaaacccaaaattctttcatacaacctgtattttcttgaaccagtttctacagatgatcctcccagagagccagaacttgatattgctccagcaagtagaaataatcatggaggcacactgctaaaagttgagaatcgccaatttacatataaggagcttgagaagttcactaataattttgaacggttcattggacaaggaggttttggacccgtcttctatggttgtttagaagatggaattgaggttgctgtcaagatacgctcagaatcatcatcgcatgggcttgatcaatttttcgccgaggttcaaagcttgacaaaggtgcatcataggaatctagtttctttggtcggttactgctgggagaagggtcatttagcactggtttatgagtacatggctcgaggcagtctctgtgatcatttgagaggtaataatggtgttagtgactccttaaattggaggacacgcgttcgagttgtggtcgaagctgcacaaggcttggattatctgcacaaaggttgtagtctaccaataattcatggggatgtgaagaccagtaacattttgttaagtcaaaatttgcaagccaaaatagcagattttggactttctaaatcttatgttagtgagacacaaactcacatatcagtcactccagctgggtcagcaggttacatggaccctgagtactttcacactggcaggctcaccgagagcagtgacgtttatagcttcggcattgttctactagagatagccacaggtgaatctccaatactaccggggctaggccacatcgttcagcgcgtgaaaaataaggttgcttctggtaacatcagcttagttgtggatgcacggcttggagatgcctatgatgtcagctcaatgtggaaggtggtagacactgcattgttgtgcaccactgatattggcgctcaacgtccaacaatggctgctgtggttgcacagctaaaggagagtctggcattggagcaaacttgtgagtatagtgccctcagtggaaccacgggcacgagtgataccacggtttcattggccaatgttggtccattagcaagatga

SEQ ID NO: 46352 - DNA, 227 bp, Oryza sativa
  unsure (1)..(227): unsure at all n locations
  Clone ID: PAT_MRT4530_49227C.1
cacagtggatgttttcttggatggttgccgctagaccctgacctcacctacctctcccccatggattactccgccatgccttctccttctccttcttcttctgacgctgcggcagcagcaagcggcctccgagtgctgcctcaacaggctgaggagggcgtgcggnggctgcggtatcgccgccgactacgacgacgggtggacggactgcgcgctgctcacctgcg

SEQ ID NO: 46353 - DNA, 515 bp, Oryza sativa
  Clone ID: PAT_MRT4530_49228C.1
tgacggcggtgatcgagaaaactgaaaaaggatttcagattgtgaaagtcaacgtcactcaaatgattaagcttggaagcctttgcatttgcgacgattgtaacaatgcaatgtttactggagttttcattggagcattaaaccgtatttactgcgacaattgttatcctttgtggtacgaacgcgccacattttatgaagaagacgttccgttcgaaaataaggccacaaatcgattaattaaccaagtaaattcataaacaaaatggaaaatattttagtaccagttttagatcaaacaaaaattcaagaaaaagctaacgaggcggcaatggccggagcattaaaagaagtcgaagatttttataattcttacaactcaccatatcgagatgctatcaaggctagtttaaggaataaagcagttgacagtaactttgacataccggatatagttgctgtattaaatcaaaaaatttcgcaggaaattgatatgattgcaaataccgccgtca

SEQ ID NO: 46354 - DNA, 217 bp, Oryza sativa
  Clone ID: PAT_MRT4530_49229C.1
actccatcttaacatttttaacattgcattttttacaaaatagcgtttttcctttttatctttactttattttttttcaacaaaccctcaataaccccatatttacccccataaattccattccactacctaaaacccttccatatttctcttcaaacaatatataatatctttttaaactaaaacataatccttcacaactctttaaaatttaacc

SEQ ID NO: 46355 - DNA, 729 bp, Oryza sativa
  Clone ID: PAT_MRT4530_4922C.1
cccacgcgtccgcgtgtgggtatggaggtaccatttgatctcttgggaacagtctatcatcaggtgatgattagtggcttaagcggttccattttctgtaaaaaaaacagtacaactgaatgtgcatttctttcagagacttttttatccttctttctgcagcctaattatgactgcgttgaaccttgaaacagttgcaacattaccaagctgaagatatcaaacaggactatgacactgggaaagatggactgttatggtcatgttcaaattggaatatgaaaaaattgagaatcttgggaatgcagtaaattcagcctgcagcaggaaaatagaactactcctataagtggaatcatagggttaagtgtgaccatgcagattcaatgttcaggttgtgcctactgcagcctctgttaaccagtgcactactactacccctgaaatattcagcctttgactcgacgatagttcttagcagcaacttcagattggagttccccaatgtaaacggcagaatcatgttctactgagattattgatcctccaaacatacatatatattagtttctcatcctgtctaccatctattgtaagttaccaataataacgtcttagtattatactcttgtagcattgatatgttgaaagagatgttatgataacttctccatgatctttatgaccaaattgacattaatttggctgatcttttgattcagctgtgtt

SEQ ID NO: 46356 - DNA, 441 bp, Oryza sativa
  Clone ID: PAT_MRT4530_49230C.1
atgggcggttgtgccttcgggccgcgggccgagtcctattatgccatgactgggccgtgggtgcagcccgtgggtaggcccaacctggcccggcgcgtcgttgagtgtggagacaacgagcaggtcgtggaagtgatcaaggcgtacgtgcggctcgggatcacgacggaggtggtggcgcgagcgaagacgtggtgcgcggcgtacgcgacgtacgatggcgtccaacacggcgcgttcgctgttccaggggcgggccggatcaagtcctggtgcaccccgtgcatcggcactgggcgcgtgtctctcgcgcgctgcgcgttacagctaccgccgcagcggcctacgcggcgctatttcccgcggcacgctgtccccgccgacctcacggcgctcctcgcacacgagctcacccgtggcatgcatgaacctcgccgttga

SEQ ID NO: 46357 - DNA, 387 bp, Oryza sativa
  Clone ID: PAT_MRT4530_49231C.1
aaacgcttcataaaagaagaacgtgacaaatatacaagagagagacgcaagaaggaaactcaaggaaaactaaaaaacaggcgtatagcaaaaactttgaccatcgagatcaaccttaactgtgactacacactatgtacatatccctcgaggtactagcaacatagcaaaagctgcagtacacctcaggacaaggagaaataagagctgcttgatcggattggatacggattaatatacttagttcttgccttacataccatccttatcatcctccgctttttcttgcaatgccattatttccgaacaggagcagcaagaagcagggcacccccttgaacaccaggcacaaaatggacaaggcgaaagaagggtccacggaggaac

SEQ ID NO: 46358 - DNA, 3120 bp, Oryza sativa
  Clone ID: PAT_MRT4530_49232C.1
atggcggccaacccctcctccccgtcggcgggcggcggcggcgacgtgtcggcgtcctcgccgacgctgccgccggtgcggctcgcggcggcgcaggcggcgtcggcggcggcgatccaccccacctcgccgcggtacttcttctcctcgctcgcgggcaccaacgcctccccgcaccggcgcatcgccatcgccgtcgacctctccgacgagtccgcgtacgccgtccggtgggccgtgcagaactacctccgccccggggacgccgtcgtgctcctccacgtgcggcccacctccgtgctctacggcgccgactggggctccatccccgtctccgtctccgacgacgccgacggggaggtcgcacccgcggcatccgcggaggagctgcagaagaagcgggaggaggacttcgacgccttcacgtccaccaaggcggaggacctggcgcagccgctggtcgacgcgcagatcccctttaagatccacgtcgtcaaggaccacgacatgaaggagcgcctctgcctcgaggccgagcgacttggcttgtccgctatgatcatgggaagccgcggcttcggtgcctcgcggaagggcgggaaggggaggcttgggagtgttagtgattattgcgtgcatcactgtgtctgcccggttgtggttgttcgttaccccgatgatgctgcaggtgccgacggggaggcagcagggccaacagatgagctgcacactgtgcctgaggatgaacctgtgtatcatgatgcacctgatgtgcagaaaggccaaaacagcaaccgccgccgggcacgagagctacggcgggagggcgtcgggccggccatggacgaggggctggtgtccgtggacaagttcagcggcggcagccaggcctacttcctgacgcacctccaccaggatcacacccgcggcctcggcgcggcgggcgggtggcgccacggcccgctctactgctcccccgtcacggcgcgcctcctccccacccgcttcccgggcgtcgacgcgtcgctcctccgccccctcgcccccggcgcctccgcctcgctctccctctcctccccctccaccggccgcgccgtctccgtcgtcgtcaccgccatccccgccctccattgccccggttcgctcatgtacctcttccgcggcgatctcgggtgcatgctgtacacgggggatttccggtgggagctgaggtgcaagagggcgcgggcggcgaagaaggcgctcctcgacgcgctggccggggataccgtggacgtgctctacctggataacacgtactgccacccgtcgctcagcttccctccgcgccccatcgtcgctgagcaggagatcttcaccacacagaccagcttgaccaggatccgtgccgttccaaggtacagccttactattgagagtcttgatgctttgaacacggtgtgccccactataggaatcatgccttctggtattccttggctctggaaaaacagtaaagggaaggccaagtctggtgttaaatcaccagccaagtctatcagatgcaaagggctagatgaaggcgcaatagaaatggactacgatcccctgtcaccgccaaagctatttgagaaggattcttataacaatgtgtattctgacaagacacctgagaagaacaaggtgaacaaaagcccccaggtcagcacgcacgagcgtgtaaaagaggcgttccaaatcgcatctggaagctggaatctcgacttgcttgtatgcaagtgcaagggcgttggacgaaccagtccgggcatatatgccgccgggccgccaccggcgctgctgctgaatgctgatagtattccaacgtcggaaagcagaactttcacgctttgccttgtcctcccaaccgagaagagagaaaaacgagtgtccggagccgaccttgcgcggccgggtcgctgtctccgcgggacggggtacgttggcttcgccgagaagaaaacgaatcgaaaaaccaaccaaatccaccaggtgatcgagtccgagtccggaactaatccaccgcggagacagcgaccgcgcgtccgcgccgagggctgtgacgtgtcgaccgagccaagaaccctcgcccacacacacacacaacaggtggaagcggcagccggagacgacgcgcgtcggcgcccctcacgtggaccaaccagctcggcccgcctggcgcttactataataggcgttgcacacgcgctcggaatttttccaagcccatccagcgccacccccacccccaccacctcctcttcttcttccctcgagctcagcgcagaacgcacgcacgcggacagagagggaatccccccgttgcttgcgtccgctcgcggctcggagacgagccgcgagcgttccaataccaaaccagagcatcccccggccttgttggatctttccggcgccgcccgcagcgagcgattcgccttcgggcaggcgcaagattcaatgaagaacaaccttgtgaaaaacaacatgctgaaagagttctacatcccaacttatatattcgtgccagagtctccagtagagaaggtttctcaaatacctagttgtccagtgattgtttttatcaacaccaaaagtggtggccagctgggacatgatttaattgtcacgtaccgtaagctgctcaacaattctcaggtgtttgatctgcttgaggaagctccagataaggtcttgcacaaactgtatggaaacatggaaaggctaatgcgtgatggggatactgttgctgctgaaattcacagaagattgaggctaatagctcatcgcgtccaattcaaattccacaagggtgcaaccgaccatgcttacatgagacttgatggggaaccctggaatcagcctcttccgaaggatgacggcaaggtcttggtggagatctcacatgccggccaggtgaagatgcttgctaccaaaaactgcattgctaaaggcatccatgaggcactgtctatgtcaacggttcatccagagtccagctcctccagtgacgatacggatgacgatgatgatttcgcggaggagaggaagaactttggtgctgcattgtcgtttcggtacatggatgatgtgaccaaagagtaa

SEQ ID NO: 46359 - DNA, 713 bp, Oryza sativa
  unsure (1)..(713): unsure at all n locations
  Clone ID: PAT_MRT4530_49233C.1
gtggnactagaataccacccgcgcgtccgaagtgagagaaaacaaagaaaaagggatttagtaatgcctccacttgtggatgatggtcttctggagattgtgggttttaaagatgcttggcatggacttgtgttgctatctccaaaaggccatggcactcgtcttgctcaggctcatcgcgtccaattcaaattccacaagggtgcaaccgaccatgcttacatgagacttgatggggaaccctggaatcagcctcttccgaaggatgacggcaaggtcttggtggagatctcacatgccggccaggtgaagatgcttgctaccaaaaactgcattgctaaaggcatccatgaggcactgtctatgtcaacggttcatccagagtccagctcctccagtgacgatacggatgacgatgatgatttcgcggaggagaggaagaactttggtgctgcattgtcgtttcggtacatggatgatgtgaccaaagagtaaaaaagcttgcttttcttactgagccttgtacagcatgtttgcataggacgtagattgctgcactaactctggaagctgcgccacctgtaagatcctttccatgacgaggttttgtacgtatggctgagttgttgtgtgccgtacagagccaactggggtgctgactatcttgtaccatgaccgtgagcaattttccaatccagtttttcttctgcagc

SEQ ID NO: 46360 - DNA, 1101 bp, Oryza sativa
  Clone ID: PAT_MRT4530_49234C.1
tcaccaccgtctcggatcaaaccggccaacatctcgcctcgccgagaaattcccaaacgaggaagaggggaaaaggagttcatccccatggcggccaacccctcctccccgtcggcgggcggcggcggcgacgtgtcggcgtcctcgccgacgctgccgccggtgcggctcgcggcggcgcaggcggcgtcggcggcggcgatccaccccacctcgccgcggtacttcttctcctcgctcgcgggcaccaacgcctccccgcaccggcgcatcgccatcgccgtcgacctctccgacgagtccgcgtacgccgtccggtgggccgtgcagaactacctccgccccggggacgccgtcgtgctcctccacgtgcggcccacctccgtgctctacggcgccgactggggctccatccccgtctccgtctccgacgacgccgacggggaggtcgcacccgcggcatccgcggaggagctgcagaagaagcgggaggaggacttcgacgccttcacgtccaccaaggcggaggacctggcgcagccgctggtcgacgcgcagatcccctttaagatccacgtcgtcaaggaccacgacatgaaggagcgcctctgcctcgaggccgagcgacttggcttgtccgctatgatcatgggaagccgcggcttcggtgagcaaagatagattgggtttaagatccatcagaatggcagtcatgtttctcacgcagcgttacaataacataattgtctggagtctgaactcgggatatcagagtatcagacttcagacagttatttgcgcacagcactacccgcagaatatacctccacggctccggctctggatcaaccgatcaggcatttcgatgggctgttggttcacgactgtcttcgaattatatttgcagagaactatctcctccagaacttgttcgattcgttgcttgttgattttcccaatccaaagacaaatagttcaggccgtgaaactctaaaagtgtgcctgttgctttctcctaagaaactgttggacattagcaaggtaagagagttgggacttgaacaacagcatgtgcacttgtcaacctgttacatggtcatt

SEQ ID NO: 46361 - DNA, 732 bp, Oryza sativa
  unsure (1)..(732): unsure at all n locations
  Clone ID: PAT_MRT4530_49235C.1
ctaatccaccgcggagacagcgaccgcgcgtccgcgccgagggctgtgacgtgtcgaccgagccaagaaccctcgcccacacacacacacaacaggtggaagcggcagccggtccgaaggtctcgggaccaaaccgaccagcgaccccacggcgtcattccgttgggcccacctgtcagcaacgtaattaggagacgacgcgcgtcggcgcccctcacgtggaccaaccagctcggcccgcctggcgcttactataataggcgttgcacacgcgctcggaatttttccaagcccatccagcgccacccccacccccaccacctcctcttcttcttccctcgagctcagcgcagaacgcacgcacgcggacagagagggaatccccccgttgcttgcgtccgctcgcggctcggagacgagccgcgagcgttccaataccaaaccagagcatcccccggccttgttggatctttccggcgccgcccgcagcgagcgattcgccttcgggcaggcgcaagattcaatgaagaacaaccttgtgaaaaacaacatgctgaaagagttctacatcccaacttatatattcgtgccagagtctccagtagagaaggtttctcaaatacctagttgtccagtgattgtttntatcaacaccaaaagtggtggccagctgggacatgatttaattgtcacgtaccgtaagctgctcaacaattctcaagtggttgatct

SEQ ID NO: 46362 - DNA, 231 bp, Oryza sativa
  Clone ID: PAT_MRT4530_49236C.1
atgtcgatgtccaatctcttggtccggcttgttgccgttgtcggggcccacgaggaagagggggccatggatgcagatcgtgagcagcgacgcaagggaagcttgtcctccgagcacgccgccgtcggttaccgaggtgcattcgctcgttggctctcccatcgtggcattgaggtcagccacggggtggggctccgctgccacgtcacaccgcccttctcctcgcgctaa

SEQ ID NO: 46363 - DNA, 2977 bp, Oryza sativa
  unsure (1)..(2977): unsure at all n locations
  Clone ID: PAT_MRT4530_49237C.1
ttttttttttttttttttttttttttttttttttttttttttttttttttttttttttgaggacaaacaagaaatatcataaaaccgatgcaacaaatgggttataaaatggtcccttcgagggtcctccctttatgtagaaacaaggacccaacaaacttcaggtatcatcaacactgtaatagcaataaccaaacatcacagcaatactaacatancagagcaaaaacaaacgcaacatatatgagttccatgggatgtagatgcatactacggcatcccctatttattnttcatacaaccaatgcaagaaccgtaacaatatatataaactcgatggcaaagaccgaggttctgagaacgattggtcggtgcggtagcaccaatatctttcgacctttcaagaagtgaatgtgtgatcaatgattaccttcagtccctcagtgctatctttcaaatctcgtaccaacaggtcatttatttgagcggtttgcttatcctcttctcttggtttagcttctctgaggcgcacccctttgagatttcctagcgtgtcaatgccaaataggccttcaaacgcttgaaactgcatctcaatcatctcaagggctggcattgcattgtgacagaagcctagctttggaacaagaggtgcaaagaagcgaagtagcttaagactcttgaatccttcacctggaacaaagatctccccatcggacagtgatttgttgtcctcgatgatgtccttcatctttttgtcctgatccttctccatctcaccaaatgagaaagaaaaggtaagagaaaacagcggcagggcacggaggtgctctagagtatctgtccggagaactgttagagacagagttagcttgctcaatgtccgtagtgtcttgatccaacctgggggttttttcaacatgccggaaagctcaagggcaacaagatatcttgggggtgcggacatgttacccaaggagttgataaaattagattgaccttcctcattgatcgccaaagtctggagaccacagctgcaaagatactcaatagaagagcgtagttctgtcaagattttccttgtgcccggttcctctgggttgagcttgagcttgtaaatagtaagcttctttagacccgtcaattgatgaaggcctgctacagctgttgtctcatcgatcttgatcccagacagtatccggagtgctttcattccttccttctctttatcttgggtcaacatacttttgtgttgctgcttcttacttttttcttgaggcagcctcaaccctttccgtgggtttttgtttttactcccaccaagtattctgctgattagttttagctgctctacttctttcggcagctctttaacacgtgtttctcttatgtcaagagtttccaaatactcgagcttcacaatcgtcggcggaacatgggtaatatccgtccctcggaggctcaaatactccttctctacctcctccaccggcagcgacagtgtgggaaggccactggccacctcctcctctcgttccttcccaccagccaccggcgctcgcgggtggccagatccggcgccgctgctcctcccctccgtcccaccccggcgctcatcggcggccagatccggcaccgctgctcctcctctccgtcccacccccttcccatcggcactcggagcgggcagatctggcacccccccaccacaccggtgctcaagggcggccagatccggcgcagccgctccaactctccatcccaccctcatcccatcagcgctccaggcagccaaatccggcgccgccctgaccaccggagcttgggggcggccagatccgacggtggtggtggaggaggccgggtgtagtggacgttggcggaggtggaggctgggcgtggcaggaggcccccacgaaggtgcagtgggttcatcgcggccccactgctgcggcggcggcgggtaggaaccaccgaggctgacgaggccgtgcagactctttttatccaggagcttctttatttggctttcgagtttgttgtcggtggtttctgtgcgctttagattggaggtctcctcaatactgcgagggctgctttgacggagacttcctgtgcgctgcacgtctcgcttcaatttgcttccaaagcgtgccagtgtcttgatattctcagaggttccagtcttgctgctgcattgctgcctgtaatctgggtctatttgcttgagaatatcattgagtacggcatcaaggtcatagttctgggacacagtaacccacgcccggcaatcaaattgatacatgactttcttgtacaatgccatggcaatggtggtcttccccacacccccaaatccaacaatggacacaacagcaggctcctgacaagcagtgccgtccacccactcctcaagatccttcatggccttctccatccctacaggctcattcataccaagctcatggcttgcgagctgatcctcagcaatgtcataagacgtcgcatcgggcgggcccttgcctttttgggtatttggattttccactccgtatcttatgcgtcggtcagcaatcagctgcgcccggaccttaagctcagcaatactggatgcaatctcacggcgaggcccgaacgtccagaggtcatacactagtgtgactatccaggggcagcattttgcatccaaggaatcgttggggaggcggtgagcaaagtcatctatgcagtcctcacagtcatatgccatgtcgcggatctgcttcatccagtgcttcttcctgttgtcagggtcttcccgggcgaggtcaagaaggaaggccttcatgctggcgagctcgtcactgatgtactggatgtcaccacggacgcccctgatcagatcatactcctgggcgagaaggttgcccagcttgcccaggagagagtccatggtggcagtcgaagcaccaaccaccaactccatcttcgtgttctt

SEQ ID NO: 46364 - DNA, 2361 bp, Oryza sativa
  Clone ID: PAT_MRT4530_49238C.1
atggccgtgaacatttcgactggggtgatgaactcactcctggtgaagctggaagaggtgtgtcgatacgacttgaaagagatccaattttctaccgaatttgatttcaagaacaatatatggcacttgaaagaggaattgagctgcatgaatgctctactacagaagctgcctaacatggaggctctgaatattcagaagagggagctgaggaacaaggtacgtgagctagcctactttgttgaggacagaattgacaggttcatgcacagttttggcactgtagctgacaaggccaccttgctcactgacacgatggatctgatgctccctatcttgtttgaaaaaattcacgaaatcaaggattatgttgtcgaggaagtcagaagagtagagagtatatacaatctcgacgagtctattagctctaacccgaggcagatagaaatcgatgatatttcacctgtcctgtgtggaaaggcaaataggctcgtcggtatcaatgtcccatgtgaggtgattacacagttgttaatggaggatatggaaggagagtcagtacagcatcctaaggtggtctctattgtgggatttgggggtcttggtaaaacaacgttggccagccaggtctacaagaaaattcatagcagatttgagtgcgcggtgtttgtgtttgcatcacgaaaccgtagcacgtcaatgattttaaatgacattctttcgcaactcagatatgacggatcggccgatggcataaaaagtctcatcaatgcaaccagagaaaaactctcttgcaagaggttcctagttgtaattgatgacatagcaagcatagaaacatggaacagtattagtggtgcatttgtcgaaacgtggaacagcggaagcagaattattacaactacacgaagaaaggatgtagctaatgcctgctgctctagcttccatggcattgtctataagatgaaaccactaggttggacggactccagaagcttatttttcagaagaatatatgggtcagataactacagccctgaacttgaagaactcataattgctattgatattttaaagaaatgtggaggagttccattggctgtagttgtcatagctagtcttttggctagtcaagaagaagttaacaaactggataattggttgaagataaaatactctatggggtttgaactggaaagaaatcctaactctaaatggatgaagcatatccttaaacttagctacaataatttatcttcggatctgaagacgtgctttctatatcttcatatgtatcctgaaaactatgacatcatgaagaaagactcgatgagacaatggatagcagaaggatttattacccaaaaagataaccgagacttagaagatattgctgagagctacttcagtgacctcataaatagaagcctgataaagccagctcagtttaagcatggtgaggttgtctcctgtcgtgttgtgcacaatttgtttcttgatcttattgttgagaagtccacggaggaaaactttgtgactgtaattaggactgatcaagattgcttaagacgacataattttttgattcgccgactcagctaccaatcaaaccgtggtaacttgatccaagcaagtgagtctttacatcaagtccgatccgtcatttattttggggatcggctgcatcagcgtggtgaaagcttgcctcgtcttcagatgtttgaagccttgagggttctacatctgagaatggaaggttattttccattccgtgcaacgtatgatttgtctcctgtatgtaaccttttccaactaaggtatctgaaattggaaggtaatcgtttccagtttcctgatacaagtggggaactgcgatatttgcaagtggttgacataaaatgcagcggtgatctcgtactcatcggtgggtttctgagtgatgcttgtttaccatcattgcggcatctgagaactccatggaatgcagagctcggcagggggattaacaggctgacctctatacgtacacttgaagaaattaacttctgcaattgttctgttgaaaacatccgacatcttgggatgctgaccaatctaaggacgcttggtgtcatctacaatcgccgtcgaggcaacgatgaagatgaccagacagatatggtaaagtttgctgctcttgccacttcccttagggaactgggcagctgcaacgtccgctgtctagatttcaatgttgctctaatggagcacagacaaccacccattggcttcttgtatagctggtttcctcctccgcaattccttcagaagtttcaccctcacatgatattcttcttcagggttccatactggatacaatag

SEQ ID NO: 46365 - DNA, 444 bp, Oryza sativa
  Clone ID: PAT_MRT4530_49239C.1
ctccaaataaagtcagattaatcagagagccatcttcttgccggcgaaggttccgatggagcccttctttgcgttcttatcgtcctggctcagcaccacagtggagtttccgggattcctggatcctcccctgtttccaccgaagcctcctccgaagcctccctggccaccgaagttgccctggggtctatccctctgggaggcactatcgagacggatgcttctaccgtcgagctcgccaccgttcagctccttataggccttcttggcagtgtccacatcgtgggaactcaacgtatccgaaaccacggggcttgccggtctccttgtcagtgaccacacgggcagagctgacctctccgatctggctgaagtagtccctgatggagtcagcattggagttgtaggaccgaccaccgagaagagagtaggagtctcgttgtt

SEQ ID NO: 46366 - DNA, 618 bp, Oryza sativa
  Clone ID: PAT_MRT4530_4923C.1
aaaaccaaaaaaagcgggctaaaaaagggaaaacccacaacggacccccccggaaaaaaaggagaacgggggggacaggcaaaagttaaaaggcaaaggcagggttcaaaaacggacctctagctctaagggacggacggaggcgaccgacaaaaaaataaaggaaacagataggggagggaccgggcgaacaaccataggcaggcatggatcaaacaaaaagggtagctagtcccggcaggcggggggaacgaccgaccgaccaaactagctagctttaattttattcagcataaccccagataacccaagatacaaagggggaaacaacaacgggggcagggacggccggggaagccaccccctccggccgggagggaccgaacgaacaaattaatccacgcgggaccaaccgagggaggggctgagggggtaggggatgcccaccccccactggggggggaggctgggggcattgccggcgttgaggcccctgatgctgccggccacgtttttggggcatttgcaggcggggcgggggtcggcgggggggccggcggcggaattgaggctccggaccccggtgaaaaaggcccccgacgggccggaaccgccggg

SEQ ID NO: 46367 - DNA, 1989 bp, Oryza sativa
  Clone ID: PAT_MRT4530_49240C.1
atggtgatgggttgcacccaccagcagctcgccgacccatgggcatgggcagcccgcgaggaaggtggccgtgtcgccggcagctccctgccacggcggccgacccctaccaccgccatcggccgggtcgccgccgggcgccgcccacctgcaccggcaactggcccaccgcaggggacgcccgccatgtcgctggcaccaccaccaccaaaggcctcgccttccgccgcccgcctgcagaagccggcagcttcctgccacggcggccaaccaaaggcctcgccttgggccgggtcgccgccgggagcagccacccacctgcagcagccgtcgcggatgaagctctctccgtcgccggcacctggcgcccaacacctgccaccggcaaagccctcgcctttggccgggtcgccgccgggagcagccacccacctgcagcagccggcggcgaggatgctggcctcgtcgccggcgaagagggtgctctcagtcttctcaccatcagcggccgggtcgctgcggagggaacgtaaccatctgccgccattggccagctgcttctgcttgcggcggctgatgagtaccggactacctcaaattccaagtcccccagcaacactgatgagaccttggtgtaatgaggatgagcaggtgcctcaactaaccccttttaagatcagtcatggtgtctcggatacaatgatgaagcagtatgaggaagactacaagtatcttgtggaggaggggctggatcttgaagagatgaagaaactttaccatgagctggtgcgtcccgttttagttgcaagctgtctgattcttgaacatcacattgtcagtcctgaaaccaaagcgctagatcagaaattcaaagacaagttcgggaaacccccaatctatctctcagctcttgatataatgaagaccttgattgctatggagccgtcgagatggagttaccttatggatttcttaagagagaaacgtatattggtcactgagaattgggaagtttcactgggttccatcgagtgcatcatgcacgacgacagcattagttttatgatgaatggccgggtcgttttcaaagggcaatctgatggtaggtataaccatgggactggtacagccgatctttgcacagcgattactggtgaagctacagatatcgttgattgtgccatctaccgagaggtcccttgcaattctccaacgcacgctgagttgcttggaatgtatgttctagaaagaagggcaatatcgctgaaaatactgttgtttgatgtgaaaaccgacaacgcttttgtcagtgaaacagtcagagatatgtttcctattactccaaacactactgagaaggatctgtgccaagtgttgagaagtatgaaagtctatttcgaacacttcaattgtcggtgtgaacctcgggagaaacttgagctagtggatagtttaatgaaaatgaaggataatgagatgacaatggaatcaatcaaggataaatgggctcattaccttctgagattgcctgtcttcagggctcatcagccaaccaagaccataagaaaggactatataaacaaggctccaactgttggtacagtagctttccatgggcaatacaaaattgtcgcaaagggggatacagcaaaaacggaggctgttgtgaacttggtgctatcgcttcagccaatggttgcttcagttttcgtgggaaatcacatctcagcaatctcagtcaaggaagagatagaaaagtttgtcaaggggtatttactggacatcaaggaggctaagggagcatatgttgttgtcatgaaatttatagaaactcccaatgcaggtggtaaaatattagatgtcttgtttaatactgaagtcggtgaggtgtacaagcagacagcaaactcggtctgcgtcaaactactggacaagaatgatggaactactccagagctaagtccagcatgtcttcttattttcggttga

SEQ ID NO: 46368 - DNA, 758 bp, Oryza sativa
  Clone ID: PAT_MRT4530_49241C.1
agataacagtaacagagattatatgataagcattcaaaccgcatccttttacatgcacagcgaatttcacctacaacacaagtggcactggcaatctgtcacctttttactgcaaaacaaagttgcagcagccctaaattatgtcagatactatgatatatgctgacaagtacaccttatattacaatctcagaagatagtacaaaatgaaagagaaaaaaaactatcatcttcaagaatcgaagacatctttgcaggcttcaattcaacagtagaaaagaatcacagccaaaatttatgattctgcccaacgatcaattccaaaagcaatggatggttcttgcaaatttcatcaactgcaaactgaagggagtagcaatacattgcaatactgcactacatcaccattttgtaaagtcatctgttttgctgtgtgctatttccagcaagatgtctcatctccacttctgcaaagtgctggttcttggaaaagtgcaaaatgtctcatcaggtatgcttagcaatccagtccatcctagacagaagaatatcctcccatcatctaacgccaacaatggcttattggctttatatcctactcaataacagggatgaatgatccagactgaatgtatactctttaatccatggttcaacagtaatgctggtggtatactaaaactaagtagcctttcagttcagtgaaactgttgatgccaattgacatatactcctcaggaaaatcgtttctcaaaaag

SEQ ID NO: 46369 - DNA, 432 bp, Oryza sativa
  Clone ID: PAT_MRT4530_49242C.1
atgcggcgaggacggtggtggacggcggtgtcgcggggagggcacggcggccggtggcccgagccgaggagaacggtggaggcgacgggcggcgctgaggaggacactggaggcggcgggcggcagcgctcgcggggagggcgacggccagtgggccacgccgaggaggatggtgggggcaacagcggcgatgactggctagaggaggatgcccggtccaccaccggcctccgcctctgccccttgtcgcccaggcatgctcggcctcagccgccgccgtcgccaaccgcccgcttcgccactggccgccagacgcccggcgaacttccgtctccgccgccaaccgctcgctcccactggctgcccaccgcccaggcgagctccgccaccggccggtccgcctctgccgtgtacgcgtgttgcgcccgatag

SEQ ID NO: 46370 - DNA, 1272 bp, Oryza sativa
  Clone ID: PAT_MRT4530_49243C.1
ccccgggctgcaggcacgcggcacgaggaacctccccaccctcttcttcctcacctcaagtcgtctcctcttcttcttctcttcttccttccactcccaacaccaaaacccaagaaccccacaagcgcgggcgaggaggggagggaggcatcaatggagccctctaccaagcagctcctccccatgcctcagcaagaccccaactcgccgtcgtcttccacctcctcgtcgtcgtcgtcctccacctcgccgtctcacccgcaccaccgtgcaccacttccaccgtcgcctaggcccgtcccccgcaccatcgagaccacccccttccccaccaccttcgtgcaggccgacaccgcctccttcaagcaggtcgtgcagatgctcaccggcgccgagcaaccctccaagaacgccgccacggcggcgacagcggccgcggggaacagcagcgccgccgggattggtggcgggcagggggcaaacgggccgtgccgtcccaagaagccggctttcaagctgtacgagcggcggagcagcctcaagaacctcaagatgatcgcgccgctggcgatgggggcgctgccgtcgccgaccggcaggaaggtcggcacgccggagatcctgtcgccgagcgtgctggacttcccgtcgctcaagctcagcccggtcacgccgctcaccggcgagcccttcaaccgctcgccggcctcgtcctccgaggacgccgagcgcgccgccatatccgagagggggttcttcctccacccctcgccgcgtggcgccgagccgccgcgcctcctcccgctcttcccggtcacctcgccaaggatggccgcgccttccgagtgagtgacccaaaagctcccgcctttgcgcgcgcctcaactatatcaagtaatcgacgacgagtacaactactgctactaccgctctcgctgtaccgtttctcttcgcagttctagttttgtggttgttgttcttgatctgctgctgctgctgctgtaatttttgcccccttctcgaaatgaagaagggagtttctttttttttcttctttggagtagtgaccagtgagcgattgtataatccgagctctagatttcggcttcggtttcttgatcgctcgctggggactccgaaaggatggatcaatcgattaattaagcttaattttgagcttggtgttctaaaaaaaaaaaaaaaaaaacccagttaaaaaaaaaaacaaaaaagtcattcggtttggccttctcatcggcagctattcggggg

SEQ ID NO: 46371 - DNA, 313 bp, Oryza sativa
  Clone ID: PAT_MRT4530_49244C.1
caattagttgagatacagaaggcaaaatagcgatgatgtacgataagaacattcgtgtatccattggtcttcagttaatgccggacagacaagggcgaaggacagacatttggtatgcaacttcttgtccagcaatttcccatgctcttctggctaggcaacatcagcgtgtgatatttcagccttattttagaactacataactcgatttattcggtattactggaataggtttgagatttaggcatatatgttgttcatatccattgggaaagttgttaattgttggtcaagaaattgcttacctaatgtc

SEQ ID NO: 46372 - DNA, 192 bp, Oryza sativa
  Clone ID: PAT_MRT4530_49245C.1
atgagggcggatcttagcaccatacagcagacgctcacgccggaagccgcggccgcgctggcgagggccatggatgaggctgggcggcgccggcatgggcagaccacgccgctgcacgtcgccgccgcgcttcttgccgcgccggcggggctgctcaggcaggcctgcgcgagggcggcgtcggcggcgggg

SEQ ID NO: 46373 - DNA, 1397 bp, Oryza sativa
  Clone ID: PAT_MRT4530_49246C.1
ttttgctatggcagctaatctggacaactcgatctcagacaaagatagttccttctgttccaaattagatgaaagtgttgcattgaattcagagagtttcttaagaattccctcaaactgagccgtctcaaatgtcagcattccattctttggtatgtgcttgaaagttggtttaggagcactaacagttgaagacgctgattgcccaggtacatatgcattagctccagtgtaggggtcccgaaaagatggatctggaacaaaattattctggccagaattctgtagtataaattctaccacttgttggcgatatgtcaaagggagattctccttcaggagccatttgtccgcaactgcatacggatcatctgatcgattatagggtagctttcgcataggctctccatctccaatgtcaacattaaaaacaaaatcataacgaacaccatcatgaaactggcctggtgcagctgcagcatccccaggtccatccactacttcaccaattttgtcccattttagctcttttgaattccaagaataagcaacaccattgtccccttctctaacaatcagtgtctgaccatcagagtttcctggaacttgcagtgcctcaattcctggtagatccgacaacttcaatccaccgacagtctttctactaagtatgtactgagaaataagatctgtaaaagctgcaagctcctcatcactgcaaaacctattattgtcagttgtccatatcctcacgattccatcagagcatgcagttacaatatctccgttttccaagaatttagcaccccatatgcaacctgggtgttcaatgctttgaacacagatcccatctttccatatcttggcagatcgatcttcactgccactaacaattaccccagatgaatgtgcgtccacagaatacacaagagaagtgtgtccaatcatctccaacaggggctggccagttaatgcccacaccttaatagtgcaatccatggatgaagagatgatgtcgccattgttgtctacagcaagtccagtaacttgtgaagtgtgacccttcatagtctcaacaacctctcctttatgcaaatcccagagcaaaacaagagtatccattccaccagaaacaagtcctccttcaggaaagcggtctgaaggagggatccaagccaatggtcccacaaaactggaatgtccaacaagagtcttcgagagaacgtattcatgcttcttttctgggtgctgtgtccagaatctcactgtccggtctcttgaggatgttgcaatcccagcatccccacagatacaaatgccacgaacgtcatcctcgtggccgcgtagctgcgcgctgaggtggtactgcgccatggaggcggcggcgccgtcgtacg

SEQ ID NO: 46374 - DNA, 564 bp, Oryza sativa
  Clone ID: PAT_MRT4530_49247C.1
atgacatggacgtccgcccgtaccgctcggcatgatgggatggggcccatgtcacggcctgatgtagtcacctccttgacaaacataccccaagggaagatgaattttatccctactagcaaaaatgctcgtgcgttgcaacgggttatttctttggctgaagcgtcgatttggagctggcatctcagagaagctaggccaactgttgtatacttgtctgatttgaagcgtgctgttgagactgcagaaatcatagagaaagcctgtgatgtatcaaatatagtgttgactgaagcaccaagagaaaggcacatgggatatctgcaaggcgttttcaaaggctttgctaattttgaagttaaaaatggtttggactttgatggcagaaaccaagaattgccgctgctatcctaccaattaagaactctgaaccttgaagatgttttgttgatgcgggtgattgttgtcggctatggtgcagccatattggaactaaaatatttttacactgacaggggagctttgttatatctgcaggtttttataactgtaaatttgatataa

SEQ ID NO: 46375 - DNA, 291 bp, Oryza sativa
  Clone ID: PAT_MRT4530_49248C.1
atggcgcagcgacggctgccgccgcccgccgatggtttcattagctgcaggaagcagcggcagcagcagcctgagatggagaagaaagcggcggcggcggcggaggagcaggaaggcgacgaggcatgcctacgacgcgtcgagccatggcgacctggttctcgtggtgtcgctggactccatcaccaagatcggtctacctagggagacttccacaagacccatggatacccccagagcacccccttcgattttttcaccataaatgataaactaaaggtccctaaatag

SEQ ID NO: 46376 - DNA, 379 bp, Oryza sativa
  unsure (1)..(379): unsure at all n locations
  Clone ID: PAT_MRT4530_49249C.1
caaagtacttcgactctgcggcaattcttggtttctgccatcaaagtacaaaccatttttaacttcaaaattagcaaagcctttgaaaacgcctgggcttttattcacagtgtcatcccacgtcaaaccttgcagatatcccatgtgcctttctcttagtgattcagtcaacactatatttgatacatcacaggctttctctatgatttctgcagtctcaacagcacgcttcaaatcagacaagtatacaacagttggcctagcttctcttgccagacgatgagccacctgagatgccagctccaaatcgacgcttcagccaaagaaatanancgcgagacgccggcgagaagccagcaacgagaagattcgccaggct

SEQ ID NO: 46377 - DNA, 847 bp, Oryza sativa
  unsure (1)..(847): unsure at all n locations
  Clone ID: PAT_MRT4530_4924C.1
cttgctttgctccacgcctccaccggcccgaggcgctctcattagtactcaattaagtcgatcggcgagcgattcagcgcggctcctcgaccgatctctccgtttcgtcagatcgatcgatcgatcgatcagggctgtgtattgcgccgtgtagtacgtgagaggatcggagtcggagcagcgagcgagatttgttgaagcaaattaagtagatcgatctcatatcgatcatccttaattaatttatcatggagctggtgctggtgatatcgctgccgctgctggcgctcatcataatcgtcgccatcgtcctctgcgtcatctgccgctagcttagctgattccttcctgcctccgcgatcattttgcatacatgtagtatgtcagtatgtggtgcatcaaatgtgatcattttgccgcccgttgttgttgggcacggtgattgacgacagaaagaattactcccttcatattttaatgtatgacaccattgactttttaaccaacgtttgaccattcgtcttattcaaattttttatacaaatacaagaatatttatgtcatgtttaaagaacatttgatgataaatcaagtcacaataaaataaatgataattacataagttttttaaataagacaaaatgttaaacgtttattaaaaaattaatggtgtcatacattaaaattaaaatacagagggagtactagagaacacatggcttcttgttccttctttggcctggtatggtgtgagtcgttgtgactagtgtgctcccaatccaggctgcctatacatttgtccaaatnaataaaaaattatattattaaatatttttatttattttta

SEQ ID NO: 46378 - DNA, 536 bp, Oryza sativa
  Clone ID: PAT_MRT4530_49250C.1
ctttgtttttttttttgtttttttttttttttttttttttttttttttttttttttttttttttttttttttttttttcttttcctatattttttctttttttaatggtttttttttctttctactgcctttgataattacaaataaacttttttttccctggggggggaaaaccacaaaaagggagcgcaaagcacaaaaacaaactgaataggcgatccggaaataaacgaagcaaaaccgaggaaaaccgaaaaaaaaaagcgggcaacaagctagaaaagctccttaaaacaagcaggcgaacacacttgcaagccgcctctaggagatctcattccgctggagcatagacaacgcaggaaccgctaggagaataaactgaaaacaaatagggcctggggtcatgaaaacaatcggcaccgaagggctctgcagtgggatggaccctgccaaatccaccaaagagaccagcatgggagtccaagaccaccttaaaataccctggctttaaacacccaacacgggacacaaaa

SEQ ID NO: 46379 - DNA, 300 bp, Oryza sativa
  Clone ID: PAT_MRT4530_49251C.1
atggcgaggggatggcgtgtacgaggatttggatgccggggaagggacgagctggcaagcatatatgcacgtggatatgggtgtggtggcagccatgggtctacgtggaagctgggggtgcatgcatgggccgggcaaaattgggctttatttcttgggtcaaaatgggccttatttgttggctggttgtatttggataatgggaaatatgtggtggaattgggattgggaaatgaacgaagggttaggattaaatggaagaaggagaataaatggttaaaatttaaagatgtcttttag

SEQ ID NO: 46380 - DNA, 282 bp, Oryza sativa
  Clone ID: PAT_MRT4530_49252C.1
agacaactgatttattctatcacagaatgtacggacggccaagagcaccgacatggacaacacacacgatgcatcgaacaacgggaggaccatacatactgacacacatatacgcataggggcgtacgcacatacacaagatgctcgcagggtgcttattaaacaccatgttgaagacatgggtaacggaacaccaggcaggagaggatgatcatgggaacggcatcagcagggtgagcatagccaaaaatgctcagggacaaaagaggaggagagtgcccg

SEQ ID NO: 46381 - DNA, 590 bp, Oryza sativa
  unsure (1)..(590): unsure at all n locations
  Clone ID: PAT_MRT4530_49253C.1
aataactgaaattttggctgaagctggtttttcagatgtganaaagaatttcttggctgtgctcgcngacaatggaagactgaagcacattgatcgnattgctgagagatttgttgatttgnncatggcacataagggggaggtgaaggtncttgtcaggacagttattccactccccgaaaaagaggagaaggcacttaaggagaccttccaagatattcttgggaagaacccaacctatccttgattgnacagaagatcgacttacagcatcntcgggagggctagttatncactttgggcagaagctctttcacatgtagatcacgactagggcgcgaaactcgagatcttctttgcggcaaccgctccctatctccctgcctcttcggatcgcaagatgcacttgtttcgcccctggaggcccctcaatgtctcctacctcctcaaatggttttgacacaatcttcgtttacaagagggccacactctgttttatcttgttttgtgtgccagaagcctgctgaacaattttatgtcaatttctttgctactaagaaagttatgcaccaaaaaaaaaaaaaaaaaac

SEQ ID NO: 46382 - DNA, 957 bp, Oryza sativa
  Clone ID: PAT_MRT4530_49254C.1
gcccacacggcctatctataaagccgcccccgtctccgcaaggtgatcgtattcaatcagtttattcgatcgccggatacccgaggaagaagaagaagaagaaaagatgagctactacggccagcaacctcccgtcggcgtcccgccgcagcaaggttacccggggaaggacggctacccgccgccggggtacccaccggccggctacccgccggcgcagggctacccaccggctgggtaccccccgcagcagggctaccctccgccgtacgcgcagccgccgccccagcagcagcagcacagcagcggcccttccttcatggagggatgcttggctgccctctgctgctgctgtctcctggacgcctgcttctgaggatagaggcgacgggtgcaagagagctgaagagatttgtttcatggagctgatcaaaccgaactgctatgagaaaatgctgctagatttcgtgttcggcattattacctgttattcgccttgtttatgaacctctctgaacctgatttatttgatcagtgtttgatggatggctaaaactatatagttgtgtactactgttgattccaatcttgctggtggaattcaacccgggttgcggagtgcaagttgaattcgttcttgttatgtctgccatttgatttctttaccattgctgcggggtaacacttgcgttgctttgaaaataccctgatcacctcataagccgccgggtctcactgggcactgactttgactggtgcgtttctttttgaaggaatcttacgtttcttgttcgaacgaacagcttgcccagtaatttttttccttaattattgtaattacgatcatatataacatcaaggcctcgcgactagctgaagtgaaattcgtgtggcgacatgcttttagatattttctgataaattcttttccaaaaaaaaaaaattttattttcacac

SEQ ID NO: 46383 - DNA, 267 bp, Oryza sativa
  Clone ID: PAT_MRT4530_49255C.1
atggagaagagtgagaaagatggagataaaaaaacgcaagcagatcaaaatccagatctatttagaatcaattatcttagaggaaatctcagatccaccgaagaaagaagcttctctgcaacaaatctattcaagaagaaaaagatggagatggagaagagtgataaagttgcagtaaatgtgaagtatgattataatgtgaagtatctacccattgttcttaagcccaaaacaacacaatttgtacagattcccaaatgtcaataa

SEQ ID NO: 46384 - DNA, 900 bp, Oryza sativa
  Clone ID: PAT_MRT4530_49256C.1
atggcgttctcggagccgccgaagccggcgagccagccgtcgccgccgtcgtcgccgatgagcgagcggccgccgtcggggcgcagcaggcggcgcgcgcaggagccagggaggttcctcggcgtgcggcggcggccgtgggggaggtacgctgccgagatacgcgacccgaccaccaaggagcggcactggctgggcacgttcgacacggcgcaggaggcggcgctggcgtacgaccgcgccgcgctgtccatgaagggcgcccaggcgcgcaccaacttcgtctacacccacgccgcctacaactacccgccgttcctcgcgccgttccacgcgccgcagtacgccgctgccgccgccgcgccgtcctcggtgcagtacggcggcggcgtgggcgcggcgccgcacattggctcgtacggtcaccaccaccaccaccaccaccaccacggacatggcgcggcgtcgggcgcgtcgtcggtgggcgagtgctcgacgatgccggtgatggtcccggttgatccccaccgctccagcatgtcgtcgtcgctgctggacatggacaggaacggccacgacttcctcttctccggcgccgacgacaactccgggtacctgagcagcgtggtgccggagagctgcctccggccgaggggcggcggcgccgcggccgatcatcaggacatgcggcgctactccgacgccgacgcctacggcatgatggggctccgggaggacgtcgacgacctcgcgcagatggtcgccggcttctggggcggcggcgacgcggcggaccagctcggcgcctgcgggttcccggcgagcggcggcgccgccgacatggtcgcctcgtcgcagggctccgactcctactctccattcagcttcctctcccattga

SEQ ID NO: 46385 - DNA, 332 bp, Oryza sativa
  Clone ID: PAT_MRT4530_49257C.1
cccggtcgcccaccgtcaaaaaaaaaaaaaaaaaagggcggcgtctgggatccagcttactctcgtgctgcgagtctgctgtttatgtgtagctaattattactggccgtgtttacacgggtgctgggaaacctgggttcccaccttatgcctgcatactccccttttgcagtggctttgcgataggcgtccgtcggcttccacagttgcttcctgatgggatgggtccgctgtgggggcctagcgcggggtgtggtggtcgcgctggtgccgctccttgccagcgcttatgcccgtctttgctcttttcttttttttttcttttctttttt

SEQ ID NO: 46386 - DNA, 855 bp, Oryza sativa
  Clone ID: PAT_MRT4530_49258C.1
atgtcggtggtggagcacggcacatcggccatggtgctcccagtcccatatatgtcagtctcagggacgtctgcggcgccggaggaggaaaaggacgacccctgcagtgccggaggaagacgcgggtcgctgctcaccaggcaaaaggagatgcgatatgatgttcgtcgaattgagccgacggagagcttgaaagacacggctgctcgtggagccaagccgcacgggcgggcgatcaggtttttggggagcgcaaggcgcgactactcactgttcgtcaacatctacttcatcttcaccaacatgtcgaacactggagacaaggagaaggagactcccgtcaacaccaacggaggcaatactgcctcaaactccagcggaggaccattcttgggtttattcgatcgccggatacccgaggaagaagaagaagaagaaaagatgagctactacggccagcaacctcccgtcggcgtcccgccgcagcaaggttacccggggaaggacggctacccgccgccggggtacccaccggccggctacccgccggcgcagggctacccaccggctgggtaccccccgcagcagggctaccctccgccgtacgcgcagccgccgccccagcagcagcagcacagcagcggcccttccttcatggagggatgtaattaccggacgctggtctcagatctgtccacgccgacgggtgcggtggccggcgcgtccgccgcggcggcggcggcggcggcggcgcaccttggctgccctctgctgctgctgtctcctggacgcctgcttctgaggatagaggcgacgggtgcaagagagctgaagagatttgtttcatggagctga

SEQ ID NO: 46387 - DNA, 698 bp, Oryza sativa
  unsure (1)..(698): unsure at all n locations
  Clone ID: PAT_MRT4530_49259C.1
ccacgcgtccgatcgccgttaacccgaggaagaagaagaagaagaaaagatgagctactacggccagcaacctcccgtcggcgtcccgccgcagcaaggttacccggggaaggacggctacccgccgccggggtacccaccggccggctacccgccggcgcagggctacccaccggctgggtaccccccgcagcagggctaccctccgccgtacgcgcagccgccgccccagcagcagcagcacagcagcggcccttccttcatggagggatggtgagcacttcgtctcgtctcgcctcttttttttaatcaacaattcagcatcttcttcgttgctcttgtgcactactagtagattttgaatttgaagtagtactagattgtttgattagatcaaaattttagtgctatttaggcggttagggagtagtagtagtaattaccggacgctggtctcagatctgtccacgccgacgggtgcggtggccggcgcgtccgccgcggcggcggcggcggcggcggcgcacgttcgcttgtggtggggccctgaatagacgcgtgaactaccaccccttgaaacgtgggtttcgttgacgtgtcggtccttccaagcaaggcgagnnacgaggttgcacttgcatgccagaagggggtcttggctgtcttctccttgcaccagtgatgggccgtctgatctt

SEQ ID NO: 46388 - DNA, 288 bp, Oryza sativa
  Clone ID: PAT_MRT4530_4925C.1
atggcaatggaaggacatggcggcggcggcggcggaaacaacacgatgacgacgccggcttcccccggcctcccagctgcaaaatggaaagggggacgaggcgaccttcacggcgcagtggcttgcctcgggccagacgggttgtgccaggaaatgatgacgccgaagcggcggcgaagatcgtatggtgaggtgaacaaggaacgggatagagataatggcgagcgcggcttgacgacgaacggcaatgcctccttctcggcggccgacgatgaggaggaattttga

SEQ ID NO: 46389 - DNA, 1718 bp, Oryza sativa
  Clone ID: PAT_MRT4530_49260C.1
tttttgtgtctctagatacactcgtctctgatgggttctcttcagagagggtttgttctttgagctcgtgatctcttcgagatttgtagtagtactacgtcgacggttaggtggtcgtcgcagcaatggccggcggcgtggtggtgaacaacggaggggggaaggactaccccgggaagctcaccatgttcgtcctcttcgcctgcatcgtcgcagccaccggcggcctcatcttcggatatgacatcggcatctccgggggtgtgacgtcgatgaacccgttcctgatcaagttcttcccgtcggtgtaccggaaggagcaggcggcggagaagaaccagagcaaccagtactgcaagttcgacagcccgctgctgaccatgttcacctcgtcgctctacctcgccgcgctcgtcgcctccttcttcgcgtccaccgtcacccgcgtcgcggggcgcaagtggtccatgttcggcggcggcgtcaccttcctcgtcggcgccgcgctcaacggcgccgccaagaacgtgctcatgctcatcctcggccgcgtcctcctcggtgtcggcgtcggcttcgccaaccagtctgtgccgctgtacctgtcggagatggcgccggcgaggctgcgcgggatgctcaacatcgggttccagctgatgatcaccattggcatcctgtgcgccaacctgatcaactacgggactgccaagatcaagggcgggtgggggtggcgcgtgagcctggcgctggcggcggtgccggcggcgatcatcgccgtgggcgcgctcttcctccctgacacgcccaactccctcatcgaccgcggccacaccgacgccgccaagcgcatgctccggcgcgtgcgcggcaccgacgacatcgaggaggagtacaacgacctggtggccgccagcgaggagtccaagctcgtggcgcacccgtggcggaacatcctccagcgccggtacaggccgcagctgaccatggccatcgccatcccgctgttccagcagctgacggggatcaacgtcatcatgttctacgcgccggtgctgttcaagacgctgggattcgccgacgacgcgtccctcatgtccgccgtgatcaccggcctcgtgaacgtcttcgccaccttcgtgtccatcgtgaccgtcgaccgcctcggccgccggaagctgttcctccagggcgggacgcagatgctggcgtgccagatcgtcgtcggaagcctcatcggcgccaagttcgggttctccggcgtggccgacatccccaaggcgtacgcggcgttcgtggtgctcttcatctgcgcctacgtcgccgggttcgcgtggtcgtgggggcccctgggctggctcgtccccagcgagatcttcccgctggagatcaggtcggcggggcagagcatcaacgtgtcggtgaacatgctcttcaccttcatcatcgcgcaggcgttcctccccatgctctgccgcttcaagttcatcctcttcttcttcttcggcgcgtgggtggtgatcatgacgctgttcgtcgccttcttcctgccggagaccaagaacgtgcccatcgaggagatggtgctcgtctggaagtcgcactggtactggggcaggttcatccgcgacgaggacgtgcacgtcggcgccgacgtcgagatgcccgccgccggcaaccgcaacggcaaggtcgacccggccaagctcgccaactga

SEQ ID NO: 46390 - DNA, 751 bp, Oryza sativa
  Clone ID: PAT_MRT4530_49261C.1
cggtcgaccacgcgtccgttccgctatataaaggggcgagcaaccaatctgaattaatctgtgtagctcgtcgtcactgcccatagtactctggcttagctagctagcttcttcttcttcctctagcttggattggattggattggtggctggccggcgatgaggacggcggcggcgaaggcgcggtgctcggtgcctttcatcctggcggcgctggccgccctctcctgcgtcttcctcgtccacgcggcggcggcggcggcggcggcggcggtgaccacaaccaccaccagcgtcgtcggctaccggagggcgctgcttcccagggaggcggcggcggtggtgatgccgacgacgtcgacggcggaggacgcggcggtggtggggatggccggagtagagggagagctgccggtcgtcgccgacgaggcggcggcggcggcggcgaggcggatggacatgcagacgacgcaggactacccgagctccggcgccaacagccgccacgatccgaggaacccgcattgagattcgtgcagggaagctatctatctaccgttgattcatggggtggagatgcatacgcctacttgtacaatactacacatgcagcaaacgcgtgtgttgagtttatcacacaattaattaattttgcacacagtattagtagtaccgcatgtataactagtagtattacatgtaacactcgtatacatatcaaattaaacattatcttaatgtgatcctgctc

SEQ ID NO: 46391 - DNA, 1667 bp, Oryza sativa
  Clone ID: PAT_MRT4530_49262C.1
tctcggcgggtacaccatctcttcattccgtattccttgtcgagatccaccaaccgttctcaagtgatcgagaaggcgctgagtctgcaacgaagccttcagaacatttgttgtactctctttagtcgatctcggagttaaccgtagagaccaggagtctttgacaatgatgaatggaactttcctgaaatcaatacactcgaagtggaggtagtgggagaatcgctacaccgctggtcaaagaccaggtgtagctgtaactcagaccacttttctcgaatagcccagccatggctggtgctatgaaataggtcgtcggtcttcgttggtaggttgggtgcgatgactctgcatttgtcgagaacgttctcgataatagggtgtacttgaccacaacctactcgagtgctcaattattcctgaaaaatattttctttgtagatacatgccggatgtatcttactgcgtactcgttcgacgtcatacggcctgacatcttttggtacaccgcgaaacttgaggcttggatgatctcgaaagaccaaattgttgatgacgatggttccgattttgtcggggcacgtactggtgtgccactgtcgacgtttgatgtcacgactacggtatttgcatagtatggggatcgttggtattaggatatatgcaagacagtacaatatttggggtagcctatctaactgttgtcgacttggcggtatgaagtgctgactcgtagtcgacgccagggtagccttcctcctcgaatccgcatccagcgagatcaaagacagcgctatgtctctcctgacagtatccgtagacatcgtaggggactagccatgcttatctctgaagtcgatatccggcgtcttgtcttggtgcataactctatttatctttccttatccggaactccttctatacccgaaggttgtttccgtataaaacatgcttggattggattggattggtggctggccggcgatgaggacggcggcggcgaaggcgcggtgctcggtgcctttcatcctggcggcgctggccgccctctcctgcgtcttcctcgtccacggtttgtacggcttgatcgagctcttcggctcgccggaactctcgccggaggccatgctcctcatctttgccctgtgttttctcctccttgcagcggcggcggcggcggcggcggcggcggtgaccacaaccaccaccagcgtcgtcggctaccggagggcgctgcttcccagggaggcggcggcggtggtgatgccgacgacgtcgacggcggaggacgcggcggtggtggggatggccggagtagagggagagctgccggtcgtcgccgacgaggcggcggcggcggcggcgaggcggatggacatgcagacgacgcaggactacccgagctccggcgccaacagccgccacgatccgaggaacccgcattgagattcgtgcagggaagctatctatctaccgttgattcatggggtggagatgcatacgcctacttgtacaatactacacatgcagcaaacgctccatatgccgtctatatctttttgtcatggcagcaggaaagattgccaactatggagctcgcttgtccccccccccctcgtgcatccgccttggacactactcgtggcgctcctgctctgtcccttaga

SEQ ID NO: 46392 - DNA, 1119 bp, Oryza sativa
  Clone ID: PAT_MRT4530_49263C.1
atggcttcctctatttctgttatggcatctgctggtcgcaatcgtggcgtaggatttgcaaagcttcaaggtgaagatttcgagtacttcatgcaaacttattcaatcatcttgggacgcgatagcaagagagaaaaggtagatcttgacatctctggtggagatcttactatttcccgccatcacgcacacatattctatgattttgaatgcaagcggttttcccttctagtccttggtaaatgtggatgcactgttgaaggtgtccttcaccttccaggtggtagtcctattaaactggactcccaagacctccttcagattggacataagaaattctactttctcctgccaactcgatctatcttcggcacctcctctaatcagcatggccctagtgcctctgctgcttttcagcctgctaacaatggcaccgctgctgatgagcataatctcactgcaagtgctgctgctcagcctgctcatattggcaccgccgctcctcctcctcatattggcactgctcaacctggtcaaattggcatcgtcactcttcctcctgctcatatccagaacaatgctgaaaatgaaaatatagctggcattgaaacacaagaggaattcatgaatcaaaacaagatgccttttggtgaattggatacatgcagcagccaccacatcacaattgagccaacattagcacctggcggtcagcctgtcaataatttagcaataagaccagcagacaataataaagaccagcaggaggtccttctaaaggaagaggaatatgttctcgcatctattggaatcgtgatatctgacctatgtggtcttaaaaagatgattcctattgaaaaactccattcagagctcgttgcgtgttacagtgcaacatggccccagcgccaggtccagatgcacctggcaccagaggctggctcttcagcagctggaacagaatgcaaaccgtggctcaagctgatgtacctactaaggaagtacccagaacgctttactgtcatgaattcatcatgtgatgaggagggcaggcaacatcggtgcgtctgtactctttatggtgatggtactgtttgtgtgttcttaaaaagaacctga

SEQ ID NO: 46393 - DNA, 3030 bp, Oryza sativa
  Clone ID: PAT_MRT4530_49264C.1
atggcgtccatggaggagcgggttatggaggtcctgaaggagttgttggtgaaggtgaacaccattgaggacatcggcaagcgtcttcatctgattgacaacaagttggcgcaacaaggggaacgttcagcaggagcagacgatgttggcgcgtgcactcaaggcgaccgcagctgcggctccggagtcttctctgccaactccacctcaacgtccgccgccgctgttgccgaccccgactgctacttctggtgcgtctacgtcggcaacaccaccacctcatggtgggacgaggtggagagaaacagaagttggctcctggaaactcctcagttgaaagctatggagttacaagaggaggcaattgttctgactgatgaacttttggatgctgttactgggttggagttgtctgaagacagtgccaatttgtcgcttcatgctttggccggcacttctcacaccaacattgtccaactcagggctctgtctagcaatcagggttctctcatcaagctgcagggaattcagtcttcttctgacttaaccactcctcaagaagctactcctgaacaggttgtgaaatggacaaagggcaatgatgtgtgggccattgcagtgttggaacaatctggtgggaatcccgaggatcccaccaaggaggacgatgagaacgagcacaagaacgctcaagccgctaatgcaattcttagcgccttcagtggaagtgagttcaaccgtgtggacggcattgagagtgccaaagtgatttgggacacgcttaggaatttgcatgaaggcacggatagtgctagcgagtccaaggtggagattctcaaggggcagtttgaacggtttgtgatgttggatggtgagagcccaagcgacatgtatgatcgattgagcaagatcgttaatgagatcaagcgacttggctccaaggacatgaccgatgaggttgtggtcaagaagatggttcaggcaatcactccaaggaactctaccttggtgaccatcattcgtgagcgtccggactacaagactcttacacctcatgacttgcacgggtgtatccttgcccatgacatgctcgagcaagagtccaaggaggtcatccaatatatcaaccaaacctcaaccacaagcatcaagaaggaagacttggcattgaaggcaaaggaagaagaagaagagagttgcaagagtaagagcaaggcggagatcgatgatgaagagatggctctcttcgtcaagaagttcggcaagttcatgaagcaaagtggcttcgccaagggaagttcgtccaagtattcctccaacaagtcaagtggaagacactccgcaagggtgtgctatgtgtgcaaaaagcccgggcacttcattgcggattgcccccacatcaaggattgcccccacctcaaggaagacaagaagaagcttgagaagaaagagaagcacaagcatagcaagcatgatcgctatggccaagctcaccttgggatgatcttcggcttcgactccgagtcaagctcaagtgatgaagaaggagttgccacgttcaccgtcaagccttcatcaccaccgagactcttcaactactcaagtgatgaggatgctcccatttgcctcatggcaaaggagactaaggtaccctctcccctcaagtcatttaatgttgatcttgttagtgatgaggaggatgatgttgaggatgaggttatggatgaggagttgttcaagtccataaccaaggagtctctgccacacttgagtgagttgcttgggagaattgaggatcaatatgcaacccttgagaggcaagaggcattactcattcgtgagaaagagcggtctcatgaactcaagggtagtaaggccctaaaggagtacttaggttatcaaagggacaacttcaaccatgaaggccttggtgcatgtcaagccgggaaacaaattggagcacatcacccggtcaagaacgtaatggctactacaagaccgttggagcttcttcacatggagctcttcgggccaattgcttatctaagcgttggaggtaacaaatatggtcttgttattgttgatgacttttcacgcttcacgtgggtgttcttcttgcatgacaagagtgagacacaagccctcttcaagaagtttgcaagaagagcccaaaacgagtttgacctcaagatcaagaacattcgaagcgactacggcaaggagtttaagaacacgtgcatcgagagtttccttgatgaagaaggcatcaagcatgagttctcgtctccatactcacctcaacaaaacttgaaggaactcatgggcttgcaatacccacggaacaagatgagaggagaatacaatcctttcaactgcacgtcctcgaggaaatactggagggacaactggttttaccttcatgatgccgatacctctccatgccttgtcgtccctgaagagcaacctccgcattcctggtgctggactgctaaacctgttctaacccccacattgaagggtttcattgacaaaatccacaacctccgagaacatggcttgaccgggtacgaagtcgtttgcgacttcacctgttcttggatccgtcctcttcaggcttgtgctcatcctacgtttgagtacacgagggcagaagacacgacgaggataatgcgatttggcctctctcggacagcagtggcgaagtgcgttgtacaggtggtggtcgatccgccatcagccgttgataacatcccaacaacggtttgcgacctcctacaaaccgagaaggatgctgtcgtgaacataaactacgtccagcatgaagtcgggcgtgaccaagaggggactgctgttgaagaagcaaaaagttggccacactcatctggccccgggcaaagcaccagggcccgtgaagatgccgtgtcatcggccaatgatcttgtcgtggcgtttgaagcccaactaaaaaaggagcacgccgacaacgccaggctaagcgaggtggtagccggaaatgatgcgcaacgctga

SEQ ID NO: 46394 - DNA, 1619 bp, Oryza sativa
  unsure (1)..(1619): unsure at all n locations
  Clone ID: PAT_MRT4530_49265C.1
gggacaaaatgccttgtctaagcggcgcttatactatttacgcaaaacacatgacatcagatgaccagacccggatatatatagttcaaaattccacatgagtttgtaccccaaacaacaccagggctatcagctatcacaactccatccaaccaaccaagccagagaagttccagaggtgacctcacagtcacagagctaagaacatagtacaacgatatctggagcaaccaaccacataagagagtgacgtacaattcacaggcagtttatggctgcataaaggcaactatttctcctctagtacaaaccgacgcacagggcagcatgagaaactcagaagcacttcctgtgaacaattgctgggccagattcatcatactcatccttcgatatccacatctgctggaaggtgctgagagaagccaggatagaccctcctatccagacactgtacttgcgttcaggtggagcgacaaccttgatcttcatgctgcttggagcaagggcagtgatctccttgctcatacggtcggcgatgccagggaacattgttgtgcctccactcagcactacgttgccatacaggtccttcctgatatctacgtcgcacttcatgatggaattgtaggttgtttcatggattccagcggactccataccaatcatggatggttggaagaggacctcagggcacctaaacctctctgagccaatggtaatcacctggccatcaggcagctcatagctcttctcaattgaagagctgttcttggcagtttccagctcttgctcataatcaagtgcaacatatgcaagcttttccttgatgtccctcacaatttcccgctcggcagaggttgtgaacgagtaacccctttcagtgaggatcttcataagagaatccgtgaggtcacggccagcaagatccagacgaaggattgcatgaggaagtgcatatccttcatagatgggaacagtatggctcacaccatcacccgagtccagaacaatacctgttgttcggccactagcatagagtgaaagcactgcttggattgcaacatacatggcaggaacattgaacgtctcaaacataatctgtgtcattttctccctgttggctttggggttcaagggagcttcagtgagcaacacagggtgctcctcaggtgcaacacgaagctcattatagaaagtgtgatgccagatcttctccatgtcatcccagttgcttacaataccatgctcaattgggtacttcaacgtgagaatacctctcttggactgtgcttcgtcaccaacatatgcatccttctgccccatccctaccatgacaccagtgtggcgaggacgaccaacaatgctaggaaaaacagcccttggtgcatcatctccagcaaacccagccttgaccattccagtgccattgtcacagacaagaggctggatatcctcaccgtcagccatttcctatagatttactcgtcaacggaggtcgccgcctcgtctcnctggtgtcagcggcggcncttctcagtcccacccacgtcgcccccngagtcctcgccggtcgccgctagtgttgggactttgcggcgaaggcgatgatatgctcg

SEQ ID NO: 46395 - DNA, 955 bp, Oryza sativa
  Clone ID: PAT_MRT4530_49266C.1
ccggccgggtgtcatcggcatcaaaactctgcagtcgctgtggccaagcagatgagccgaagatggctgccaccaccttcagctcctctccctccaaggttactactgccaaactaggaggaggcgtcaccagatcttcctcgccatacacgcagctcaccttctgctcgaggcatcacttccagaaggcggcgacgacagcggcggccttccaccacaagcctcccccggccgagctgtcccttctgctctcgccggcgaggagcaagcatgcaagaacgtgcccggccgccgacaacgaccgcgcggcgcccgcggcacaggaagcaacaaacacgcctccgccgccggccgcgcccagcgccaacggcagcccgccccaggagccgccgaagcgggcgccactgacggcgcgggagcggctgcgcgcggcgcgcgtgctgggcaagtacgcggagcctgggggctcgtctccgaagggcaaggcctcggcggcgtcggcggcggctggggcggcagggaagaagccggagttcgggagccgggtgctggacgcgctccgggagacggacgggaaggccgggaagaaacggtcgtcgcggctgcccgaggcgccgagcaacatgtttgacgacagcaagcgcggcctgcccaaggaagggtggacgttcgaggcgctgccgttcggcaccgacgtgattgtcatcgccgcctccttcacgctcatcaccgtcgtcatgttcggcaccacgtacctcgtctggaagctcggcgccattcacttcaacgagttttaggctacgtactatcactcacacaatgagctcgctaaatttgtgggtctttgggtgatgaaatcgcgttggatttgtaactgccttttgcggtgctttgatcagatactcgtgtgatattgtactgaactgccggctttggttttaacggtcgattttgg

SEQ ID NO: 46396 - DNA, 315 bp, Oryza sativa
  Clone ID: PAT_MRT4530_49267C.1
ttggttcttaaaagctttgggtgttacactttttttttttatttccaagatctgtttttcttttttcaatttgatgcattcatttattatatcagggcgttctaatatgacagagcatccaccactgcaagtcaacaaaaaggggcgggcccaaccagccctaattaaaagaagaaactcaaccacaagggagaccaaccccgggcaaaaaaccggggccagctcggtcgaaaccagcaaaactaaacagggcgcgcgaacgcacaccaacgcataaatcccgatagaattgcgcgcgaaagagccaaaattaag

SEQ ID NO: 46397 - DNA, 304 bp, Oryza sativa
  Clone ID: PAT_MRT4530_49268C.1
aaagacgaaagacagcttcttttctatgtatatcacccaaagtttcacatgcaacatatgatgatatatgagcttatttgtaacttccgaaccactatactgcaaaaactcattacaagacactcgcccagggtggccatggtactggccgcaccatctgacctagggtggataccatatctagatggcgcgttaaaagccaacagagcttgagcttgagccagattcgcgtcaaagtcgagatcaccaaactgctggagttggaactgctgcgctatggcctgaacaatgttctaggcatttc

SEQ ID NO: 46398 - DNA, 1432 bp, Oryza sativa
  Clone ID: PAT_MRT4530_49269C.1
tgctgctcatcgcaaatcgacggcaacaactaacgattgatcgccatcaagtatagctatagctagctagcttgtgaattcatcaatggagatgacgacgacgacggagaagtgcatcagcagcagcagcagcgtccatggcggcaacaatcgtcgagaagaataccccaaggagggagccgacgacgacgtcgaggcaggcgtcctcggccgtgacggcgaggctgcggcgacgacgacgcggcagcgcctcgtgtcgctcgacgtcttcaggggaatcaccgtcgcgcttatgatcctcgtggatgatgttggtggcattgtcccggcgatcagccactctccatgggatggcgtgacgctagcggactttgtcttccccttcttcctcttcatcgttggggtctccttagcttttgcctataagaaagtgccagacaaaatgttagcaaccaaaaaggccatgcttagggctgtaaaactcttcattgtgggccttatattgcaaggtggcttcttccatggcatccatgaacttacctatggtgtcgatattcgcaaaattcggttaatgggtgtactacagaggattgcaatagcctacttagtggtggcgctttgcgaaatctggctaaggagggttagtagtggcggtaacattggctctggctctatgttaataacaagataccatcatcagatgtttgtgggtttggttctggtggtcacgtacctggtgattttgtatggtttgcacgtgccagattgggagtatgaggtcacatctccggactcaactgtgaagcattttctggtgaaatgtggagtgaaaggagatacagggccaggttgcaatgctgttggcatgattgatcggtctgttcttggaatccagcatctctatgcacatcctgtttatctgaaaacagagcaatgcagcatggcctctccacgcaacggccctcttccacctaatgccccatcatggtgtgaagctccatttgatcctgaagggcttcttagctcgttgatggcgattgtgacatgcttaatcggtctccagattggccatgtaattgtccatttcaagaagcacaatgagaggattaagcgatggtcgattctatcattgtgcttgctcactcttggcttctctcttcatctcttcggtctgcacatgaacaaatcactgtacagcctgagctacacctgtgtcaccactggcactgctggtttattcttcgtggctatctacctgctggtggatgtgaaagggtacaagaggccagttcttcccatggagtggatgggcaagcatgctctgatgatctttgttctcgtagcatgcaacgttatcccagtactggttcagggattctactggaaagagcccagcaacaaccttctgaaactcattggaataggaggctga

SEQ ID NO: 46399 - DNA, 529 bp, Oryza sativa
  Clone ID: PAT_MRT4530_4926C.1
cccccaaagcaaaaccccccgggaaaaaaccggaaaaaaaaaagggaaacccggggaggggggaaaaaaccccccttggccccaaaattccaggaaaaaccccccaggcccaaaaagggccccccccccccccggaaaaaacccccccccccaggtcttccccccacccccccccaaaaaaggggggggccaacttcccccttacccgggggggaaccccaagaagtccgggaacccccccccaacccaacggggccggccctttaaccccggcaaaaaaaaaagggcccccaccaatggggcggcccaccctggatcccctaacaaaaaaaaccggcaaaccccccccccaagaaaaccccccggggaaccccaacccaaaccccccaaaaaggggcctggaatggggccctttggccggggggcccccccaaaacccaaaatggacccggggccccaaacgggggaccccattcccccccaaaattgggaggcccctttccaaccccaaaaagggcttggggggggg

SEQ ID NO: 46400 - DNA, 243 bp, Oryza sativa
  Clone ID: PAT_MRT4530_49270C.1
atgaacaaaaagggcgagtacccgtgcgcgaacaagaagatagagacgaggaaggagagcagcaatcctctcaagtcctctcagaagggcttagtaacgaggaagagcagcaatgaggaaggagagcagcaatccagtctggggaggatgaacaaggatgaacagaaaggccgaatacccatgcgcgaagaagatatagacaaggaagcaatccagtcgcttgtcaccgtctggggaggatga

SEQ ID NO: 46401 - DNA, 449 bp, Oryza sativa
  unsure (1)..(449): unsure at all n locations
  Clone ID: PAT_MRT4530_49271C.1
cgcctccggacctatagtcctggccaaagtctagagttccatgcattaacattagaagatccaccgtttcagacaaggagatgtaattgcatatgcctgatgatatagttaattggtgctacaatgatggttaagagcctgctgatgccatatatgtcactgatctcaacagcggtgctaatcaacttgaccctaggcagagggatttcttggtagctggaaataagagaagccctcaagcatataggcgtgaggttgaggagcggacacagatcatatttagtggctttagcagtgagctacttagcgaggctcttggagtaagcagccaagtgggaaggctgctcccatgtcaaattgaccaaagaggagaaattgtccgggtcgaacactggcatcagtttgctgcagccatatgcatcatttcaggagcaggaacaggnacaggt

SEQ ID NO: 46402 - DNA, 2457 bp, Oryza sativa
  Clone ID: PAT_MRT4530_49272C.1
tcatcttcctccagaaagagtggttatggtggttgctacagagggatttgatacaacatgctgaccataaacttcattattagcttcattgatgctgaagaaactaaatgcgaagtcctggagcgttgcttccctttccaggtattgcatcactaagcgcatgctaggcctcaccttgggcgatgaatgtgaacatagaagcccaagctttaaaactaatactacctcctctgcaacgtgatcttccagacttggatctatggagtttatgattgaactgcgttgccacgcattgagcacatgatctgctagcgcttgaggttctccacaggaattcacctcaattggcctatttccacgtgcagcctccatcatgaacaccccaaatgcgaaaacatcggtacccttggttgattttccaagcctagctagctctggagcaatgtaaccatatgtgcctgctacatgtgtggtgtaggcatcaactctgtgatcatgtaatcttgcaaggccaaaatcacccaaccttccattcatttcctcgtcaagcaatacgttgcttgacttgatatctcgatggatgatcacacgctcccattcctcatggaggtaagcgagtccacacgcgacacctttgatggtgcgaaatctttgagaccaaccaagaggagctcgtgcttgttcctgcgatagccaagtaactgaaagactccggtgacgaacattgcctagtattgcaacttcagacataaactccttcatcccttgcttcgactctggggagatgcgcttgatcgcgacattccgcttagaggcaggaagaaatcctctgtaaactttcccaaaccctcccttcccaaggagcattttgtcactgaacccagaagttgcattatataaatctttgtatatgaaagatggtggcctgcacttcatttcccagtcttcttgtggcccagcttttttccgccaaccaaggaaagcaacaagaagaagcaagataactgaagtcataactattggtaggagaatttgcaaggagtgtttgtgaacttggtgtgtgttaagctgtggaggtggtggtggcgcaaagaagttgcctccccatccatatgtttctgggtctgtgactgggactgaaggaaggggtgggactctcccattttccttgaagctccaacctagaataaaatgtctagttttcggtgaatttaccgacgcggaaaacccaatgtacgaagaacttggtaacaaggatgagagattgacgatgctcgaaagtagcggatattcaggtttaggggaatagggaagacctaaggtgacatttagttggtgagctttgccatcatagtccacccatagctgcaatattggagatctaccattggcaagcctaaggagttggaatccaccatcagaggtgtagaacccagcggtatgggagttgattgaaatcaagctgttgacatctattccaacatggttatcatccatgtcgttcaaatcaggattcatgaaggtatcaagctcgatagctaatatattttgtgaagtattcgacgcattgaaaaggcctaggtactgacctcccaaggagtggtttatcaacttgttggtggaagaaagcacaaaggcaataccatcacttcctgcttcttgaggctgatctctccaagtagtaatagtgaacacgaatgttgtagcaaaggaggggtcattgggactatttgagttctttctaaagtttagaggatacttgtagaaggcatggccaaaacctcctatgttaaggcgacttgttagccctaagcgattcctgtcaattgaagcttcaccttcgagtgttagatcaacagccagcatcacagctactggtctaatcatcatcatcatgacatcaaacttgaagcgcacagcggtgtccttctccagcttcgagtggtcattcatgaacatagggttctccccaccgatgtacttgtagtcgctcagtgtcttctctgacaggaagatgctttctattggtccagatttgaggaacacgccatgcttgaggatcttatccacagagccaactaagatctcgcccttcgtaggcttctgtgtgatgcaggtgaatgtcactgggaaaagaacatctccggtcagctcgcgcactttcccttctgatatcgccttcagctcactgacagcaatgtagtaaccatgatccttggaggccttcctgtttgctatctcctccagaagactaacaatgacagccttgcggagcaagagacccttggggctcagctcgctaggtgagatcaacacattccaagacatatccaccttaaggaaaaccatggttgattgccaggatccccctccccctcccctgcgatggcgatcggcagccgcggctcgtcttggctggcgcaaggagcggaggagacgacgagacgggagattttc

SEQ ID NO: 46403 - DNA, 988 bp, Oryza sativa
  Clone ID: PAT_MRT4530_49273C.1
ggccgccccttttttttttttttttttcgaaaggaaggcagcaaatatatgcatggtagaacggtgagcagccataggaaatagaggttcatcagccatgacaattctcatcatgctgaaatgctaaacatatggcctaatgccatttacatcaacaaccagcatcacagatacgatacaggtatgatcagtcatcacgacaccaaactacagacagcaggttaaggctaacacatttcaaatccattcatcaaggtagcaaaatgtgcagcagagccaccattagaagcagttcatagtggtccaagatagtcaccagccagggtagcaaggagctggaactggcgatcggcttccatccagcggaaccccatgaccttgaagcgcacgacggtgtccttctccagcttcgagtgttcattcatgaacaccgcgttctccccaccaatgtacttgaagtcgctcatcgtcttctccgacagaaagatgctttctatcggtccagatttgaggaaaatgccatgcttgaggatcttgtccacggagccaactaagacctcgcccttcataggcttctgcgtgatgcaggtgaacgtcaccgggaaaagaacgtctccggtcagctcacgcactttcccttctgatatcgccttcagctcactcacagcaatgtagtaaccatgatccttggaggccttccggtttgctatatcctccagaaggcggacaatgacagccttgcggagcaagagaccctgggggctcagctggctaggtgagatcaacacattcaaagacatctccaccttaaggaaaaccatggttgattgccaggatccccctccccctcccctgcgatggcgatcggcagccgcggctcgtcttggctggcgcaaggagcggaggagacgacgagacgggagattttcgtttccgccaagggggaggaggatactcgagtatcttctttcttttttttcccggccgg

SEQ ID NO: 46404 - DNA, 427 bp, Oryza sativa
  Clone ID: PAT_MRT4530_49274C.1
atgctggctcgcccgccggcaccggcccggacttactggctggacccacgcatgcgttctaattcagtccgacggccgttggcaagggacgcggagacacagttcgcttcgatcacgtacacctacactagatggcatactgtcctgcttgcttgcgcacgaccatgccttcagagcaagtggaagctgctttcaaggccatcgagttggacggcgagagcgatgtatctaagctcaagccggcacttgctgcatgcactgtacaaaggactgtgacagacgtcttcatcaacgggaagcatattggtgactggaatgatacctcgccatagcacactgacggcaacctggtgcctgtggtgaccgaggctggagcaatctccagccctgcaatgacgacagtcaccgcacaggtgcccgagggaca

SEQ ID NO: 46405 - DNA, 243 bp, Oryza sativa
  unsure (1)..(243): unsure at all n locations
  Clone ID: PAT_MRT4530_49275C.1
aatgttaaatatatttgattnggagaaaaatttataagaaagtatctcctgtaaaatctaatgattaatatcctatttatatcattatatacaaagactaacacatgccaaaattattaatcacaaattttcctataaattcattaagtcaaccatgcgnaaaaaaccctatattttccgatttaaacacttgaattatacagcaacactattaactcatgaaacacatttattttttttaag

SEQ ID NO: 46406 - DNA, 274 bp, Oryza sativa
  Clone ID: PAT_MRT4530_49276C.1
ggttcttcttgtccgttttttcctatccaacaccttgccaaagccaaccggccacctgctttgcatggacaacaagcatagcagattagacaggctgcatacgacatgtgcagaggtatatgaaccttgagcatcctataatacaaggaaaaacatcaggatcgtcatggaaagatggagtgtactcaagccaacacaacacggacttatacgtgagacacctgtagcttgactgtactaggaggactgtcaccacttattgggggtacctatg

SEQ ID NO: 46407 - DNA, 889 bp, Oryza sativa
  Clone ID: PAT_MRT4530_49277C.1
aactgaattctcccagctgcgaggcatttataatctcaccaaatcatcctatttgcacatcatgtttacgagaagcataagtaataagcttaacaaaccttctcctagataagcatcatgtatatgacgattaatcctagaagttgtatttgtttcagaaggaaggaaatagtcgcacatcacatagctcagttttattagcgagtcaaactttcttgaaagaataagaacaactcttattgtagacacaagtgagtcgatggtattctttcaacacagacaacactacagataccatacattcattttacctgtttcactcgcttttaggacgttctataacctcacatctggcgctaccatgctgaccggaccaaaaccttgttttccattggagggaacggaatgaagctctctctcctctcctcgcagtcgcagcgcagtagtctctagggttttagcgggcggttgtcctccacccgctcgccgcgtggccgccgccttctccccgcgccaccgccgatggacgtcgactccgacccagccgccgcgggcaagcccacccagatggacctcgaggaccagactgacgcgaaggggaaggggaagagcgaggagctcgcggactccatcgggagcctctccatcggcccggagcgcaccaatttcaagaagaagccggtgatcatcatcgtcatcggcatggccgggacggggaagacaacttttatgcaccgactggtatgccacacccaggcttcaaacatgaggggttatgtgctcaaccttgaccctgcggtgatgacgctgccgtttggggccaacatagatatccgtgataccgttcggtacaaggaggtgatgaaggagtatggtctggccccaatgg

SEQ ID NO: 46408 - DNA, 292 bp, Oryza sativa
  Clone ID: PAT_MRT4530_49278C.1
agaaattcttgaaagaagccaaggcaggaaattcaccggagctgccgcaggatgtgctgatggagatctttgccctcctggaggtccctgacctcgttcgtgctggctcggtgtgctcctcatggcgcgcttcgtatatcagtctatgcaaacttggaggctacaggcaggctcagacgccatgcctgctctacacctctgaatctgctggtgagaatgtggcatgcctctacagcctcgcggagaagagggcatacaagttaaccatgccagatccacctatccgtagcag

SEQ ID NO: 46409 - DNA, 1452 bp, Oryza sativa
  Clone ID: PAT_MRT4530_49279C.1
atgggtcaactaaagtcgactgacgcgaaggggaaggggaagagcgaggagctcgcggactccatcgggagcctctccatcggcccggagcgcaccaatttcaagaagaagccggtgatcatcatcgtcatcggcatggccgtggcaaccaacctgtcatacaatgagctcttgttgagtaattttgggattgggagctcaggcctcaagggtctcggtttatgtgatgtagggacggggaagacaacttttatgcaccgactggtatgccacacccaggcttcaaacatgaggggttatgtgctcaaccttgaccctgcggtgatgacgctgccgtttggggccaacatagatatccgtgataccgttcggtacaaggaggtgatgaaggagtatggtcttggccccaatggcggtatcctcacctctctcaacctattctccaccaagtttgacgaggttatatctgttattgaaagacgagccgaccagctggattatgtcctggtggacacgccagggcagattgaaatcttcacttggtcggcttcaggagctatcataacagaagcttttgcatcgacatttccaacagttgtcgcatatgttgttgacacccccagatcaacgagccctgttactttcatgagcaacatgctttatgcctgcagtattctgtacaagacccgcttaccgatgattctgacatttaataaggttgatgttgccaagcatgagtttgctcttgagtggatggaagactttgaggcgtttcagaccgccttggattctgactcatcatactcctctacatttacccgaagcctctctcttgtcctggatgagttttacaaaaatctgcggtctgttggagtatctgccgtatctggcgctggagtcaattcattttttgaagctattgaagcaagtgccaaagaatacatggagaattacagggctgatcttgacaagaggattgctgaaaaagagaggttagaggctgagcgtaggaaggagaacatggaaaggttgcaaagagacatggaaaactctaaaggacagactgttgtgctcagcactggtttgaaggacaaaaatcgtgctacggatatgatggatgatgctgatgaggaggaagaggaggcggcattagaagatttcaggatttctgaggatgatgaggatgaggatgaggatgaaggggaagatgaagaagtggagcattttggcttataaggtgactgaacgtagcgtttacttgacggtgtttaggagaacctagtcatgcctggtgtttctttccaggtgattaaaacggaaatgaaattgtcaatatcatatcagtaggggtggctgattgctagtctgtaaatcgactcttctctgggtcaatctcgtatgctcatgtcggcaatgtatgccacgattctataaaacttgatattgaacttc

SEQ ID NO: 46410 - DNA, 1194 bp, Oryza sativa
  Clone ID: PAT_MRT4530_4927C.1
atggacgcgctgtggcgcgacctcgtcggcgacgtcccccgcctcgtccacaagcgcctcccgtgcctcgtcgaccggcgccgcatggcccgagtctgccacgactggcgcgtcgccgtcgcgccgcagccgcagccgccgccggggacgaggccgctcccgtcgatactcgtcccgcgcgccgacgacgggcattgcttcgcgtgcgctctcgcaggctgcgccacccacgccttcggccacccgctcccggccgacgcactcgccgcgcgctacttcggcgcctacgacggtggctgggtcttcgtcgccttcggccaaatcctggactacgcgctactcagcctccgcaacggcacgcgattccacttccccgacacgggcacggacatggtggccgcgaccctctcttcgccaccgggcgacgaacgctgcgtcgccgccgccatcagccattcctgcatgatgaacaatccacgaatccatgcattcgggatcctgaggcatcgaggtgtggaggaggcgactcatgatcctgctgagttcttcaccggccatgctctggaggatgtcgtacaccacaagaaagccttccacttcctcacaagagaagaaaacctccatgttttttcggtaccggacttccacgaagacgacgacggtaatctggtgataccgcccatggaggttcgccgattctcgcgaggcgggcgagattacggcggatgcttcgctgttcgctacctggtggagtccggcaagagtctcctcatggtcgtcaggctccttcctcatcctcccctctttccgccgacgacatgggcgttcaaggtgttcgagatggtggagacgcccatcaacaacgacggggcaccatacgactggaaggagctggaatcgctgggtgggcgggtgctgttcgtcgcgcgaggctgctccagatcgtacgacgcgggcgactatccaggcgacgagttcaacgagggcatctacttcctggatgacgggagactctacgatgaggcgttccaaatcctgaatccctttgcccagtaccgggaatacccctgcagagatcacggcaagtggctgccgccggtggcgccgccggcggcggttaccggccgcgtggacaagttcttgccggagcaaggcccgtcgcactacacgccgccggtttggattctcccgtga

SEQ ID NO: 46411 - DNA, 464 bp, Oryza sativa
  unsure (1)..(464): unsure at all n locations
  Clone ID: PAT_MRT4530_49280C.1
ggctcgttttttttttttctggacaaaaaatgcattgtgttatctgaaagttcacatgtaatggatggtgacaactttgtgtacacataatattaatcaaaagctgtgcattcgcatggagagagcacactattgttgctaatttggatactgatgaatgcaggggtcatatatttgttcctatatcgatcctgacagcgacaaggttcagataactgttcaacaggtcaaatttcagagcatcgtatatgaaactcagtacatactgaatttccattgtgtcaaactcagagcataaatttgatagcatattatactcactacataggggcaaactgaaattccgggncaacaccactgactattctttcctgcgtgctgtacataccctatatacttctggacataattgccggatatgcgccacagtgaattacatcagtgcacacgggagacataccctt

SEQ ID NO: 46412 - DNA, 619 bp, Oryza sativa
  Clone ID: PAT_MRT4530_49281C.1
ggccgcttttttttttttttttttctttttttttagttctggaactttttcataatagcccctgtcataaacctgtatattcctatcaagcccctcggcgtcacattttttttttttctttttggttcttaatttcttatttgattattaaaccgaaactcgattcaattcaaacaagccgccgatcgaatcaatcatcagctaattaattgcgcgccatcatcttcctcgtcgactgcgccggcgagtagcagccgcgggtgcaggtgcagacgtggtagccagggttggcgacctcggtgaagcagtacccgtcggtgtacccctcgcccctgcacgactccacgcagccgccgccgtcgatctcgcagttgcctctgaacgtgctgctctcgccgacggagcacccgccggcggcgccgccgccggtggcgaggaggaagaagacgaagaatgcagctgcgatcttgctgctctgaaactccatggatgatgaactgttcgacaactagaggtttttttttttttttgaggggggtcaagaagtccaggaatgaattaagagcaaattaatctaatttttgtgtagagaattttctgggatggatgtcccggccgg

SEQ ID NO: 46413 - DNA, 127 bp, Oryza sativa
  Clone ID: PAT_MRT4530_49282C.1
atgtggaggtcatcggtggggtccctctctgcgccgaggtctccaccagggttcctctccgcaccgaggttgccggcgttcgatccagtggcacgacgggcggcgacgctagatgcagtgatgggcg

SEQ ID NO: 46414 - DNA, 733 bp, Oryza sativa
  Clone ID: PAT_MRT4530_49283C.1
gcgtctagaactagtggatccccggcccgcgggcacgagctccggcggcggcggaaagcgcagcggttcccggtcgtcggccggggccaggtcttatagagagaaaggcttggcagccaggtttcgcatggagaacctacgaccgtcgattctgtcctcctgggctgccgccactccggatatggaggtccgtcttgacctcgtcggcagcgctgtcctcggcctccctgcgccccgcctcaacctctgcctccctgcgcccgcggctgaagctcgggatggagagaaagaactgaagatctgcagcccctgggccgttggagtgattgttggaaggtcacgcattgagagagtggcaaatggccaaacgctcaatccatccatgctcacatcactcaaggcgctgagcaacaatagatgggtgcgagacctgcgaggtgcactctcaaatgaagctatagcgcagttctttcagctatgggacgagattcaggaggtggttctcaatcgggaagatgataccattcggtggaagttctctgccgatggccagctctcagcctcttcggcatatgagctcttctacatggcaaggaagatctgcccattcagtgaacttatctggcatatcaaggctccctcctgggtggacattttcgacggcgtcttcgcactaacctgctggttcctgtggaaggagcgtaatgcgcgagtgttcgagcagaaattttga

SEQ ID NO: 46415 - DNA, 570 bp, Oryza sativa
  Clone ID: PAT_MRT4530_49284C.1
tcattccatattccttgtcgaactccagcagccgttctcagataatcgagaaggtgcaaagtctgcgacaaagccttgaaaatctagcttgactgctcttatgtctgactttcctggagacgaatttttaggtggtgagagatcgctacgatctactggtcgagaaccaggtgtaggcgtatctcgatcacctgaagacgaattttgaggtggtgagagatcgctacgatctaccggttgagaacctggtgtaggcgtatctcgatcacctgaagacgaattttcaggtggtgagagatcgctacgatctaccggtcgagaacctggtgtaggcgtatctcgatcaccggaagacgaatttttaggtggtgagagatcgctatgatctactggccgagaaccaggtgtagacgtatcacgatcacccaaagacgaatttttaggtggtgagagatcgctacgatctactggtcgagaaccaggtgtaggcgtatctcgatcacctggaggtgaatttttaggtggtgagagatcactatgatctactggtcgagaaccaggtgtaggcat

SEQ ID NO: 46416 - DNA, 354 bp, Oryza sativa
  unsure (1)..(354): unsure at all n locations
  Clone ID: PAT_MRT4530_49285C.1
gcnntttcgncnaancaatttagccngcaaatctgtgnatatgataancgtacaagtatgnccnattnagcanaggnnagcaganatatnntggnnagagagncccgngngccngtncgtctaaagnctgagacctggatagcaganccctgtgtccntcttgaggcaanatgctngcatagagnttttttcgtaccactctactgaagagtanctgtacanctccattcgctagatgngaggtgctntnagngnctttcnanngnntgntgnncntntntgtagtatatcanggntttnctatncantnnctnntncatttatagttctngncntgnncnnatcttgcnntca

SEQ ID NO: 46417 - DNA, 436 bp, Oryza sativa
  Clone ID: PAT_MRT4530_49286C.1
ggccgcttttttttttttttttttatcgcagcaaaccaaagcagattcacagaagcagcgcagattcacataggaggcaccacgatccacaaacaaagcaaatccatagacacagaggccaccgaaagggaggagctgccgccccacaaagccgcaggcgagggccgatgacaccgcgctaggacccgcaggggagcacaccgacgccaccgagagcctgaaagagaagaagaaccgcaccggagtgcgccaccacacagagacgacggtgttgatgcactcaccattccttgggcagattgtaactggggcctatttaccgcaagacactttttcagcagggggcaccagagccagggcaccaaacggccacctgaaggaaaaggtccccttggcaaaacacccagagtagaggacatttggccattgggggttt

SEQ ID NO: 46418 - DNA, 1629 bp, Oryza sativa
  Clone ID: PAT_MRT4530_49287C.1
atgggtcgggtggttgaccccctggctctcttcaagcggccgtcgccgtcagcaggggagttctgcaagtgggtggactgggagcttccctgctacctcacctccttcctcaccgtcgtcattctcggcatcaggctcaacgcgaagcccaacttcaccctgcagacccggccgcaccagaaagagcgccaacaggcaacagcaacagagcaacaggagctggtttccatggaggcccagaccgaacgatctgcacgcctgagtcgccacctccaagattgccataatgtaccgatcccagttgctgaagttgtccccgggatcaactcctcccggacgacgtgctcgcgggcgtcctcgcccgccgcgtcccgctgcgtctgcaaggcatggcgcgccgtcatcgacacccgccgcctgctgcgagccgacctcctccctctctcgctcgccggcatctacatcaacttccacgagatgcaccgttcggtgttcctatcccgtcccagctccacacgccccgccatctctggcatgttcaccgactacacgcccaacgacaacctagtcgaggatcattgcaacggactccttctgctaaagtccggcgtggctaaccctgctacccgacagtgggtgccttctcctcctgccccacctcagcccgtctggatgaaggacttctaccggtttgacagctatcttgtgttcgaccctaccatatcaacacactatgagatcttcaaaatcccacgagttccgagtataggatttcgtgtgctagatcctatgcttaagagcttgcaacggccaccatcactatgtgtgttactatgtgtgttgcaagtgttctcatcaaggactaggcaatggggagagcgattgtttgtacgagacggtgcggctgcctgcacagttactgatatggcattggcttttccatatgatcatcataatgcagtctattggcatgggacactttatgtacattgccagggagattttattatgatatccttgtcgaataacaagcaccaagtacttgagttaccgatgaatactaaagtatgtcaatatataaaccattttgtcggaagatcaatgaggggtgtgcactatgcattaatcgatattgagcaccgactacgggtttggttcctcaatgagttatatggtcagatgacatgggaactgaagcatgacaatgatcttagtttccttctaaggtgtcaggaaagctgtatacaaaatgatggtccgtggactttgcactaccacaactactttggatatcccagtcaaaatgacatggacaacaaagatgtggtagtacgagtaaataaatttgagtgggactccgacaacgatgacattcttgacactgcaaatccaaatgaaggaggatgccacggatatctttcaattttgggattccatccttataaagaagttatttttctgaaccaaaatagggaaacaggacttgcctatcattatcattttaatagctcgaaagttcaaaatctgggtagtacattcccgaaaccttatgatgatttgtatattcaaggcatgtgtgcatcttttatatatacaccgtgctggatggagaattatgaaagcatgtaa

SEQ ID NO: 46419 - DNA, 1479 bp, Oryza sativa
  Clone ID: PAT_MRT4530_49288C.1
atggacgaacgcggcgtgggagatgaaccggtgctcatgggtgaggtgcagcaagtgggtgaatcaaaccccacactcagcgaagccagccaaagaaccggttttacgttcaactctgttggtcatcatgctatgggtgaaagctcaaattgcaatcttgagggtcataatgtagtgttcagatcagatcgtgagaaatctgaacaagttactcaatcaaatataaaggctaccaatcagaatgctccttgcgagcaagtgccgaaggttggcatgacctttcaatctgaggatgatgcatacaatttctacaattcatatgctagaagagtgggatttagtgtacgaaagtgccacgttaactacagagcagatggcactttatcatccaagtacatggtttgcagtaatgaaggtggagatgaaaatgtgccattcttacaaatggattgcaataactttattggtcgagagcgcaaaaagtatttagaaacacaagatgcacaaacattattggagtacttggataacaaacaagcagaagacccttctttcttttattctgtgcagttggacaaagaggatggtcgaatttgtaatttcttctggacagatggtcaggccattgcagattatgcttgttttggggatgttctctccattgacacaacatttcaaacaaacaagtctgaaatgccatttactcctattattggagcaaatcatcataggcaaactattatttttggagctgcattattattcgatgaaagtgctgattcatttgtttggctatttagaaactttttgaaggcaatgtcggggaagcaacctgaaacaattttcacagatcagtgtgctgcaatggcaaaggcgattatgattgtattcctaaactcaagtcactgtctttgcctatggcatatataccaaaatgctgcaaagcatctaagccatgtaatctccaataatcctaattttcttcatgactttaaaagatgtgtgtatgaagaaaggtcagtggcacactttaacttcaattggcaaaagttgatatctgattaccaccttgaagacaattcttggatacagaacttgtatgatttgcgtgagaagtgggccacaatacagaaggtagtaactgtggatcacagtaaggacgaaacaagagtcacctttaattcagttgatatgaatatatcatgttcttgcaggaagtatacctgtcttggagaagaaaccacacagccatcaaacataaatatagctggagcttcgcagccaactgttcaggaaccacttgactcaaatattgtgatgccatttggtgacatttcgaggatgttcgttccgccaattcgaggagaattcacaaatctattatttcaagctcatcatgaaactactgcagcagcatcagcttcttggcgtttagagtttgaaaatcaagaccccaattcatcgacatcttatgactga

SEQ ID NO: 46420 - DNA, 714 bp, Oryza sativa
  Clone ID: PAT_MRT4530_49289C.1
tttaatgttcgaaatctgcgccggaatttcctaaggtaagttagtcagatcatctggtccttgttggctttcctaaacatgtaggagtacatagctattcttgctggcatcacaatataaaacttggccaatgggggaaagacaccctccacggtatttcactaagggtgtgtttagttcacacaaaaattggaagtttgattgaaattggaatgatgtgatggaaaagttggaagtttgtgtgtgtaggaaagttttgatgtgatggaaaagttgaaagtttgaagaaaaattttggaactaaactcggcctaagaagagctcaatcggagcccagccaagaaaggtcaccaaagctagtccccctcatacatggggatgccgcctcctatgggtcgggccttaagccatgctttgaggcccagcccttacacaagggcctaaccaacttgtcccgttttccagtgctaatattgttctttactacaagtttcattgacctatttcatgtttagttccttctgtacgtagtgtttcacctatctcttgctaattttcattcccaactttgcagcactttttaccactgtttactcgatgagaccggtgccaactggtgcagtctttcgacaatatccgggaaaagggaaagtattctatgatgacccaaaaaggcctaacccggatttgcttgcccggaaaacttgtaaagcc

SEQ ID NO: 46421 - DNA, 736 bp, Oryza sativa
  Clone ID: PAT_MRT4530_4928C.1
ccggccggctcttccatttgtttccccactgctccatccatctccaccgccacccatggattcctcgccgcgccacctcctccgcatctcttccccgagacatctgatgatgccgtgccacaaccagttgtcctgagatcatgatgcaaccattgtgcagctaagttttggagaccgtctgagggcactccttgtacttgatatgctttttgctggagtgggtgatggtagtacagtacggcttcttcatgcgtgaagaactcctgtgaaggactgaaactctgcaaaggacgaggcttagtggaggggggttggatcggaggcgtgcgactgatgccagaaattctgatcgagtcagatgatcatattactagtatagctggctaaacagacgaacagtacagtgttttcgcgtccatgatctttgatcgatgagagcaatagcatcatcgtgttcttcgccggcacgtggtaatgggcagaatctcctgaaaaagttgccatgctcatgcacaggtaagaataggattgaaaggaattcacagtggaaaagagtgtttttgagccatgtgatgtgtttgttctcccctttccagcttggtttacacctgtggtgaatgaatgttcgatagcagtattaccatcatgcaagttccattgaaagaaatcacccaagaacccggacagaacatttataatgctcaagaacagccctggtgcctggattttttgatcc

SEQ ID NO: 46422 - DNA, 1872 bp, Oryza sativa
  Clone ID: PAT_MRT4530_49290C.1
atgtcgagcgacgacgaggagtgcttctacgactacgaggaggaggaggaggaggaggaggagccgggctgggacgacggcggcggcggcgacaccatgctggtcgaggaggaagcggcgttgccggagcgccccgtcgattgctgggtgagtaaagccatcccgaccatactcacaagcctaaaaaatcccatccacgctgatgttatgcataaaaacattcacaggccattacagaagagtctcttccggctgcacagcttgcagcttgtgctacagcaattagtactagtaacaaattacattgtgtttcttgacatgctcgatctacctgcgctgtatgtatgtacacagcaacaagacctgtccatggtgatgaacctgctctacataaagcagcaccaagctcgcgccctcctcatccaccaccgctggaagatggaatccatcctggaccacttcgacaggaagggccgagaccgcatgctcagggagaccggcgtcgtgatccagcagcaggcggaggagaagaacggtggcggcatggccatggcggcgtcgccgtcgccgccgccgcgccccagaagcagcgtgacctgctacgtgtgcttcgaggatgtctcatcggacgctgtctccaccatggattgcggacactgcttctgcaatgactgttggacggagcacttcttcgcgtgcgtgaacggcgggcagaagcagatccggtgcatggcggtcgggtgcgcggccgtctgcgacgaggacgtggcgcagcgcctcctcggcggcaggtaccccggcgcggcgcggcggctgcgcggcgccctcctcgcgtcgtacgtggaggacaacgcggcggcgcggtggtgccccagcgcgccgcactgcgggcgcgccgtccgcgtggacggcggcggcgggcggtggtgctgcgaggtgtcgtgcccgtgcggcgccagcttctgcttcggctgcgccgcgccggcgcactcgccgtgcccgtgcgccatgtgggagcgctgggaggccaagtgccgcggcgaatccatgaacgtggactggatcctcgccaacaccaagagctgccccaagtgctccaagcccatcgagaagaacggcggctgcaaccatgtccgctgcaagtgcggccagtgtctctgctggctgtgcggcgcggccaccgggctggcgcacaactggaccagcatcgacgggcacagctgcaaccgctacgacgacgcggcggagaagaggaaggtggacggcgcgaggcgcaaggtgctccggtacgcgcactactacgagcggtacaaggcccacggcgactcgcgcagggcggaggcggagaagctgggcccggccatcgaggcgcgggctcggcggctgcgcgaggaccccgacccggccacggcgccggccagcggcgacgccgccgaggcgctcgccgccgcgcaccgcgcgctgctcgcctcccgcgacgtcctctcgcggtcctacgccttcgcctaccacatgttcggcggcgaggagcggacgttgaaagcggcggcgccggagtcggaggtggcgacggcgcaggcgctgttcgaggaccaccaggagatggcggagaggcacgtggagaagctgtcggggctgctggcggcggacgcgcctccggcgccggccacggcgggggacgcggccctgcggcgggcgaagcaggacgccgtggcgctcaccgccgtggtggagaagcactgcggcgagatgcacaagtgcatccaggacgagctgctgcccatgctcgtggagcccatgtccatcgccgcctaccgccgcgacggccctatcaaggccaaggactttccaacctgtggtggcgcgtcgtga

SEQ ID NO: 46423 - DNA, 490 bp, Oryza sativa
  Clone ID: PAT_MRT4530_49291C.1
ttgtttttgatatgaataagggtcacatttcgacgacgaaatagaataacatctggcatttttcacccgtagatccctaagaaataaccattcaccacattaatttgacgaacaaatgctaagcaaatgaaatcaaacgtcggggaagcaatggaaacgaaggcgacgtcggggaagcagtggtggcgaaggctcttggctagacggcagcacgcagggtaggctgaggcaggctgagcgagtgcagaaggaagatcatggagagcaaaacctctggctgccacaaggcgtgacggactgggcaggggtgtaaatcatccaactgaatactgcagctcctcggattgcagattcattttctggagtctatgcctacgaagaactttgtttcaccaatacttccagatgctgcacttactgttgttccgaagacaatttgaccaaatttttattacgataaaagaaggcgaatactgttttctgatgagca

SEQ ID NO: 46424 - DNA, 177 bp, Oryza sativa
  Clone ID: PAT_MRT4530_49292C.1
atggcggtgatgggagatgtcattgccacaccccttctccctcatgggtcccttgcagggctatcagtcgtgagagtgtgggaggggatccaaacgacggcgagatggagtggatggctgacagtgggtgcaaagcggcaaaggggatcaggagatcggccattgggcgcggcatag

SEQ ID NO: 46425 - DNA, 2855 bp, Oryza sativa
  Clone ID: PAT_MRT4530_49293C.1
attgtgatatctgtttcttttgcttttgcctttctgtttatactttgtacaggtagcaaattgagtgaaggcataaactattcttacgcttgtatattttcactgaatcagagaggaaaacaattacaggaaactattcttctgttttgctttcctcaggtacccaaattttgcctacaattaaatgggatatgcatccatcaagtgactaactgcacatttttacacatcactttacatttttacacttggtccagttaacctgtcctaagaaagggtggtaggtagtccatgtcgcgaagatcggtgttggctgtgagcgccatcagggcaacgacgacggatctcatggtaggcctcatcccgggctcctcatgcgtgcaggactttgcaagggacgcaatcgtgagagccgagtcgacggggtagtcccctcgcaggcttggatcgatcagttcatcaagagcttccgtggggtttggagcgctgagggccttctcaaaattagcttagatacacaagagctcacagaagagaagaataatgcctacacctgactgcagagggtggtaacttccatttggatctttcaccgggattaacacaatccctttcccggagacccctcccatcccagggttgtacctccctccccacgccgcaagagcagcagacggtgacattgacccatccatcgccggggatccagccctggtggcctccagccgcgcggcggtggtgaggttggcgaagttcacggcgacggcgtcgtaggtgtcaccgccgacgccgcgggggagggggagcgggtaggggatggcgccggcgaggaaggtggaggcgggcgcggcggggagcccgaggcaggagcaggggaagacgaacacgcggtcgccggtgacgacatagtccgggttggtgatggccgggttgtaggggagcagcgcttggtacccgccgccgccgatggcgaagatggtggcgatgaaggtgaggtttgaaccctcggagaagtagtaggcggcgatggccagcgagcagccggcgcggcaaccgtctccagccgccgcaaccgccgccgccgcacaggcgccgatgaggagggcggggagagagagtatgaggcctccaacaccatcaactataactacaaaatcctcggactcgaatccagcggggacctcatctgtggtgggtggcatgcattctatgtcggggtctggaggtgcggtgaagtcggcggggagggctgcaacgttctggacgtgttggcgcagacggggcagtctcgcctccacccactccgcggtgcgcgcctcgctcctgagctgggtggtgaagttgcgcaggtggttgccgagcgtgatcgccggggcacggagggagccgcccgccttgacggccatcttgcggatgcggttggcgcggtagcggaggttggagatgccgcgggcgttcgtcggctcgaggcggagtcgcgggaagacgaagatgtcgagcgcctccagcacccggcagagcgtcgcaacagcgcgcaggcggtggatgttgttctcgtagactacccactcgtagtccacctccagggccatgagtacggagagcatccgcggcgcgttgcggacggagtcgacgacgtcgacggcgacgccctgccggccggcgcgggtccgcaccacctcctcgaggccggcgagcgagacgatcctgtgggccatcgccatgggagagtccgagagtggaggtgggagggtgtttgggggaattccggtgtttgggctcgaccattgccgccagacttccgtcggcgtggccccgtctccaccaccgccgacaccggggtccagacttcgctcccgcccgcggcgggtggtggacggcgcggcgccgagggataaggaggcggtggtgacgtgggacacagagccggcggcggcggggaacgcagagccggcgtcacgcgacacagctccgacggcgccactcgggggaggaggatgagaggatatggaggtgggacccaccactccggctccctcccggagttctccgctcccgccgccgcggctgttgagcacgccgagggcgaagatctccggcaccgcgtcgtcgttgaggtcagtggagagcgtccgctcgtgggcctcgtcgacggcgatgatgctgtagctacccaggtcgggctccacctccgcgcgccgccgaccgcccgccgccgcgagcaggagcacgtccccatctccgatttcatcgctgcaacctgagaccaccacccagccgcgccaccactcactatcactaggtgtatccctatgccaaccccctagccgtgccgctgtcacgcagtcgagcatgtacgagctttgccggcgactccgcgtctccgccgagctggtagcattcgcgcctcgactttgagccgccgtcggcctcctccgcctccgctccggcgggtcacggggccgcgtggatggagtaatcgagcccggccctgagttgcgggtcgtcggcgacatcccccgccctcttccgccatcgacgcatccggcgcagaggaaccttacctggctggcctccccgccccgccgccgccgccgccgcatcacccgcctccagcgacccacaccgccgcggggcgctccgctcgcccgccacacccacccggcgcatgcagagcggcgccacgaggggcgagagcgcgctacccgcgtgcacgcggcggcgatcacaggccgcagaacctcgtggcccccgcccggcagtgcaacgccgccgtcgtccgcgtcattctccggatctcccccgtgctgctgaagcgcttgcagcgagagcgtcgtcgtcgtcgtcgacgacat

SEQ ID NO: 46426 - DNA, 1925 bp, Oryza sativa
  Clone ID: PAT_MRT4530_49294C.1
acaggaaactattctggtgttttgctttcctcaggtacccaaattttgcctacaattaaatgggatatgcatccatcaagtgactaactgcacatttttacacatcactttacatttttacacttggtccagttaacctgtcctcagaaagggtggtagtccatgtcgcgaagatcggtgttggctgtgagcgccatcagggcaacgacgacggatctcatggtaggcctcatcccgggctcctcatgcgtgcaggactttgcaagggacgcaatcttgagagccgagtcgacggggtagtccccttgcaggctcggatcaatcagttcgtcaagagcttccgtggggtttggagcgctgagggcctcctcaaacaggaaaaccagtccttttgattcgctaacagattcacttgatctcacaatagcttgtttggctgaaagaagttcataaaggacgacaccaaaagcatagacacccacgttaggagaaacctcaccatatcgagcttctggaggcatgtaaccaaatgtaccagcaactcgtgttgacagtgactgcgacatacttccaacttctgtaagttttgctagtccaaaatcagcaatctttgcccggaagtccttgtctaataggatatttgcagacttgatatccctatgaacatatactggaacaacatgttcatgaaggtactcaagaccacgtgctgagtctagggcaatttgcactctggtagcccatgagagaggcgcataaccagtcctttggagatgctgacttaggtttccattgtcaataaattcatagacaagaaataagcaattctcaacacaataaccaatcaggcgcaccagattcaagtggtgaacatgtgtcaagaccttcagttcagcaaggaattcttgagttgcttgcatgcccattttctttatggcagttttctcgcctctaagctcagcataatacactgaaccaaaaccaccttgcccaattttatgttccatagaaaatccctgtgttgcattaaaaatctcttcatatgagaattctatggatctctcaaccttaatgccttcagcttgggaagcatcatcacacaaataatagcagcaaggtggctggtttcttctggagatggacgcgatgtggccttcctgaacttttgccaccttagcatagatacacaagagctcacagaagagaagaacaatgcctacacctgatttcagagggtggtaacttccatttggatctttcaccgggatgaacacaatccccttcccggagacccctcccatcccggggttgtacctcctgatcagctccatctccgccggcgacgagaacccgtactgcgcggccaccgattcgagcgtctccccgtcccagagcgggtaggtgaggaacagcccgtaccgcggcgagaccctctcgtcgccgcatgagcagttgatggtgacgttgaccctcccatcgccgccggggatcctccccggcgggtacgcgttggtggcctccagccacgcggcggtggtgaggtcggcgtagttggcggcgacggcgtcgtaggtgtcgccgccgccgcgggggagggggagcgggtaggggatggcgcctgcgaggaaggtggaggcgggcgcggcggggagcccgaggcaggagcaggggaagggaacgagcacgcggtcgccggtgacgacgtagtccgggttggtgatggccgggttgtaggggagcagcgcttggtagccgccgccgccgatggcgaagatggtggcgatgaaggtgaggtttgaaccctcggagaagtagtaggcggcgatggccagcgagcagccggcgcggcaaccgtcgccggacgccgcaaccgccgccgccgcgaaggcacaggcgccgatgaggagggcggggagagagaacat

SEQ ID NO: 46427 - DNA, 1950 bp, Oryza sativa
  Clone ID: PAT_MRT4530_49295C.1
atggaatccgcgacgccatccaagagggccaagacggcggccggtgtcgccaccccgcagaagatggggaaggcggcggcggcggctgcgttggccgaccagttcttgacgccggagaagccgacgccgaaggttgcggcggcggcggcggcggccgagcagatctggacgccggagaagccgaagcagccgtcggcggcggagcggagggcgcggagcagcggcggcgtggcgttctctgtcaagggggtccggcgggcggcgctcgagctgcggcggcggtcggagaggggggcggcgtcgccggcggcggcggcggcggcggcggaggacgagctcgaggccgtggagcggcagcttggtgttggtcccgcgcccgtccggagccccgtcaagcgcacggccaagctgccggagagctacgagatgctgtgcgagttcttcaattgcttcgagagttccacccggttgctccgtatgaagggatccaaggcatccttccccaacatttgtgctagcatccagcatttgtctgaacggaggtttacctacagccatcttgctcagcttaagtacataatgcctgaggttattgttatcaataagatccttttgcgtgacgagacgacttgctgcatgaagcctgatcttcaggtgaacctcctggttgatgcggttgagggtgttgccaagcaaaagggggaaaccggatactcggccttgagaaggatcttcaggcagaggcttgtggattacttcagagaccatcctgagggacatgacattccagagcatgaactgccacatccatttggtccaacaagatcaagtgcaccccaggccattcaagaagatattcccaaaactgtttctgcgctaccgttgtcatctgcaactgatcggcagcctgttgcaatgtctcacatgcctaattccttcaagagaatgaagtcgctgctcggttctcctgtttctggtagtgtgagcttagtccgtgaatccgaaggccaagagaaaagtgtcgagggtgttgcattccagtctggctatgatactccacctctcaagatggcgaagcgatctgctaggacgaagctcttcatgacaccgacgaaagatgctagcagcatggatgagaaaaagcaaagcacaagtgcgtcgacccttgatggtgatgatgagttgctcagttttctcccaaagtctctcctgcaatcggtgaaggacaaggaaaacagagctttggtggagaagcaaaccggatttgcagatcacattaaaagggagaaactaatagcatcactgccaagcatctttgacattatcttccttatctatcaatcaaggcagcgcactgtgatgacaaagcaggagctcatccacaagataattgcaagcaatccaaaaattgtggacagaggtgaagttgaagatcagttaaaattgttggaagagataattccagactggatctctgagaaaaccgcacgaactgtccctatactttgtgtgccgggcctggtctgccggcccatcgtgccgggccagcccagcgtgccggtggggaggcccaggcacggcccggtggtcgggccgggccagcacgggcccaatacaagtcgggccgtgccgtgcttgggcggggccaaaaagctgtgccgctggcggcggcggagcacgggctcggcggcggcgtgcgggctagcggcggcgcgcgggcttggcggaggcgtgcgaggtcggcagcgcgggggctggccgacggtgcgcgggctcggcggcgacgcgggggctggtcggcgggcggcggcgcaggggctagccggcagcgcgcgacctggcggcggcgcgggggctggccggcggcgcgcgggctcagcggcagcgcgtgggcttggcggcgacgcgggggctggccggctggcggcggcgcgggggctggccggctga

SEQ ID NO: 46428 - DNA, 2117 bp, Oryza sativa
  Clone ID: PAT_MRT4530_49296C.1
aaaagagaactactctgtatattagatcagagatgtgcacaaaagaaagacgtgcggttttgaacagttgaatcacaaggttgggggcttgcactcttgagcactcccaattttgtcattgccatacaaattgtacaagcatgccatggagcatgaattctcccaggcaagaaataattacccaattactactactagtgctaacatatcacaagcagctttggtttgatcaatttacccaaagctgaaaatattcaagatcaatgaacaccaaacatttgtagtacaagtgtaccaggcagaggcagctagcatcgccacgctgacaccgagacgagctccgaccgctgccaccacagcgccagcgccgcctgccgcttctccacatggaacccatggctggccgtgcgcctcagcaggcattccgcctgcgcctccgccgcattgctcacctgcagcgccgcaaaccccgcggacgccaacatggactgcaacggcggaggcagcttgtcgccgccgccgaccgcgaggcgctccacccgtggccgcaggacgaactgctccaccttggacaccacgtccggcgacgcgcccgccgcgtccagagactccagcagcgccgcgcaagactgcaggaggttgagggcgccgcgctcgcacccgtggtcgacgcacaccacaacggcggggcggagctccttcacgacacggaggtgcgcgggcgccggcgagaaggccccggagccggccgtgagatggacggccaccgcttcgtcgggcgcggccgagagtcccaagggcggggacgcgctgctgagggggtcgaacacgagggcggtgaactcgaacgggatgccgagctcggcggcgaagcgcgtgaggctctcgttggtgaggtggagctcgagtgggtggctggaccccggcgacaccaatgcggtcaccttgaggttcggcggcggcccagcagcgcggcgccagtggtgcgcgagctcctgcatgagaggcggccaatgggcaccgaagccgacgtcgaagtcgaggaggtggaggcggcgcgcggagccgagcgcgtcgaggaaggcctgcgtggatgtgaaggtggtgaactgcacggtcggggaggcgtccgccagggccttgtgcgcggcgagcttgagcgggacgtcgaggggagtagaggagacggggagggcggtgggcgggaggagcgcgtcccggaggagggcggcggcgcggaggagcggagggtgggcatggcccggaggcgacggaagagaggggaggcgatgattgagccgcgccaatatctccctagcggaagtggagtccccggcgtcgaggaggcgtgcggcgtcgaggaggtcgtcgacgagcggctgaggaggatggtcagagggcatgggcatggggagttggagcaggtcggagtcgaaggaggggtggtcgggaaaggtgtcggcgtcggcatagccggtatccatgatccagcggaggaaggaggagtcgggggcgggggcgggggcgagcatgtgcatgtgcatgtcgacgacggcgtcccagtcgcagtcgtcgtcggcggcgatggggggaggagggtcctccggtggtttggaggagcaggagccgagggaggtgctcgggctgctgcggttgtagagcacggaggtgggctccggcgacttgctgctgtccggctccggcagcggcagggtggtggggttgtggggatggcaagaggaggaggacatgagggcaatattgatcataggcagcatgtagagtactcctatcctccactccgtcgtcaagccgccggtcgtgcacggcgacgtcaagcccaacaacgtcttgctcgacacgtcgagctcatctagggcggaagcggcagcagctagggaatcgggctgctgccactcccaacatctccaccgctcgagggccgccgcgccacgccctcgtctccgccgctcgccgccgtctccgctgcccgccgccgtctcgaagtcgcgagctcgcaaaggggatccgatcctcgcccgcccgctgtcccaccgccgctggctcccggctcctgcccgccgctggcagcgccgccccagcagcgcgtcctgcat

SEQ ID NO: 46429 - DNA, 897 bp, Oryza sativa
  Clone ID: PAT_MRT4530_49297C.1
atatattaatagtgtagtatatatttataaataattatagtatgaatgagctattaaattggctataagctagtagttggctattttattaaacctgcttaaactaatcccgtgacttgcgagcttatcttgagtcttgactcaccgagaggtcaaccagacgcgacgactggcactgtggcacacaccttatccagaggggagtatcccgggcagagctatagctaagctagtagtccatggaagaagaagcggaagcggcggcgccaacgtcgtgggtggtcaaagccggcgccaccctgctcaccgtcaactccggcatcgcgatctaccgctccggcgccaggggtgacgccggcgcggtcgccttcgtcgtcgcctcctacgccgccctcctcctgctgttcgcgtgcctccgcgcctacgagcgggcggcgccgggcgcgccggcgagggcgccgctgaggcgcgcggtgtgggcggccaccgcgctgctcaccaccatgttcgcgtggaaggtggccgcgctgatgccgtggcccgtggccgccgtggtgtgggggctctccgccgccaccgtcgtcggcgggttcgtcgccctcttcgtccgcgcctgatgaagaagccgtgggagctggatcagggccagggatgcctcgtgccgccgtcctgcaccccggctatgtgtatttgtgtgtatagtggttttttcccccttattgaaggataatcactgtatacagtagtatagtcgactagtcgtgtacatcctccgccctgcccttatggccttatgtacagccttccgccctgcttttttgtacatctctctgtatgtgtacatacataaatactccttccgtttaaaaaaaaaaaaaaaaaactcgagggggggcc

SEQ ID NO: 46430 - DNA, 689 bp, Oryza sativa
  Clone ID: PAT_MRT4530_49298C.1
cgcgcgtatacactcctatagggcgattgggtttctcaagaggggccgggctcgcttgtcttctccttcctctcgcctcgcctcccttgcactcaaccacgccttgatctcccacacgcgagccaagaattcgcgcgcccagatgagctccccggccgccgcgccgcccggcgacctcgtcctcccgccgctgccgccgatcaagacgacggcgccgccgccgccgcctgcgcggacgtcgtcgtcaacggcctcgccggcgccgtccgacgaagcgagggcgcctctgaagaaggaggaggaggaggagccgacgacgccgacgtcggaggagagcaggctgcgtgcgccgaccgtgtgcccgccggcgccgaggaagccggcgcggacggcgaagaggaagtcgccgccgcctccgtcgtcgtcgccgtcgccgtcgacgctggtgttcttccccgtgcagcgcgacctcgccgccgtgttccggtcgctgccgcccaagaagcggatccgcgccggctgatgatgatctctacccacccacacatcggcgccgccggcggagcagcacatttgggcgtaaattatggggctcgatggttcgatccatccacttcctcgggtgatttccttggaattcattgaggacattctcttccttctctgccactttttttttcttcctctct

SEQ ID NO: 46431 - DNA, 426 bp, Oryza sativa
  Clone ID: PAT_MRT4530_49299C.1
atgccatatactgacatagacttcagctatgttagttgtgccgcatactgcgccccttttcccacgaaaatccttgaccccaatgcctcaactagttttgccgcaccttcaaaaagcaaaggtctagccgcggtcgcccgaggaggctttcttggcagaagaagtctgccaattaataaatcatcaatcgctaagacaaattccataagagaacctagtagtgttgatgttttacttaccacggagacactaaccctcctgagcatccctgctcctttggctctgggaaatttggtccaaagtgtccttttgactcctattgcaccactagagccaacgcctgaggatattgcggtcactgctgcgagggcaatggctgagtggggatgtgcctcaacgtcctcatggagcgaggcagattcctag

SEQ ID NO: 46432 - DNA, 339 bp, Oryza sativa
  Clone ID: PAT_MRT4530_4929C.1
aaaataactcactccaatgcagccatatttcattctttgtgctgagttttgttcacagtccgattcacacatacagattgagaacagaaagccttgtgcacattgcacacatttgatgcaaaaccagacattttacaaatggatccctgatccacaacaaaagccaaaaaagcaaacattttctctggtgatcatgaaaagcttgcaggaatggtcagagagggaaaaaaaaattaagagccgaccagaatcatatgctggcaaactggtaaaccaaacttggtgagctggtcactttgtaggcccaaagctccccttttttttacctgagcccctata

SEQ ID NO: 46433 - DNA, 380 bp, Oryza sativa
  Clone ID: PAT_MRT4530_492C.1
atggcgacaaccaactggatcttcaaaaatggatcggaggctaaaaatggccttgcatttaccgccaccactagatttagccgggggtcaactcttgtcatcaatggagaagaccgttgtcaccacgtccgcaactattctcctgccatcagtgcactaggctcggccatatccatcggctggtccaagcacaatccatccgcccaatgcctccgcacctggccaccatcatcctcctgctccggtgccacccaccaccggctctttctcgaataattactcttgccctctcctctcctcgatcctaccagcggcgcggcggcaccacaggatgaggcgatgcgacggaggggctcggttggcggcggcaccacatggag

SEQ ID NO: 46434 - DNA, 774 bp, Oryza sativa
  Clone ID: PAT_MRT4530_49300C.1
atggccggaggaggagatgacctgaagatgctcggcgtctacgtgagcccattcccactgcgagtgaagctcgcgctcagcttcaagggcctgagcttcgagtacgtcgaggaggacctccacaacaagagcgatctcctcgtcagctccaacccggtgcacaagaggacccccgtggtcatccacaacggcaagcccatctccgagtccatggtcatcgtgcagtacctcgacgaggcgttccccggcgccggcgccgccctcctcccctccgaccccctcgaccgcgccgtcgctcgcttctgggcctcctacgtcgacgacaaggtaattcgtatgatcaccgtacatcagttctctcacgcaagcttttctgacgattttggtgctgatcgaatgatgcagctgttcagtgcgtggaagatggtgttcaagggaaagacggaggaggagaaggtggaggggaggaagcagacgttcgcggtggcggagacgctggagggagccctgagggagtgctccaaggggaagcccttctttggcggcgacgccgtcgggtacgtcgacgtcgcgctcggtggcttcgtcccgtgggtgcatgcgatggaggagctgttcgggttgaagcagttcgacgccgccaagacaccgctcctggcggcgtggctggagcgcgtcggcgagctcgaggcctacaaggcggtcatgccggacgccggcatgatgatagagttcaagaagaagcaggcacaagaagccgccgcagaggcctga

SEQ ID NO: 46435 - DNA, 204 bp, Oryza sativa
  unsure (1)..(204): unsure at all n locations
  Clone ID: PAT_MRT4530_49301C.1
ggagacacgcaaaagcaaagcaaaccactcgccgaacaccaactcctngncgccgacggcgaggaggaggaggagggagcgagcttgacgccgncgncatggcgggcggntggaggtaggnagcngcgcgtcnggtgnaggcttctcgtngnnntgctgctnctaacgntggttgtgtncngggaacttcctggagagcacgca

SEQ ID NO: 46436 - DNA, 420 bp, Oryza sativa
  Clone ID: PAT_MRT4530_49302C.1
atggagaaatttgaagatgacgtaaaccaagttgatggcttacgtcttagtaagaacgatcaaacatatcatggtccaattatgcacagccatgctaagaaaatacaactagaggtgaactcactctttgctcaacttaacccaaattttaatgagaattttatactacctaaatattctacctttgtcttgctaaggtttacatcggaagacatcattactacgccaagaaggatgggttatgttgaggatgacaagagttacaccgagcaggaattagcccatgcactaccagcagctgtctacgccaacaaaaagttggtttacgctacaaaggctcaacatccaaggcttgtacgacccagccagtcaagttacgggttgcatggcatacatggttggaaagaggggcatgtctag

SEQ ID NO: 46437 - DNA, 299 bp, Oryza sativa
  Clone ID: PAT_MRT4530_49303C.1
atgacgattgtgatggttggaatggtcggaaataccctccaaccatcattgggagctaatccacatcgtccagaagaaaccctgcatccagcggcgatgagggaggttcggtcgaaccccctggttgggccgaacctggggccggcccaaccagcccatggtttggctggcggcctcctctgttattcttctccagacttttgaattttggcctagtttgtcgtgtcaattctgagttcttggcccattcatacataagtctggttctcgacatcgtccgattgatttatcgtttgaat

SEQ ID NO: 46438 - DNA, 540 bp, Oryza sativa
  Clone ID: PAT_MRT4530_49304C.1
atgacatcatcaacggtggccggaccgagatggcgacctcgccggagctagggtggtcggctgcgaatttggagggtatgtacacgtagaggacgacgagacgaacccggcggtactcaccacaacgtctaccgatgaccgacgacggccggcgacgagagggtggcggcggcggctcgggttgcgtggtggcggcgggctacggcggccggcggcaaaggagaggtggcagccgggcttctccacctcctggaaaagccaaaggcggcgacgtcaagcgacggcgacggcggaggcggcggcgcggtgcggatggaggatggccagcggcggcggcgagctaggtggcggcacggcggctctaggagtcacgagagaggacgggagagggggtaaacgaaagaggaggactagggggtcctatttatagccttggattgaagagatcggactcctcccgcaaggaatcgatccgggaaatcaaaaactcggttttgaagataaactcgaaaacgagttcgattcgggcaaaatactcaa

SEQ ID NO: 46439 - DNA, 343 bp, Oryza sativa
  Clone ID: PAT_MRT4530_49305C.1
acggggacgcgtggtaagaaagcatactcaacacatgggattaactgatcactcacttagctaactagaatactgcgaccatgtcagacaagtgcggcaactgggactgagctgacaagagccagtgcgtgaagaaaggaaccagctatggcgtgaggatagctgaagccgagaagagccactttgaggaggtcgccgccggtgaggagaacggcggttgcaagtgcggcaccagctgctcctgcaccgactgcacgtgcggccagtgaagtaactaagcaaccgagcactcgccgacggcgagtcatctacctgaagtaggccacagtgcaaaccacccata

SEQ ID NO: 46440 - DNA, 496 bp, Oryza sativa
  Clone ID: PAT_MRT4530_49306C.1
aaccacgtaccctttgccacaacctttttccaaagtcctaatctttttatctagcatgacgtgatgcaccatatcctcacaaaagaaaatagtttttttttttcaacaaaataagggaaaaaagataaaaagaaaagatcatggatcttcttcttatgttagtaccaaatttgaaattttcatagttcatagctgcaaacgtgtagtcaaaaggtataaagccatcccttaaattatgtgcaaggtttccagtctttgtaggttgctatatagagttatagacagtcttaccaggagaaaacagcaaacatggtcaagttcccaaaaatgcctctttataattattattacattatttacatcagcagcagatgcaaaacaaataattatttgatcaaaaaaccaaaagtaggcattcagcttgcattttaattttattttcctgacaaatcttttttttttgttttttgcttattatatgcaggatcgaacttga

SEQ ID NO: 46441 - DNA, 614 bp, Oryza sativa
  Clone ID: PAT_MRT4530_49307C.1
cccacgcgtccggatattttagagcaactttcatatagaacgttttcaaacgtaacacaccatttagcagtttaaaaaacgtgccacgaaaatcttaatattcatctaactcttgttggataaaagaacgggacctttcttgtgcaatctgaattctgaaatcttggcggcgacaggccggagagggaggtggcgagggtgcagccggcggcagacaagctgggtgagctggggttcaggtacaagtacggcatggaggagatactcgacggcagcgtcggctgcgcggcgaggctgggttacatcgacgcagccaagctcaggccgcaggaaggatgaatctgctacagatttgcaggatgaagaagatggatgatatttgttcggttttgaacaagtttttggtgtttgtttgtaatctcatgtgttctgaatacctctctcatgtatcacatgacgcatttctgcgtcagagaacgatattaataagtactccgtggagctcgctaggcacttgagttatcaagcgtgtttcattcggtaattcgggctaatttgctattgttagcacaagcctgaactggtattaccatttaaaaaaaaaaaaaaaaaaa

SEQ ID NO: 46442 - DNA, 937 bp, Oryza sativa
  Clone ID: PAT_MRT4530_49308C.1
tcgaggcccggccggggaaaaaaaaaaaaaaaaacacccccaccgccacccgcgaccacagactccacgattctctcagagagagagagagagagagagaggggactcagcgagcggtgggcgagagggggagatcgaaaccctagctagggtttgcgcgcggcggcggcggggatgtcgacgccggcgaggaagcggctgatgcgggacttcaagcggctgcagcaggacccccccgcggggatcagcggcgcgccgcacgacaacaacatcatgctctggaacgccgtcatcttcgggccggatgatacgccgtgggacggaggcacgttcaagcttaccttgcagtttacagaagattatcccaacaagccgccgactgttcggtttgtttctaggatgttccacccaaatatttatgcagatggaagcatctgcttggatattctacagaaccagtggagccctatatatgatgttgctgccatattgacttcaattcagtctttgctgtgtgatccaaaccccaactctccagcaaactcagaagctgccagactgtttagtgagaacaagcgagagtacaaccgcaaggttcgtgagatcgtggagcagagctggacagctgactagggcatgcagcagggcaacgggtggtatccaccatgccagaaagatgcaataagcaaccgtgaaaaacctgtgcgtttctggctctccagatttgctgtcatcttaaaacattataagatctccagtgattgcttgtagtccgttgatgtttttgtgttcccatgtcccagttactcttggctgcttttatgtagtggtgttgacctctcatgcactagggcattctgctcatgtaaaaaggggattatcatcataatatgtgaatggaagcgaaatgggtcatgagatttgagtctgcttgcac

SEQ ID NO: 46443 - DNA, 531 bp, Oryza sativa
  Clone ID: PAT_MRT4530_49309C.1
atgtcgacgccggcgaggaagcggctgatgcgggacttcaagcggctgcagcaggacccccccgcggggatcagcggcgcgccgcacgacaacaacatcatgctctggaacgccgtcatcttcgggccggatgatacgccgtgggacggaggttttagtctaccagtctgccagcatggtaacttgagaagtcgactaacagttaactcttacgtatctgtaggcacgttcaagcttaccttgcagtttacagaagattatcccaacaagccgccgactgttcggtttgtttctaggatgttccacccaaatatttatgcagatggaagcatctgcttggatattctacagaaccagtggagccctatatatgatgttgctgccatattgacttcaattcagtctttgctgtgtgatccaaaccccaactctccagcaaactcagaagctgccagactgtttagtgagaacaagcgagagtacaaccgcaaggttcgtgagatcgtggagcagagctggacagctgactag

SEQ ID NO: 46444 - DNA, 228 bp, Oryza sativa
  Clone ID: PAT_MRT4530_4930C.1
atgcagagcctggctcggcactccttgagagctctgctgaacctgcttctgcttctcctcctcaccgtcgtcgtccttgctgcctccatgtatataccactgcagcttccttggcaactaattgatctgaacgagcaggacgtgtatctgtatatccccgacaggaacggcgcctgtgttgtcgcatggcaacaaccaccactgcaaacgctgtttggctcgccatag

SEQ ID NO: 46445 - DNA, 485 bp, Oryza sativa
  Clone ID: PAT_MRT4530_49310C.1
atccatcctgaaggtaaacggagcatgttgaagttggcaaggaggatgacggacaacttctgtgcaggggtgagcacatcatctacccgtgaatggagcaaactggttggattgacaggcaacattggggaggatgtgcatgtaatggcgcggaagagtgtggatgaacctggaacgccgccaggtgtggtgcttagtgctgctacatctgtgtggatgcctgtgatgcctgaacggctcttcaacttcttgcacaacaaggggctgcgtgctgaatgggatatcctcagcaatggtggccctatgcaggaggtgacaagcattgccaaggggcaacagaatggcaataccgtatgtctactgaaggctagtcccaccaaagacaagcagaacagcatgctgatcctacaggagacgtgtgcagacgcatccggttcaatggttgtgtatgctcctgtagacatcccagcaatgcaccttgtcat

SEQ ID NO: 46446 - DNA, 654 bp, Oryza sativa
  Clone ID: PAT_MRT4530_49311C.1
gcacgaggaattaagaaaaagaagcacttaatcctcccctcctcgatcccgagctcgcgcgacaagtccgaccaccgcggcgatggatttctccggcggcggaggcggcggcggcggcgcgacgctgtcggagatgtaccagagcgcgcggcggctgctgctctcggcccgggacggcgtggcccgcgtcgagcgcctcgcgtcggcgcccacctcgtcttcctactcctcggcgccgctcgtcgggggcggcggcggtgccggggattcggcagccgccgaggaggtgcggcgggaggtggcccagatccaggggctgtgcgcgcagatggaccggctctggcgatccatccccgccaagggccagcgtgatctctggaagagacaagtggagcagttgtctgaagaggttgattcgctaaaggaaacccttgacagacattctctgcggcaaaaaaagagggttctagaagcaaaagaaagggcagagctatttgagagagctaatggtgagtcttcacatgtccttcggatatttgatgatgaagcccaggcaatgcaatcagctcgtagctcctctcgtatgcttgatgaagcatatgaaacaggagtagctatccttcacaagtatgctgaccagagggatcgtctaaa

SEQ ID NO: 46447 - DNA, 3018 bp, Oryza sativa
  Clone ID: PAT_MRT4530_49312C.1
atgcagttcccgttctccggcgctggcccgggcgtcttcacgtcatcgccggcgctctccctcgcgctggcggacgcggtggcaggccggaacagcggcggcggtgggaagatggttaccgcggcccatggcggcgtcggcggaggaggaggaggaggacgcgcgaaggcgagggacgcgttggaggtggagaacgagatgagccggtccgggagcgaccacctcgacgtcgtctcttgcggcgacgcgggcggcggcggcggcgacgacgacgatgacgaggacgccgagcacggcaacccgcccaagcgcaagaagcggtaccaccgccacacgccgcagcagatccaagagctggaagcgatgttcaaggaatgcccccacccagacgagaagcagcgcgccgagctgagcaagcggctcggcctcgaaccccggcaggtcaagttctggttccagaatcggcgaacgcagatgaagatgcaactggagcgacacgagaactcgctgctgaagcaggagaacgataagctgcggtccgagaacctgtcaatccgggaggccacgagcaacgcggtgtgcgttggctgcggcggcccggcgatgctcggggaggtgtccctggaggagcaccaccttcgcgtcgagaacgcgaggctcaaggacgagctcagccgagtgtgcgcgctcgccgccaagttccttggcaagtccatctctgtcatggcgccaccgcagatgcatcagcctcatcctgtgccaggctcgtcgctggagcttgcggttgggggtatcggttcgatgccatcagccacgatgcccatctcgacgatcactgattttgctggcgccatgtccagttcaatgggcacggtgatcacgcccatgaagtctgaggctgaaccatcggcaatggctggcattgacaagtccttgttcttggagctagcaatgagtgcaatggatgagctagtcaagatggctcagatgggggatccgctatggattccaggtgcctccgtaccttcctcgccggcaaaggagagtctaaacttcgaggagtacctaaacaccttcccaccttgcatcggggtgaagcctgaagggtatgtatcagaggcatctagagaatctggcattgtcatcattgacgatggcgccgcgcttgtggagaccctcatggatgagtttgaattcttgcgacagcgacggtggtccgatatgttctcatgcatgattgccaaggcatcaaccactgaggagatttctactggtgttgctgggagtagaaatggtgcattgcttcttatgcaggcagagctacaggtgctttctcctcttgtgcctattagagaggtgaagtttctcaggttctccaaacagctggctgatggtgtatgggctgtagtggacgtttcggctgatgaattgatgagggatcagggcattacttctgcatcctcgactgcaaacatgaactgccgaaggctgccttctggttgtgtgctgcaggacactccaaatgggtttgttaagtatttagttcaaatatcagtattttctgaagtctataatctctctattgatcagtttctggatctgcctcctgctttcatggtcacatgggttgaacatacagaatatgatgaggcatctgtgcacccgctctaccggcctcttctccggtctggtcttgcccttggtgcagggcgatggatcgcgacattacagcggcagtgcgaatgcttggcccttctcatgtcttctattgcattgccagagaacgactcatcagctatccatcctgaaggtaaacggagcatgttgaagttggcaaggaggatgacggacaacttctgtgcaggggtgagcacatcatctacccgtgaatggagcaaactggttggattgacaggcaacattggggaggatgtgcatgtaatggcgcggaagagtgtggatgaacctggaacgccgccaggtgtggtgcttagtgctgctacatctgtgtggatgcctgtgatgcctgaacggctcttcaacttcttgcacaacaaggggctgcgtgctgaatgggatatcctcagcaatggtggccctatgcaggaggtgacaagcattgccaaggggcaacagaatggcaataccgtatgtctactgaaggctagttcttctgttccccttaccaaaaatttcactgtgcagcccaccaaagacaagcagaacagcatgctgatcctacaggagacgtgtgcagacgcatccggttcaatggttgtgtatgctcctgtagacatcccagcaatgcaccttgtcatgagtggtggggattcgtcatgcgtcgcccttcttccatcaggttttgccatcctgcctgctgggcctagcatcggcgcagatcacaagatgggcggttcattgctcaccgttgcattccagatacttgccaacagccagcccagtgctaagctcacggtggagtcagtcgagaccgtgagcaaccttatctcctgcaccatcaagaagatcaagacggcgctgcattgcgacgtgtgaacccaacaaggggggacttttggcctagtgggagcggctgtggcgatgagcctgagtcaagaacgaaccgcgacataggaagggacctttgctaggtggcaaggaccggacggggcaggtccttagcacagagcaatggtggtggttcgggtattgactcagcctctcccgcctccgttctctcctgtgactggtgcatgttgaagtgaacctgcattttggacgccatgtagcaggccatctttctttctttttcctttttctttttctttttctttttttagggagaagggagtcatctgtgttttttgttggctggctcagggtgttggtgtttctggtttctagcttttgttacagggagatgtgatacattttgtagaagctccgaattgtcgtgctggtatgtgaggttctgatcataggtctgtgtttgatagtctcgagctatcaacgcctggc

SEQ ID NO: 46448 - DNA, 615 bp, Oryza sativa
  Clone ID: PAT_MRT4530_49313C.1
atggcgccgccgccgccggggcggccggcgtggtcgatcaccgtgcgcctgaggcaccgcggctggctggatctccgcgccgccgcggagaacgtcgtcctccccgggtggggccgcggcggcgagcgcctctccctcctcgtccgcctccgccgcggcctccgcctcgccgtcacctcccggtgcggccgcgcaccgccggagaagaacccgcgcgcctgcaggatcttccgcttcctcaggagcaagctggcgcgcttcccctccatctggcgccgcaagaagccgccgccgccggcgcgcgccaccgccgcctctcagctatggcggaaccgagcaacaatggcgtggccggctcatggcggaaggagatggccggcgaggacgacggcgacggcggcgctgtacctcgtcgccgcgctcgccgtcgtgatggcttccaccgcggcggttcgagccatgaatgggtatgggagaggatactacgaaccggttggtcacagcaagtcatggagattcttggttgcgaagaagattgccaggttgttggagttggagcctcgcctctacgcgtggctcatgaagatcagcttgaaccggctcctcaactggtag

SEQ ID NO: 46449 - DNA, 342 bp, Oryza sativa
  Clone ID: PAT_MRT4530_49314C.1
atggagttgggttggccggggtgtctgtttgatcggcttccagattcaccgcggcacgagagggggaatgcccgttgcctgctggggacggggcgaaccctgaggtgtgcgtactcggctgatggtgcggcagatggactggcagatgacgacatcgccgtaggcggagatctggccggagaagggatcgcttggggatcgcttcgtgcaccgaggggatcgccgaagagagacaagacggagcttgcttcagcgccggggagggccaagtcttccacctgtggcaaggccaaggagttgctcaacaggatggtcgccttcgttaacgtcaccggcgcgtga

SEQ ID NO: 46450 - DNA, 389 bp, Oryza sativa
  unsure (1)..(389): unsure at all n locations
  Clone ID: PAT_MRT4530_49315C.1
cgagatggagaggcagncgatgcatggagatcccggcccgcctccgtccgtccgccatcaggcaggcancgtgcgagggagaactagaagagcgccacgtagagagggaggcacgtaacgtaacgttggttgatgtccgagtgtctcatcactcgatcgcccacgcctctattttgttggatgaggcaggcccacgtaacacgcgtacatcgatcgatcttgtgctctgagtattttatacgttgttcatacaagagagatgttcctgtcctagtatcattgttattggttttatgtcatcatgtgtatcgttggcgtaatagtatcagagtaagtgttaattcggcgtaaaaaaaaaaaaaaaaaaaaaaaaaaaaaaggaggggggg

SEQ ID NO: 46451 - DNA, 334 bp, Oryza sativa
  Clone ID: PAT_MRT4530_49316C.1
ggccggccgggaccattatgtaacacataatatatgagaggggaagagggtatcagtatatcggatatggtggagtggatgattcaccctatcatgaaagaagacgtgtgggtgaggcggcagctgcggctgaggcagaggattccagtgggggagtggatagagacgcatgcaaagaggaccatgatgtggaggagggggagcataaccaaaaggtgggtccatgatgctgcatgcaacaaggagaggtatggaggattggagatgggggaggggagaggcgagaaaggcggatgtgagggaaacagctgctagtgacgcaccagctgctgag

SEQ ID NO: 46452 - DNA, 374 bp, Oryza sativa
  unsure (1)..(374): unsure at all n locations
  Clone ID: PAT_MRT4530_49317C.1
tcgccacgcgcctttttacttaatactagaaagcggggtgtatcacggtactgctcagggaccggagagaacctctaccgtgatactccatgaaagcaggacacatgcgtcgcactgagagtgctgtcaataatgagagtcgtagatagcttcatgttcctacacatacatgatgagcactctcacttcctgatcacttcatcatggantatatgcatgagcgtaggctagttactcacatcataaaggcacctgctgttaaaacgccagcctatgtattacatggatcattttttattcagaaagtgacattgcaaatcttgaatgtcaccgtgataccggggcccttttgttttgcagacaagacttattac

SEQ ID NO: 46453 - DNA, 397 bp, Oryza sativa
  Clone ID: PAT_MRT4530_49318C.1
aaaaaaaaaaaaaaaaaaaaaaaaaaaaaaaaaaaaaaaaaaaaaaaaaaaaaaaaaaaaaaagagagaggaaaaaaaaaaaaaaaaaaaaaaaaaaaaaaccaaaaataaaaaccaacggggggcggcctttctaagggacccatgtttacttccccggccttccccagcttaatctcttttttggggccccctaattcaatttgcctgcccgacatttaacaaccccggacctggaaaacccctggggttccccactttattccccttgaaaaaaacccccctttccccggctggtttattaccaaaaaggcccgccccaatcgcctttccaacaatttgcccaccctaattggaaattgggcccccccctgtagcggccctttaaccccggggg

SEQ ID NO: 46454 - DNA, 435 bp, Oryza sativa
  Clone ID: PAT_MRT4530_49319C.1
atggacgccctcacccgcctccaccgcgccctcgccggcggcgacgacgacgaggagcagccggaggattctatccttggcgacaccgagggcatatgctccctatcccctgtccagcgggtctacggcttcgccgcgtgcttggttgcgggactggctctgatgatcctgtcacttgtagttttcgtcagacccatcaaatttgcagtcatgtttacatttggaaacatcctagcagttgggagcacagctttcctaatagggccaagtcaacagttgaggatgatgcttgacccagttcgtgtgtatgcaacagctatttacggtggatttgtttttctggctctaatttttgctctttggatccattccaaggttctaacattgattgcaatcatatgcgagatctgtgctctgttctggtgttcatattaa

SEQ ID NO: 46455 - DNA, 203 bp, Oryza sativa
  Clone ID: PAT_MRT4530_4931C.1
gaagaatcattaagcacaggataaggagaaaactgagaagaaaaaaatggaggaagtggctaaaatctgggaagattctaaaggccctgtccaatagctcaagagaaagaaaatgtctaatacttaaaatacagaaaggatgaacaggcatatggcggaaaacatggtgaggcgccaagatattacacacagagaactacgac

SEQ ID NO: 46456 - DNA, 618 bp, Oryza sativa
  Clone ID: PAT_MRT4530_49320C.1
cgggctgcaggaattcggcacgaggcccacaccatcggtgaaaccctctcactgccgctgagggctgaggccgatctgcggaggtggccttccctgccccgccggcgcgtggggactcactgccgccgcgtctctaacatcccctctacgctgcccgggtccttgcatcgtcgttggcttcctggcggagaagtacagcatgccaaatcgagcttacattttctcgtagcatctgctccaggtcactgctgctcaacatcctatgcaattaagatgatgaaaagaagcttgaggttttgaatccatgcaaattttttcttactgttctgatggtacaccttatttcaggcagttagaagtctcgggcagtggtaaccaggtcttgcccagcctcacctcccaagctttgagattcgggcaggggcagtggaggccgacggtgccgccgtccacaactgacatcgtctcaagcagtcaagcatccccagcagcgcaaagaaagtgctgataaatctgttcccatgaccaagccagaagccctgcaacttcaccatctgcccgatgatgtcctgcaccgcatactgtctcgattaacattcagagagtcctcacggatgg

SEQ ID NO: 46457 - DNA, 430 bp, Oryza sativa
  Clone ID: PAT_MRT4530_49321C.1
gtggctacggcgacgacagcgtgcagccggagctcgccggaaagcggcggagagcggcctcgtgcggggagcacaggagagggtgcgaggagctcggggaggagggggaaacggaagaggagagcacgagggtggtttttataggctcggggaggagaaatagtggccggacgtggcggatttgaagcggcaacggccggcgacgtgggcgacatcgtgggcgaagtgggggctcgatttggcgccaaaaatttgggaaaagtgggggatttggtggaggaggtggaggggaaccgattttatgtggtttgggcgcgagggcgcgagcgggaggaccggaatcggcggcgacgtgggcggcaacgggcggcatggcggcttcgggcggttgctggccaggatggaggatggttggggatggacctgacaa

SEQ ID NO: 46458 - DNA, 458 bp, Oryza sativa
  Clone ID: PAT_MRT4530_49322C.1
ctcggcgcatcgccaccctctttactgaggttttacttatcacggcggaacttggcacccaacgcgggactgcatcggttttcaatctccggcgtacttagaaccataatcctagcatgctttttaactgccaataagggtttcatcggggttttagctgatgaggtatctagaggttgcatcggcttacaaggattgcttccgattgatttatactggattatattactgtgatactatattaccatcagtcgattgactttatatcattatttactcaagtatcagaatctacattagacatatagccgatagctcaaaatactatcgcaatcgattggatcaaactgactggaatgtccgtatatcatcaacctttggacctgcactggagctaagtagatctcccaggccagtgtgtgtttttcgcgtcaaaaaatgctagttcacaaacactc

SEQ ID NO: 46459 - DNA, 534 bp, Oryza sativa
  Clone ID: PAT_MRT4530_49323C.1
ctaatcctcagggttagtcagcggaaggaccgacgctcggcctgggttgctcatcgcgaggccgacggcgaccagtgggcatctcacggcataggacagcgcctccgcacggctgcttgggtcttttgccgtcgatggaccgagccgaattggctctccaccgcgagcaagcttttccttgcccgttcgggctagcttgcccccaaatgcgacgacagtggcggccgccatgatccagacgccggcggcgacgagcggcggcatgagaggcgccacccttgacgcgaacattgcggtgagcagcgtggtgagcgaccacacagccgccttcaccttgcccctctcctccgggcgcgcgcgctcgaacttgccgaggaagtagaagagcagcagcagcgcggcgtacgcggcgacgacgaaggccaccgaggcgaggtcaccctgcgacctgtagatggcgaagatggaattgcaagtgagagcaccgaatcctaccttggtgagtaaagaagaatggcgatcgttgtggtccat

SEQ ID NO: 46460 - DNA, 516 bp, Oryza sativa
  unsure (1)..(516): unsure at all n locations
  Clone ID: PAT_MRT4530_49324C.1
aaaaacgaaacagtttaacaggttatttacccaaataaaagagggagttaatttgcaacaaaatttttaaatcccaagtcttgggattacaaaggaattggtctcggaaacctaagggttacacccttttgggaaatacaacttaagctttttcaggtggagcttttgatgttgcaatttccgggggactgtgggggttttcccccctggcatttttcctaaaaccctttttattaaaaatttttattttaaagttttgaggagcaacaaccaaccttagccgaattttttttatgcacttttaaaaaaaaaaaaaaattttctttaatgaaatttctggacaatataacttttcccttaccgagaaaaataaataggagccttacccaaaggcacccctttttgattttatggaatgttgcgaagaaancaatgtaaaaacaaaaggcaccaaatttcgaattatattcagcaagcaaaccctttaaattatacggattttttcccagggggggg

SEQ ID NO: 46461 - DNA, 1268 bp, Oryza sativa
  Clone ID: PAT_MRT4530_49325C.1
atggccggccccggctggcttttttgcattggggccccttgccgccttttcctgcaaaaaaccctccctccgtcaccgctcgtccctcccccgtttgccacgtcagcttgctgcccaagtggtgggcggcagggtcatgccgtgacgcgcgtcgagtgccgcggccaccaccactacgactgcgacctgcggcagcgaggggggagggcgaaacggagcgggacggtgaggttgtcgccggcaacaaagccgatggctggtgctgctgctcgtcgccatctcctccgtcgacaacttaccggagcacgccgggttcgacggggtgcccgcgagcaccattgccgcgagctcaaccgcaaggtgctcgagcttgccctgtgcaccgtcggcatcttcaccgaccgcccgttctggaggggcggcgccagcttccagctgccaaccaagatatcaacaagcgaagagacgacggcggcgaggaaccaaggtgaccagaaggtagggacccagatcgccgctatcttcctcggtggccccgacgaccgggagtcggtggtgttcgcatgccgcctcgccaagaacgacggcgccatcagtggatcaagtgaagcatacatgtgtggcacgacctccgccgccagctccaagctaaggagagaagctcgccgtcgcaagcaagtgccgaaactcacgccaccatccctccaagcacagacgaaactcactgcccgaaactcgccgggcacctcctccagctcatgcacgcggcggggcggcggccggagatcgaactcatcgccatcgacatcgcgaggcagcgctccaccaccgcggtctcccgcagctccgccccgccaaacggcagccacatcggcggcgccgtcatcttcgatctccccttcctctgccgcctctcctggaccggctactggcagtgggagaaccaccaccaccggccggagctggccaagggcaccagcgcgcggcggccgcctcgccatctccatcagcggctacaccgcgccgcccgcgccaccgtgcgtcgccgcctcaccccgacgacgaccgccgcactcctccctgcgcgacggcagccatcagcggcgccgcccgtcccatcagccctcctctccgcgccgctccttccccgtcagctgccggccacgtcagccctcctccacgctgcgtcgaagacgctgccgccatccacgcccagaggaaaaaggagagaaagggagagaagaggggaaaaagagaaagggcggtga

SEQ ID NO: 46462 - DNA, 1249 bp, Oryza sativa
  Clone ID: PAT_MRT4530_49326C.1
atgacggcgccgccgatgtggctgccgtttggctgggcggagctgcgggagaccgcggtggcggagctggagccacacgtgcgacggctccctggccaacttgcgcagccgcgaacaaggagagccacgccttcaccgccgcctcgcgatgacgatggcgatgagttcgatctccggccgccgcccagccgcgtgcatgagctggaggaggtgcccggcgagtttcggcacgttggcgatgccgtcgtgcgtgacgacgtcaatagcacgaggcagatgacggtcagcttgatggcgccgtcgttcttggcgtggcggcacgcgaactccaccgactcccggtcgtcggggccgccgaggaagacggcggtgatctgggtccccatcttctggtcgtcttggttcctcgccgccgtcgtctcttcgcttgttgatatcttggtcggcagctggaagctggcgccgacggtgcacggggcaagctcgagcaccttgcggttgagctcgcggcaatggtgctcgcgggcaccccgtcgaatccgtcgtgctccggcgtcggagaagaagcagtccaacccaatgagggagatcaaggtgcagaagctggtgctcaacatctccgtcggggagagcggagatcgcctcacccgtgcctccaaggtcttggagcaactgagtgggcagtcaccagtgttctctaaggctagatacaccgttcgctcatttggcatcaggcgtaatgagaagattgcgtgctatgtaactgttaggggtgagaaggcaatgcagcttcttgagagtggactgaaggtgaaggaatatgaacttctgagaagaaacttcagtgaaactgggtgttttggttttggaatccaggagcacattgatcttggcatcaagtatgatccttcaacaggtatttatggcatggacttctatgttgtccttgagcgtgctggataccgtgttgctcgccgtcgcaggtgcaagtcccgtgttggcattcagcaccgggtgaccaaggaggatgccatgaagtggttccaggtcaagtacgaaggtgttatcctcaacaaggcccaggctaatacatcttaagacctgatttgataggttttaggtccagtcactgcttgttatgagcgcagacaagtttttatttcacctaatgcaatgccggagtatattattttgccaagtcgttttgtttgagttcgttttgcacttgggagcgtataacgccggtcac

SEQ ID NO: 46463 - DNA, 444 bp, Oryza sativa
  Clone ID: PAT_MRT4530_49327C.1
atggcgttcgcctccgaggccttccgcaaggtgctcatcccgggatataggttcctgccaaccaagaacaggatgtcatggggcatggacagggagatcaagcgcggcctggtccggctcatcggccgacgcagtggcggcgacagcggcgaggaagacgagaccaccactgagctcaaagacaagcaggacaacggcttcaacacccgggccattgtgctgctcgccgtgcacccagactggcaggaccgcacccgtggctctctccaaggcggagcagtggggggtttccgtccgctcgggcgacacagcaggtgtcgctgcggcgtccctgcacgcgttcctcctcgccgcggcctccgctcgggcaacgcggcggccatccccgcacgcgttactcctcgtcgccttcgcagcgaaggtggcgctttggctagagtgtga

SEQ ID NO: 46464 - DNA, 654 bp, Oryza sativa
  Clone ID: PAT_MRT4530_49328C.1
atgtctgccactgaaattttacaaaatggaatctatgccatcgttgccacgttcttcgtcactgccgtttctttcttccttcatttctccccttttgttctcctggctaccgctcatcagcgtgacggagctggtggagaagttgatgccgctgccaagcacgactccctccgcgtcatctcctccctcctaacccgcggcagcagcgtcgaagcctatcaccatggccgcaccatcctcccttaccatggggccggagtcagagccagagctagtggtggcggcggaggagcgcaagtgcacggcttggactcgagcaatgcggatgccacagcaagtgctaacctcgccacgacggccgcgcgcccgttgggctcgaccgctctggccaaggtagcgttcttggctgtggcgctatggaccgtcgtgccgtgctccccgtggagaactcgctttgcggtagcacccgccgtgttctctggcaggaggagccacatcggcaccacagcggcgctggagacatggtggtggtcgtcgccgtcgccgagcaaagaggtgaggagagggaagaagacgaaagaaggaagggagaagacaaaaaggaaggagatggatggaaaacatgacggcagtgtcatggttctaattttgtaa

SEQ ID NO: 46465 - DNA, 1185 bp, Oryza sativa
  Clone ID: PAT_MRT4530_49329C.1
atgggcaacagcatcggcgggcggcgcaagggcgccaaggtgatgcagctggacggcacggcgttccgggtgaagcccccggcgttcgccggcacggtgctgcgcgaccacccggggttccagctgctcgagtccgaggaggtcaagctgctcggcgtccgcgcgcgcccgctcgcgcacgacgcgccgctccgccccgggcggctctacttcctcgtcgcgctgccccgccccacggcgccgccgcggcgggcgtggtcaggggcgctacacgtcggcgcgcgggagcggctcgagtcgctgatgctcacccgccggtccacctccgacctctccctcccggcctcggcggcggtcggcaccgcgccgccgtccccgatgtccaccgcctccgagccgggcggcggccccgtccgcctcaggatgcgcctccccaaggcgcaggtggagaagctcatgggcgagagccgggactccgccgaggcggccgccaagatcatgcagctgtgcgccgcggccaacgccaacggcggcgcgagcggcgccgcgacgcccgagagggggatactgcggacgcccgagcggagcccgcggttcatccccacgccggactggggcgtcgccggtggcttcgcgcggacgccggaggtgagcccgaggttcgcggcgacgccggagtggggcaccgggttcatgatgccgacgccagagaggtcagggctgctgaggacgccggagaggtggccgacgctgccgcgcacgccggagtactcgtcgcgagacgtcaaggccgcccggaaggagccagagccagagccagagaagactggagctgctgagcccgatttgcttcgcgtccacctgcttcgtctgctgctccgacgagctccacttcgacgcgtcggcgcgcgcgatggcggctcacgacgcgctccggccgggccagctctacttcgtgctgcccgtctcagcgctccaccggccgctctccggccaggagcccaggacaaggccgcgcccgccgtcaaggccatcgcggcactcggggcctccgccaccgccgccggcggcggtggcagcagcagcgtgtcgtcgcggggcaagaacgcgagtcccgccggcaagcagcggcagcagacgactgctcgagtggcgccgatacgacgaggatcaacggagatatga

SEQ ID NO: 46466 - DNA, 460 bp, Oryza sativa
  unsure (1)..(460): unsure at all n locations
  Clone ID: PAT_MRT4530_4932C.1
tgaccaaatgtttggtatgggaggcgcaaatttnaccagcatgatgggaatgcagcancagcagcaatttaacatgcaagcaaatgctcagaacctgcaacaaggcatgacaggcctccagaaccagacccaaaatcccaactttccccagcagaggcagcaaaaccagcaatgattcaaacaagtagtgttttgctaggccgaggaanaattttccatatnttaagtccatgcatgccgtcagcaaagggcaaaacgtngtgtggctggccaaatagcncagcagcaactgctgctttnttccttgttacagggcatcnccaatggacncattagtttggtganatcagctggctgtatctatcttanaatgatggatgcttatgtcttatgtcttcatgcggtcctctattgatttaagggtttcatggtaaaaaaaaaaaaaaaaaaaaaaaaaaaa

SEQ ID NO: 46467 - DNA, 351 bp, Oryza sativa
  unsure (1)..(351): unsure at all n locations
  Clone ID: PAT_MRT4530_49330C.1
cggagaaaatagctcagcacagtgctttttcttacagaagcaaaaatctgcgggcatggtttttcnancacaatcttngttaacaatataagaggcactttaacatacaaggaccatcttttggcattaagccttattttgacattaagcctttatttgttattcatgttccaanaagatgtaccataattaagacctggttctcttttctcttgaaagagaagcgagcacaccagagccttgcgccttgaccggacacaggaattctcccaagcatggcccttagaccaaatcagcaataacacctgtcattttctcaatgaagttaggcaaccgtcattggcacaaagg

SEQ ID NO: 46468 - DNA, 1842 bp, Oryza sativa
  Clone ID: PAT_MRT4530_49331C.1
atgacatcacatggggagctcaaagacatgtttgtaaagattcttcacttttcacagaaagtgatatccaatgacaagatattgaaagcaatgacatcaaatgggaagctcaaagacatgtttgcaaagattcttcactcattgcctgcaaattatggaaaggaaaagcacaataatgtggagaatggcattacacttgttggggcatcacgtgaaattctcatcgatgttgtatggaagaaagtgatattcaatgacaagatattagaagcaatgacatcaaatgggaagctcaaagacatgtttgcaaagattcttcactcattgcctgcaaattatggaaaggttaaaatgaaaagcacaataatgtggagaatgaagagtttaattattgtcaccattcaagggagtaaatacaagtatcttgaaccactatctttgatcatggaccagcttagtacaatgttctactgggctgaagatcgtttacatcctcggcagggtgaccgagtgtccggccatgagaaagacgacctgcagagctctggagtctggaggtctagctctttactgaacatgttgtccatagctcaaacgctgaaaatagcaagagatcggtctagcttaactcatcacgcctctactattaaacattgcaagaccttcagaatgctccatccatctccagaatcacatcctaccttcagaatgacagacaactgcaacactttctccaccattgtcgcggaggccgtgagcgggtcacatgtgatcaagatagctgggtactcaagaatcaaggtgttactccgcaacggtgagtccctgacatccatccctttcagcgttgcaggccacagctggaccatcagattctaccccaacggtgattccgcggagagccaagattacctatcgttctatctgatccttgactccgccaattcctacgacgtgaaggtgattttcagcttcgagttgcttggcaagaatgggagatcagtgtcgtcttacagcttcactacagatctccgcaccttctcctacaaaggctcattgtggggatacaacaagttcattcaccaaacggtattggaagaatcgtcagcccatttaagagacgattcgttttccatcaggtgtgacatcaaagtgttcaaggagatctacagccaagaaaccaagggtgttcatagcaagtttgtggaggttcctccaagcaacctgcatcaacatctaggcaacctcctagacagcatggatggatcagacgtggtcttcgaggtcggcgaggagagattctctgctcataggtgcgttcttgctgctcggtcatcggtcttcaaggccgagcttcttggcaccatgaaggagaaagccgatggagccattcaagtcgatgatatggagcctggagtgtttaagtctttgctgcatttcatttacaccgattccctggacacgatggctcaagaagatcagagcagagacgaagcaagcgaggaggaggatttggtgatggctcagcatctacttgtcgcagcggaccggtacaacgtcgagagactgaagctgatatgcgaggagaagctatgcgagagcattgactccagcatggtggcaaccagtttggcgttagctgagcagcacaattgcaatgggctcaaggaagcttgctttgagttccttgcatctccttccaacctactggagatgatggcaagcgatggttatgaccatcttaaaaccagctgccctgctgttctcaaggagctcactacaagatttctgcctccggaaacgaaagcatcagaagagataaccattggtctatataattag

SEQ ID NO: 46469 - DNA, 583 bp, Oryza sativa
  Clone ID: PAT_MRT4530_49332C.1
agcggctgcggcggtggtttcgctggcgtcgccgcggcggccggaggggtgtcggcgctgtcacggcggccgggactgggtggtggtgggggcaccggtgtggacgccgctgcaggcggatctggccggagcagctcgcggccaccatggctgccggacggtggagggacgccccgaggctgccgcagccggtggcgtcggaggcgcctcatgccttggcttccgctgccagcgacgaggaggcgcagcgggcgagcggctgggacgcttgacggtggtggcgttggagacctcgagtggtggctggatttggcgttgcaggtccggtcccagtgctcacaggagaagcggttgtgcaaagagagctggcggcggtgcgtcgtcttcctcgttgccgcccttcttcctcgcggcggcccagacgtcgtcgtccagcgcagactcctccggcgagtgcctcacgccgccacggcaccgcacgaacaacatcctgacctttgtcagcctcaccatcgccatcgcgtcgtgcctcgtgccactcatcagcaccggcgtctcgccaccggcgcggcgcacgcctggt

SEQ ID NO: 46470 - DNA, 150 bp, Oryza sativa
  Clone ID: PAT_MRT4530_49333C.1
atgccaaaacgacgtcttcaagaagagaagcgacggaaaactgctgccgccgtccgtcgaggctcaaagaagctccgactgggctttcacccggcaaacacccttaagggggtgagacagcacgacaacgccctcaggagggggaattaa

SEQ ID NO: 46471 - DNA, 2853 bp, Oryza sativa
  Clone ID: PAT_MRT4530_49334C.1
atgactactccagaatactttgccaagatgaaggctcttggcaatgagatgagtatggtaggaggtcgtcctcttgatgaagaactcatccagtacatcatcaccggccttggtgaaggctatagcaaggtggtgtcagccgtgttgaattttgaggcacgccaagctctctaccgtggaacgcaagaaacctcggttaatcttgcgaaccacggcaacaactacaacactggagggcgaggtgatggcaacaatggtggtcatggttcgccacgcggccgcggccgtggcaacggtggcagtggccgtgggcatggacgtgcgccaagaggagctgacaagcggcccacctgccaagtctgcttcaagcgtggatatatggcgaccgactgctggtataggtatgatgaggattatgtgcctgatcctaaatatattgcagcagccgctacaagttcctatggtgtggatgccaattggtacatcgacactggcgctacagaccacatcataggagagttggacaaactcactgtgaaagagaagtacaatggaggagaacggatccacactgccagtggaacagagtcatcaaatgagtcggtctgtaatgcttgccagcaagcaaagagtcatcagttgccatttcctgtttcaactagtgtttctaaacatcccctagaacttattttttctgatgtatggggtcctgccctagaatctgttgggagaaagaaatactatgttagtttcattgatgattttagtaaatttacttggatctaccttctacaacataaatcccaagtacttgagaaattcaaggaatttcaagtcatgaatggttccgctgagaaaaaacatcgtcatatagtagaggtagctctatctcttctatcccatgccacaatgcctctaaaattttggaatgaagctgttcaagccgccacctatctcatcaatagagttcctagtagagttatccaaaatatgagtcctctagaaaaattgtatcatcaaaaaccagactactcctccttaagggtgtttgggtgcgcatgttggcctaatcttataccgtacaacaagcacaaacttgaatttcgctccaagcattgtgtcttccttggctttagcaatatgcacaaaggcttcaagtgtctagaggtctccactgggcgagtttacatctcaagggatgttgtctttgatgaaacaatttttcctttttctgagccccatgccaatgcaggtgctagacttcgggctgagataaatctcttgccctcagatttgtttagtccaatgcgatctcaaggggatgaaccagtgcttaaccatatgattaatccattacctactaatttaactgttgaaaatgagctacaggacaatactacagctgaacctgatgcagaaaatccatccggcgcggaaaatcattcagatttggctccgggatctacgtctgacgacgctcagcatggcagtggcggccatgcccctgcggaccactccctcggcgacacctgtcctccatctcctagcgatgctgcgcggtcccgcctggtcgtcgacacgcggcagccggctactggcgcctcttctcctgatgctcaccgtctgtcagtgcagggggcagatgtgacttcacccaagacaacagcagcgcaggtgacagcagcacaggcaatagcagcacaggtggtagcagcgcagccaatgatggcagtagtggcaacagcacagaggaggcaagtgtcctgccggagcaagataggccgcgcacaaggtcgcaaagcggtgttcgcaaggaaaaggtatacactgatgagagggaagaacattataggttgcaaatgggtttataagattaaaagtaaagctgatggtacattagatagatataaagcacgtttggtagccaaagggtttaaacaaagatatgacattgattatgaggacacctttagcccagttgttaaagctgccacaatcagggttatcttgtccttagcagtttctagagaagaagaagtttatatgcaccagcctccaggttttgaggacccaactaagccacactttgtttgtaagctggacaaggctctgtatgggctgaaacaagcaccaagagcctggttctcaaagttaagtaaaaagttgattgatcttggttttattggatctaaagctgacacctcattattcttcttgaacaaaggagggattactatgttcgttttggtatatgttgatgacattattgtagccagttcttcagagagggcgactgctgcattacttcaggatctaagaggagagtttgcactgaaagatctaggtgagttgcactattttctgggtatagaagataagtatgcaactgacctcttgaggaaatctgggatgctggactgcaagcctacaaatacccctatgtcatatttaactctcactagacctgatatagccttctcagttaataaagtgtgtcagtttttacatgctccgacaactgttcattggattgcagttaaaaggatacttagataccttaagcaatgtacacagttgggactgaaaattcataagtcagattctactcttgttagtggattttctaatacagattgggcaggtagccttgatgacagaagatcaacaggaggttttgcagtatacttaggatcagatctagtatcatggagtactaggaaacaggccactatttccaggtccagtacagagtctgagtataaagcaattgcaaatgctactacagaaataatgtgggtacaaaccttgcttgctgaattggggattaaaacccctagagcagctagaatctag

SEQ ID NO: 46472 - DNA, 230 bp, Oryza sativa
  unsure (1)..(230): unsure at all n locations
  Clone ID: PAT_MRT4530_49335C.1
cgattgggnatcctagaggccggccgggaaaagacacttttccccgcgcgggaggcctccgctcgtttatcctcccaattgacgaccgctcctttttctccgcccatcgcccccctcggggatgaggcaattgaatatgcatctccagtattagatcctacgagaagtccgacaatgaagnaggctaccaggaaagaagctcctgtttgtgttccgatgcagagctgctc

SEQ ID NO: 46473 - DNA, 504 bp, Oryza sativa
  Clone ID: PAT_MRT4530_49336C.1
atgggagcactagtggaagaagtggagtgcgagcgcggaggcggcgccgcagcggcggaggacggcgtcgaggaggcgcgggcgatcaaggttttcgggagcgcgtctacgcgcgactgctcttggcactgcattctcttcgtcaaggtcttcttcctctacatcacaataagctcggcgtcgacgacagtgcgatgtagaggtgagttcagcagtgaggcacatgttaatgttggtgacaggggcctccctagcttctccatttccatcatcgatctagcggatgcggcctcaagaggtgcggatccactgccgttgaactcgggaggggctggcctccctcgcctctccttctccatcgtccatccggcggcggcggcctcaagagggccagatccaccaccggcgcccttgggagcttcatatgcatccagtcaagctggggacggtgggagcagaggcaacgagttcggttgcgatggcgacaatgacgatggcaagtag

SEQ ID NO: 46474 - DNA, 482 bp, Oryza sativa
  Clone ID: PAT_MRT4530_49337C.1
taataagtgattcgaataagcttatgaataacgaaaccatgctagtttttcgtaccatgaggcttattttggtttttgcttgttttgtttttttcactggaacatataattgttattagtgctggcatcctttatttgcattaggctccatcaagtaggaggcacacaagcttggacaacagttggacacacattctgcaagcatcttgagtcttgcctgacaagatccctgcatactatcaagatgaatagtgctcctgattttgcagctgaaacaacttcagttatgtcaccatcacggtagatcaattatgcaagtctgtcaggcccccaacatcaggccaaccgtgtatgcattcattggcagtatgctgaaagggccagtttacatacgtacattttcagaaagcagctccaacaggatcttgcattggatttagcttcagcaggatgatatactgcaaaaaaaaaaaaaaaaaaaa

SEQ ID NO: 46475 - DNA, 327 bp, Oryza sativa
  Clone ID: PAT_MRT4530_49338C.1
atggagaaggagaggcgagggaggccagcccctcccgagttcaacggcagtggatccgcacctcttgaggccgcatccgctagatcgatgatggaaatggagaagctagggaggcctgctgctcatctgaggctagtggaggcatatctgaccctcctatcaccagtaacggtagatccatcgaggccgatggtcacccctgtcaccaacattaacatgtgcctcactgctgaactcacctctacatcgcactgtcgtcgacgccgagcttctgccgagagagagatagaggaggctgaggtgagggagataagttggatggcttaa

SEQ ID NO: 46476 - DNA, 539 bp, Oryza sativa
  Clone ID: PAT_MRT4530_49339C.1
ttccggctcgtatttgtgtggaattgtgagcggataacaatttcacaacaggaaacagctatgaccatgattacgccaagctctaatacgactcactatagggaaagctggtacgcctgcaggtaccggtccggaattcccgggtcgacccacgcgtccggtacacttaatttctttatctatttaatgcctgaaattatcaaactatgacctttaatttaaagcagcgagacacttgaattcatagacataagttggaaatcggatatatgcacacaaattcgaaattccaatgaaacccaagtaattaaaccacttactcccttcttcccaaagtctaagacttatttcattttttttgtttttccaaagtttaagtcctatttagagttattatgtgttaaattaaattgttgatcggaacccatatgccattttattacttattggttgcatgtttattggttttgtcacattgtaaatgaattaattactctttggtcttggtgccaaagaaacaaaaaaaaaaaaaaaaaaaa

SEQ ID NO: 46477 - DNA, 1148 bp, Oryza sativa
  Clone ID: PAT_MRT4530_4933C.1
atgagtagagtgtccactagttggggttttgtttaatctagggtgaacaagccaagggggaggggcgcgcggaccgggtccacgggagtggggcccacgcggcagcctcacggtccacggtggaccgggcgcacccggctcgcaccggccggcgccgtgggccccacatgtcagccgcacccgagggcgcgggcggctgacggccgggccccacgcggcagccactcggcgcgcacgagggcggccacgccggcccggtcggcgggaggcggcgcgcccgcgccccgatggtcgccgccggcgaccaccagcgcggcggagcggcggccgagagaggggagggaagggggaaaggaggcgacggtccacggctcaccccggggcgacagcggcgacggagggggcggccagagcggagggaggcggcggcgcggctcgggtcgacggggtcgacggtgttccggcggtcggcgaccgaaacggagaggtggacgaggtcggcgaggatgcggcgaagctgaaggaggcggcgccgaggtgggaggcggtccggggtgacgacggcggcggaccggagctcggcggcgacggcggagagagagagcgacggtgcgagctcgattccggcgaggaggaagggcggcaagaggcggaaacggacggaggaggtgcggggagggtttaaatagggttggaagggggagagggcggccggaggggaaggaaaccggcgcggcgttctcgggctccatcaatggcgccggcgggattaggggagggtttccaaacgaatccaagggagagagggagggaaaaatggggggaaagggagaggggatcacggggaatatttccccccgctttattgcacgcggggacgacgggaggcggcgggattcgcggcggcggcggcgctagggcgcgggcgaggtggcgggagcggcgggaggaaggggatgacgggtgggccccacccgtcagtgagggtggcgggcgggcccgcccgtcagcggcgctcgcgcggggagaggccggatgggccgcggggagagaagagagagaggggagggaggagagatgggccgggccggcccaagggagggaagggggactttttagggtttttttttctttttataaaacctttt

SEQ ID NO: 46478 - DNA, 570 bp, Oryza sativa
  Clone ID: PAT_MRT4530_49340C.1
cggtgaacgatggcggagggagggggcagcgacgccggctctagcgcatcgagggagagggggcagcggcgccgccggtgcgcagagggacaggacagcagcactggcatcagcgcgcggagggaggagggggcggtgtcggcgtcggcgtgtggaggaacggctcaacagcaccgactagcacgcggagggaggtgggggcgacgttggcgcaggcgcagagggttggaggcggcggctgcgacggtggcgctggcgcgcgaagggagggaggcgacggcggcgctggaacgcgaagggaaggagcggaatggcgcatggcgttagatgcaagggcgtgcagtgtcagcggtggcatacggcgacgtgcggcgtcggtggcagggtgtggtgtccgctgcggtggcgcgtgttgtcggtggcggcggcgcacgacgtcgatggtggtagcgttaagggatgaacatggcaaggagacgatggtggtgttgttctcggcttcttcttcttatttgttgatgctgcttttctaccaacacaagagcaaaatcagtgtaccaaatttgtgtc

SEQ ID NO: 46479 - DNA, 3675 bp, Oryza sativa
  Clone ID: PAT_MRT4530_49341C.1
atggtgaccccgcgcgcacccgagctcctgcagcaggaccaggatgaggagatgctggtgccagaccaggatgttgttgttgagggacctcagccgatggaagactctggatcaacagttgagaacgagcaggtaccagaaacctctacgtccagatttacgtggaccattgaagatttttcgaatcacagaaagctgtactctgatgtttttgtggttggggggcacaaatggcgggtgttagtttttccaactggaaacagtgtacagtccctttcgatgtacctagatattgctgacgcaaatgaacagcctcatggatggagtaaatatgcacagttcagccttgctgtgatcaaccagttagacagcaagtactcactaagaaaaggagatcaatatgattcgtctaaaggttatattgtgaatgatagctgtaccgatgtgcctgatttctttgaatataaccaaaatagactggttatctacgagggaataattgagaatcgataagttgatgacttcactttggggctttcaaggcgtttcacgtatgttgatgttattgagtaagttgctaatcaacttggaatcgatagtccttacaaagtcccccttacagaacacctcccgtcttcacggttggacaaagctgattattttaagcataatggtgttcatgaactttcggatatgctaaggaaaagaaatcagatgtctgacaaattgtattatgagaaacggacaattcaattgccagttgaaagtaatcatataaaattgagagtggccatttatcttgccaaaaactctaaggggaaagcttaatttttatagtttccacagggtatcagttcatattggtggttttaagggtggacacccaagcgtgtttaatcacacagcgctgccggatatagggtatatgagtgctacaaaaacagtatacacaaggtgtatcaagcgtcggttaaaatttcagttaatgaattcaatggactgttatgtgttgaagaggttcctgaagaagagaaaaatgctggtgtgcgagaccgtttggttcatgtctgtcacttcatcatagaaaaacagcagattgattactaagaacaacctttcttatttcttatccgtgtgcgtaagctctatactctactcagcgtacttattcatagtgatgttgttcttggtggacaccactacgcctttatgcaatttgcttatattgctcacaagtcgcctggctggtgaatactttcaacgattcagatatcgtagcgggcattagaggagcaatacggtggcgaggaagagctcccacataccaatcctggattgaataccaccccgcttaggtttactaagcattcaaatgcttacatgcttgtgtacattcgtgaaagtgacagagaaaaaattatttgcaatttagatgaaaacgtgtgatgtatccacgagctctcacctgccgtagtacaagctaatgagatcatcaagagcaccttaatttattcctcacccaggcgaagttcattgtcttcttctagacatatatagtcattatttaggtctgcgcaaagaaggcgttgcacgatgtctggtgtggtcggtacatccaaagccttcgggcacctaaacatttgacaagggttctttaatgttggaattcttagttgtttttaggtagattctgaaagctgtatattgggcagtgggctgatcatccccgtggtttttgtttcacccgtggggttttgtgggataactgttgatgcccacataatatgatcgaaatctatttcaggtttaaatcgaaaggggaatctgttttcgtttgtaacgttttactataggacagccaaagttcattgatcttggtttacttgtggacaatttaacccagattatgacatgtgtacaggaaaatcatcctatttctgtgcctccaaagacaaaggatgacatattaatattcttcaagctgtatgatcctgaaaaggaagagctaagatatgttggaaaacttcttgtgaaagcatcagggaagccagctgatatagtgcaaaaattgcaagagatggcagggtttcagtcagatgaagatattgaactgtatgaggaagtaatgttcgagccaagtgtaatgtgtgaacctattaacattaatgattccttcctttcaagccagcttgaagatggtgacattatatgctaccaaaaacgttgttctccagaaaagttggaccactatcgctgtgccgatgtgccatctttctttgaatatatccaaaatagacaggttgtccacttcagattacttgagaatccaaaagatgatgacttcactttggagctttcaaagcgtttcacgtatgatgatgttgttgaaaaagttgctaatcaacttggactcgatgatccttccaaactccgccttacacaacacctcccgtattcacagatgcccaaatctcactacattaagtatagaggtcttgatcatctttcggacatgctaaggaatggcaatcagatgtctgacatattgtattatgagatactggacatccctttgccagtactgcaagatctgataacattgagagttgccttttatcatgctacaaacaatgaggtgtcatctcactttatacggttgccaaaaggtagcactatgtctgatttgattgaggacatgaaatccaaggttgagttatcttatagtgatgctgaattccggttatttgaggtctacaaaaacaagatacgcaaggtgtatcaaccttcggagaaaatttcagttaatgaattcaatggactgttatgtgttgaagaggttcctgaagaagagaaaaatgctggtgtgcgagaccgtttggttcatgtctgtcacttcatcatagaaaaacagcacattgattactacggagaacctttcttctttcttatccgtgatggtgagacattatcagatatcaaagtgcgtattcagaagaaacttctggtttctgatgagcagtttgcgaagtggaaatttgcttatattgctcacaatcgcctggctggtgaatactttcaagattcagatatcgtattgagccgattccagaaagatgtttatggaccatgggaacaatgcctaggacttgagcactcagacgtcaccccaaaaaggtcatgcttgtccaatcaggtatacgcttatgactcctactaaccgcaattctttcgataaggctgtgaagattttcaactagaggtggttaaattatcacatttatgtgatgtatccagagctctcacctgccgtagtacaagctaatgagatcatcaagagcaccttaatttattcctcacccggcaaagttcattgtcttcttctagacatatagtcattattttggtctgcgccaagaaggcgttgcacagtttggtgtggtcggttgaaaaaaaatttcccatctggttgggtggacaggggtctttaaagttggaaattttaggtggttttaggtagaattttaaaactggaaaatgggcaagggctgaacaacccaagtgggttttggttcccccagggggtttggtggaaaactggttaaggcccacaaaaaaaggatcgaaattaattccgggtttaaatcaaaaggggaatcggttttcgtttgtaccgtt

SEQ ID NO: 46480 - DNA, 267 bp, Oryza sativa
  Clone ID: PAT_MRT4530_49342C.1
atgcggtgggcggcgagaagggcactgatgagggaggcgaatggggaggtggcagccagcgcggtggcgcaaggagtgggagccagctcctgcaccgacttcacggcgacggggacaaccaccacacgaccgactccctatgtaggcaatgacggggcgatggccgccgctgctgtggccggcctccccgcgtcctcacgcctcaccatcaccgacgtgtggggtggcaatggcgttagcccgctgctatggcctatggccggctag

SEQ ID NO: 46481 - DNA, 390 bp, Oryza sativa
  Clone ID: PAT_MRT4530_49343C.1
atgggggcgccgggtcgcgcaggcgctcgcgcgtggcgtgggccggcggcggcgcggctctgtgatcgcgtgatcagagaaaatcatcggatgagatcgcggcatcgcgtgacgtccgcatgggttgagatcgtcttcgtttgcttggctgatcatttcaatctctgtgagaattgttgtgaacctggatctagaggattcaatggattgtggaagcttatgaatatccaaatgaaggatctggttattgacgatttcatgaatctgaacgtctgggtttccttagtgttcttcccctcctgtatgcccacaacccttcaagtaattgccaccagcagacctctatgcaggctgcagcacgccagcagatgtgaaggaatcagtggatag

SEQ ID NO: 46482 - DNA, 455 bp, Oryza sativa
  Clone ID: PAT_MRT4530_49344C.1
ctcttataaaccccgaacagagagaaaaaggacgacttaattgaatactactgccttacacccaagggatccgagatctaagaagccactagtacggtggttcctaaaaagaacaacttaaatggggggggggtaaataaaacacggctctcctggtaaccaacttcggaaggcaaggccaaattctggtacaagaaaccctgtgaccaaagcaaattaagtcaatccagcggggaaggtttatcacagtttggggaagtaccatttgcaacactattacctacaggcaaaagacttgagaaaggtgctgcatgccgttcattatgaggcccccttgctagaaggaagcctggtaaaaagcattcttgtgatcaggccggtttatccccaagacgcttgcaaccttatagaaataggagtggatctttccctcgcaaagaagcgtgacctttcca

SEQ ID NO: 46483 - DNA, 234 bp, Oryza sativa
  Clone ID: PAT_MRT4530_49345C.1
caaaccagagtcagagttcttgatttccgaatggggcgacggcgaggaggagcaaatggttctcacatccgtgctatttagtcccttttctcgatctttgggctttgggcgcaatgcgaggtcatcgggctttgggtgcacggatggcgcctgggccatggatcgtcgtgggaaggtattggtgaagataatccccgacgacaatgacagggacgctggtggcgaggcggaggg

SEQ ID NO: 46484 - DNA, 433 bp, Oryza sativa
  unsure (1)..(433): unsure at all n locations
  Clone ID: PAT_MRT4530_49346C.1
ctagagcgtttggtgcaggctttnttaataagatacaagtgaagctatttgtgtgagctctagctgtaccaaaatctctcgagttaccattgttgaacaaaagttggtattggctgtgcaacccagatccagtcgccccaggactttgtcccaaaatggtgtgtgtccatttcctaatggatgccataaaccaataataaaacttttgtatgcgatatgtgttttgatccctatgaaagaaatgtgaggggggatttgggtgatctcacccagctgttggctcttaccatggcatgattttccagtgtgtaaaaaaacatgacgtgctctgtaagaattgatgagtcttgttcaatataaaagcagaactatcgatatgccgtggatgaacatcccttgtttggattaatttgcatcaaaaaaaaaaaaaaaa

SEQ ID NO: 46485 - DNA, 567 bp, Oryza sativa
  Clone ID: PAT_MRT4530_49347C.1
gcacgaggctttctctctctccaccatggccggctaccaccaagtcaccggccgatctccctcagcgtgtgccccgtcggccaagcccttgctccatcacgtttgcctcgacgaggagaacccatttcaccctattcccccatcccttccaccttgagttaagccaccaccgccagctcccaatcggccgagccaagctcttgccgccggcgttccggtctcctccctctccctctccgcaagacaccgccctccccaggtgcgtggtgctcgggaacaccacccaccgccggcgtcaccaccttccggtcgccggaaagccgtcgccccctctccctctctctttgtgttgacacgggaaaaagaaacagaagaaaggaaggaaggaagaaggagaaaagaagaaaaagataaaatactgacgggtgggcccctgtaccgtaataacctttctaatttctccatttaattcaaaatccaaactttagaagcccatatcttttaaaatataaacccaattccagtgaaacttggaccaaaattcttctaaaatctttctctatcttt

SEQ ID NO: 46486 - DNA, 171 bp, Oryza sativa
  Clone ID: PAT_MRT4530_49348C.1
atggaggaggcgtatgttccaccgaggctgtacgacaactccgatctcgacctcgtgggcgaccgggaattgcaaagcctactacatactgaaaaaccgaacgtgtgctcacacctgagcatacgactcgaccttctgaaaatgataggaatcaaccgaggcacacaataa

SEQ ID NO: 46487 - DNA, 1528 bp, Oryza sativa
  Clone ID: PAT_MRT4530_49349C.1
cagctccaaagtctcaggcgcacgcgcactgacagcagcagacagggcgagcatggcggcggcggcgaacaacggcggcgagggcggcgacggcttcgacgtgatcgtggtgggggccgggatcatgggcagctgcgcggcgtacgcggcgtcgacccgcggcggcgcgcgcgtgctgctcctggagcggttcgacctgctccaccaccggggctcgtcgcacggcgagtcccgcaccatccgcgccacgtacccgcaggcgcactacccgcccatggtccgcctcgccgcgcgcctctgggacgacgcccagcgcgacgccggctaccgcgtgctcaccccgacgccgcacctcgacatgggcccccgcgccgaccccgcgctccgcgcctccatcgtgaacggcgccgccaccgaggtcgcctccgacgcggcggcgccgtggccgtggtccggggtgttcaggctgcccgaggggtggacggcggcgacgagcgagatcggcggcgtgatgaaggcgaccaaggcggtggccatgttccagtcgctcgccgccaagaacggcgccgtcgtgcgggacaggacggaggttgtcggcatcgccaagcaaggagacggatcgatcgtggtgaagacatcgagcggcgaggagttccatggcgccaagtgcatcatcacggtgggcgcctgggccagcaagctggtgaggtcggtcgccggcgtcgacctgccggtgcagccgctgcacacgctcatctgctactggcgggcgaggcccggccgcgagcacgagctcacgccggagtccggcttcccgacgttcgccagctacggcgacccgtacatctacagcacgccgtcgatggagttcccggggctgatcaaggtggccgcccacggcggcccgccgtgcgacccggaccgccgggactggctcgccggcgccggcgccggcctggtcgagccggtggcgcggtggatcgacgaggtcatgccgggccacgtcgacaccgccggcgggccggtcatccggcagccgtgcatgtactccatgacccccgacgaggacttcatcatcgacttcgtcggcggggagctcgggaaggacgtcgtggtcggcgccgggttctccggccatggcttcaagatggggcccgccgtcgggaggatcctcgccgagatggccttggacggcgaggccaggacggcggcggaggccggagtagagctccggcatttcaggattgggcgtttcgaggacaatccagagggaaatctcgcggaaaataaggtcaaaaattaggtcctcacaggtatggtcgcctgcgaaaattggtgcaacgtgtgaaatgtggttatcagtagggggtttgtttaccgtaaatctattgaacattgtatttcataacttctatgtgtgctttatactcttggatattggtagattgtaataatttgcatcttctctgtccttgtgtataagattcaaaataaagttgttctgttgcatttcaaaaaaaaaaaaaaa

SEQ ID NO: 46488 - DNA, 657 bp, Oryza sativa
  Clone ID: PAT_MRT4530_4934C.1
ccggagaccagggaagctaatatgaggcagttggtggcgagttagaagcaaatgacaagcatggtatcttagtaatgacgagctgatctcgacacatgacatgaagcgggtaacttgtatgaggttgactccaaagatatgaactatgcgaagttctggaactgaagccccatcttcaagtgccgcaacccagtcgaagtcagctaaaggttcaaccctggttcgagtcaggtgaaaagaagattccaccttctctccgccgtcgccgccgagctccggttcgccgccgtcgtcgctccggacctcctccccactcggcgtcacctccatcggcttcgccgcgtccccgtcgacctcggccacccctccgcttcgctcgccgaccgccggagcaccgtcgccctcgccgtcccgaaccgcgccgacgccttcctccgcttcggccgccgttcccgtcgtcgccgtcgacccggggtgagccgaagaccgccctttcgcttccctctcctctccgctctctcgggcgccgctccgccgcgccggtggtcgccggcggtgaccatcggggcgcgggcgtgtccgcctcccgtcggccgtgccggcgaggctgccttcgggcgcgccctcgcggctgttttcggtggggtttgggtgcat

SEQ ID NO: 46489 - DNA, 669 bp, Oryza sativa
  Clone ID: PAT_MRT4530_49350C.1
atggttaaatatctatctagtgttaacatttgtgccggtaggaatgaacgtaaaggatacaacaatgaaaatgtaacatttaccatcctggcccgtctagctcagtcggtagagcgcaaggctcttaaccttgtggtcgtgggttcgagccccacggtcaacatccccatccaaaccccaaattcacaacgacacgcatgctccagcgactccgttccgcttctgctccccacatttaagcaaagcgagaaggagaggagaggagaggagctaccggcgacggcgatgggaagggaggcggaggcgcggcggcggtggacgctggttctggtgaacctggcgtcggtgctggagaaggccgacgaggtgctgctcccggcggtgtaccgggaggtcggggcggagctgggggtgtcgccgacggcgctgggctcgctcaccctgtgccgcgcgatcgtccaggcggcgtcgtacccgctcgccgcctacgcctccgcgcgccacgaccgcgcccgcgtcatcgccgtcggcgccttcctctgggccgccgccacgctcctcgtcgccgtctccggctccttcctccaggtcacctcctcccctctcgctgactgcgggacccactccaccttccccgttttacacgcacctactcctatataattttgg

SEQ ID NO: 46490 - DNA, 388 bp, Oryza sativa
  Clone ID: PAT_MRT4530_49351C.1
atacaagaaatacaattatactcaattctaaaataccttttaatccctttagtgtagtagcaaattcggcatgagacaaattcggttcctagtcatctatcatccaatgcaaattgccgcggttcccagcgaaacaagacctttttttaattttaaaaaaacagcgacccagaagttgacttagctttaggcaccgcttattcttcgaattatctcatcgaaacttaatccctggttttttaaccgccgttaatggccaacatatcttccctcccttccccgcttcgactcgaactgtcttccgtcttaccggctaatccggcggccaatggaacgggcgttgggcctcggcgtgcacagggcggtgggtacaacgtcggggagcggg

SEQ ID NO: 46491 - DNA, 433 bp, Oryza sativa
  Clone ID: PAT_MRT4530_49352C.1
gatagtttctttcttgtccgacaaggacttgtatcaacccatgtgtataaatatgtacacccagggtctatgtaatttatcaatctctcgatcaatgtaactattctcggcgcatcgccaccctctttcctgagatttttactttatcaaccggcggaatttggcacctgacgctgggctgcatcggctttcgatctctggcgaaggggtaagtcctacgttccgccggccctggtgaatttatcggctacgttggtgttattcaaggctgcatcgattcgatctcttggatcgctctggtttggttgatatatttgcctacctaatatttcaattctatctctagttgcattgtgtttagagacgcatcgatcggctggtatcggcatcggctattatcagttatcggctggaactactccatcggcttatc

SEQ ID NO: 46492 - DNA, 474 bp, Oryza sativa
  Clone ID: PAT_MRT4530_49353C.1
attacagatttcatagaagaattgtcgatgtacccaattcactccaacggattattggatcctccaaaagtgctctgtgacgttgtggaatcccttattggtgccatatattgtgactccaacttcaaccaagaaatagtttggcaggtttttcaaaagttggctgatccacttattagtcttgagacattaggcaagcatcctgtaagcgagctttttgagttttgccaaaaaactcgccgaggtgtgaaaattgtgaaggatgaatgggataagaatttgacagttgaagtattgattgacggtgagatggttggaagggcaacttatgctcaaaagaaggagatagcgcagaatcgtgctgcaaaggctgctctggataaattaaaggagacattgggacaatcccaaactgaaccaatgtcagcagaagtttccgaacaattcaataaaatagatctaactggaagttga

SEQ ID NO: 46493 - DNA, 395 bp, Oryza sativa
  Clone ID: PAT_MRT4530_49354C.1
acaaaagaaccgcccgaactttattctttcacaaagaggttgcctgggcttcctgaacccaaaaaaaaaattaaccggttgggggttaacccgacccgggaacttaattaattccccttttggccctagccggttcttaaaattgggaattaaaccttgacgtttcaccctggggggtgggggaacctgagggacccgacgggcccggggccggggccctaaacaaaggggggggggggcccccccagggggatggggcccaccccccctgggccgggggggggcaacatgggggggcaactgacaaaaaggggggagcttgcgggaacccaattgcccccctttcacttggggggggcgttgacctttacctggagggggaactaccccggggg

SEQ ID NO: 46494 - DNA, 913 bp, Oryza sativa
  unsure (1)..(913): unsure at all n locations
  Clone ID: PAT_MRT4530_49355C.1
cggcagganttgttccagnccatgtccagnaggcttgtgcaccttgcatncaagtcgganagggtgnggaggcccacagagtgttgggtcccccagncctgtttattccgtgacagncttcccagtttgggttggaaatgggaatggttctcggagggagngaatgttgtggagttgatccaagaaggcaggtaggccttgaccaatggtgagagggtcttttggtcaagctgtctggaatgtanagcaactcgtggcgtaagctgggtgctcatggttcaaatgtttgggacaagacccacgccttctcctcgtggntgaacccccgtgagccaatgctgtgcatgcatggcaagcaggagtgttgggagaggccccacgcagctggagctgtggaagtgcgcgagaatggaattggtgttgacaagggaagctgtctgcgtggatgatgttgttggtgcatgtgtgtgccatgggacaatgattgtganaactgctgtgatnattgaggcttggcaggctgtgctggcaagatgacctggcagtgatgtggggcgggaaaatggaacaaatgtgtggtgtgctgtgcccctgtgaaccacgagtggatgatgcttggcaatgactgcccaactgtgtgtggtgaggaaatggtgttgatagcctgacttgatgtggtgtgcancttgatgtgtggcagtggcacctgcgtgtggttgaggttgaatgaggcctgagtgaaccttnattgtggcatggaatgttgtgtgggtgcaccaaatgtgttgagcctcttcattgtaaacattctggagacttccatgtttatatgtgaactaatacttattatcagggctccatctcaataaatctttgccaaggttaaagatttaaaaaaaaaaaaaaaaaaaaa

SEQ ID NO: 46495 - DNA, 422 bp, Oryza sativa
  unsure (1)..(422): unsure at all n locations
  Clone ID: PAT_MRT4530_49356C.1
ccctttttnnntttttttttttagnagaagncgagaatttagcgaattagcataaacatatagcaatagtatagttcaatagacaatatctacattgattacaatatccaaggtattattacagagcctcatatatctagaccataaacaagggccactagtatagaatcctcgnacaaatggtggataagggnagaaaaaagaatacctttgggaactgtagatataccaccttatagcatagcctagagtaacccatacctctannnacccatcagtgacnagtcaagtatcaaatactcactaatataacaaaaatataacatccgcctaagggtaaagaaaaagnatattccgnataacaatccaaacggaagtctctctctttttaaaacaggggtctaatctaacangagaacagg

SEQ ID NO: 46496 - DNA, 324 bp, Oryza sativa
  Clone ID: PAT_MRT4530_49357C.1
atggagtatgaaactgtgacagtaaaaagagatgaacctgcgagggccgctctgatagattctgaaacggcagaggaggcgttagtgccaccttggggatccgttcaggcaatcgatcaaaggcagtgggatggtcggcttcagttcggtggcaggattgatcacaacaggcgcctaatgagcaagagttccccaaagcagtgccggctggcgaatgggaggatcagcggaatcagtcacactggatccactagtgtccggcgaccggtgagctggtcgtggagtaacatttgcagtggacaaattaagcaacgaaatccatag

SEQ ID NO: 46497 - DNA, 2088 bp, Oryza sativa
  Clone ID: PAT_MRT4530_49358C.1
atgtttcgaggtaccgtggtggtactgagggcatggcaacatgttatggttctatgtcttgtggctcctggtatgaaatggttagtccttggttttggagattgggtctgtcaaccgggcatggttgttcagttatggttgggcctatgcaacgggactgcaaagaccctgagaaacgaggcacagattgattgcacaagaggtgtgagtagggagcaaagagccataaacagaaggaacaaacttgattcctcattgctttcaagtaggggtgatgacaagaaagacaagccaagccgcggcttaaaaaatatgagaaaatatcaagagattcggaaggcagtggctaattattacaacaatctgtgtgctatagaggaggaacgattcgacaaagatcttcgtgatcgagaagtttcgagcattgcttttgaagagaaatcatttggccatgttgtcaatcccggtcaacaaacttatcgaatcagtgctaatgttgatgtagatttgtctaccattgttgtctcccttgctttgtttgatggagataagatgttatttgcatgctcgggaatacctctaccagatgggacaactagagaacacctaacgagatttgtgacatcagctgctttggttagagtattcgacgagaagagaaatagagatgataaattgagggttgcagtgcgccttcctaataatagaattactgatgggttcttaggactatatgaccatgatattgctattgtcacgtgctttgggctcatagaggtccgtcctataagttttaaggcctgtcctgatggtattcaagcactagttgctgggcgtgccttcgagtcaggcaatttaatggctatggatggttttgttcgctgcaacaacacctgggttccagatagtcaagatatctctaaggctgtacttggagggccgcttcttggaaaggataagggatttattgggatgaactttagcatttgccatgatgatgatggaactttgacatatgctttcctaccaacgaaattgcttcggaagcgtttggagcattttgggatattgaatcctaaacatctccacttccgaggatattcgttgcctaaaggtgtatcaagcataataccttcaggatttatgaaaactatttaccggttaaaatcctatgggtatcccatgccaccaccacttgtgcttgaattgaatggggaattgcttaatcattttgaagaacgctttggtgaattacttgcatggaaagggtacccttatggtgatccagccaagtcttgtaggaatcgtgtctggtatcaacttccgaaagaagttgtgacaaatatatctcgtcgtgttgtctcccttgcatcattcaatggtttcgtgaggttttttgcatgcacaggcttgattataaagtggcatggaagcaaagctacgcgcactgtcatcttgacttcagcaagtttggtcaatcgttgtaatgatgacaagattgatagtaacctgacgattgaggtgtttctcccaccgaaccaacgttgttgtgggacattggaattctataatttaaactataatattgctattgtcagtctcaagaagaatttcaatgctgttcgcctagaagatatttttagtaaaacggtgcaagagccatctgaaaaagtagtagctataggacgtgacactagacttggaccattgatggccacaattggtaatgtgaagcgtggtaaaaagggatgcaaacttgactgcaaagatcttaagctgtccacatgtaaaatcaagaaggctgggattggaggccctcttattaattttgatgggagttttgttggcatgaacttctatgatggaagtgaagcaactcctttcctaccaaggcataagattgtcgaagttttaagcagagtgaatgatttaccatcagaaagtggatgtaacaatcctatgcccatagatatcggtgagggaacgaagaaaaacaggtggcctgtgcccgagccatactggtatcatggttcgcttgatgtagataggtcttatgtacccaagtgtattggaaggcgtctccagtaa

SEQ ID NO: 46498 - DNA, 427 bp, Oryza sativa
  Clone ID: PAT_MRT4530_49359C.1
tttttttttgtttttttttttttttttttttttttttttttttttttttttttttttttttttttttatagggaacacgggggttaaaccaaggggcctgatggggtgggccgcccaatgccccattggaaggccgggtgaaacaacccgctactggggggggaaaccacaaacaataggaggggtttacccttataaaccacggggggggggtggcaacaggggggggcaaaatggaaaacctggtggattgggaaaggggcatgccccagggtggtttgtttttaaaaaggaacagccaccgattttggccaaaaacaccaacctggggggggaaccaaaaaccccctctgaaaaatggaacaaaaacccagggggggtttggaaacccccaccttttttaagggggggagggggcccccccttg

SEQ ID NO: 46499 - DNA, 402 bp, Oryza sativa
  Clone ID: PAT_MRT4530_4935C.1
atgcacggcggcgcgcggccggcggcggcggcgacggtggcgtccagggcgggctggggaagtggcggtgtccagggcgggcagggaagcggcagcgatgacggtgtcctccaggttgaacggggacagcggcaccctccagggcgggtgggggaagtgacggcggcgacggcgccctctagggcaggcaggggaaccgacagcggcgggagcggctacgggagcggcttgcctcgcttcgcctatcctttctcttccttttcactcaccttttcctttcttgaggcccgggcgccgcgctgtgggtcgtggcaccgggggggttcccctgtgtcatccggggttaccgtttttgtgggcggccgtggggttggtgcagtgcgtaggtgtcttggtgtccag

SEQ ID NO: 46500 - DNA, 2619 bp, Oryza sativa
  unsure (1)..(2619): unsure at all n locations
  Clone ID: PAT_MRT4530_49360C.1
atgtcgtacctgctgccgcacctgcactccgggtgggcggtagaccaggccatcctcgccgaggaggagcgcctcgtcatcatccgcttcggccacgactgggacgagacctgcatgcagggtatgatggatgaggtgttggcagcagtggctgagaccataaagaacttcgcggtcatctacctggttgacatcactgaggttcctgacttcaacaccatgtacgagctgtatgatccatcaacagtcatgttctttttccgaaacaagcacatcatgattgatcttgggactggaaacaacaacaaaatcaactgggccctgaaggacaagcaggagttcatcgacattgtggagactgtctacaggggtgctcggaaggggcggggtctgtttctagcctactctgttagtgggccccacttcctccacctcactctatcttctcgagctcttcgtcgggcaccaccgttgtggatgacgacacaccaaaaggacagaggagatgtgaggggacatggcgggagcgtcgcccatggcgaggacgccgttgaggtcatctccgccgcccccaccggtacccagctccccgtctccttcggcgctagggcgggagaggagaggcacgacagccgttgggagtggagcggccggttcgagcgagcgcacgagcggggccactgccacctccgcaacccgcactatttggctggcgctcgccgtgccaaagtcggccgcggtgtccatctggatgaacggacgggaagagaaggaggcggaggcggaggagatcagggaaggagagggggcgacgaccttactgctaattttttcgctgatgccgatgtgatgcaatgccgcacctctccacgttgcccttatcttcgccaggcgtcgcccttctccctgctagctcctttccaccgcctgtcgggcgtcacgcccggagagaggagatgggagggagatgaagggagatggggagagaggaggaagaagaccgcccgggagagagaagaggggactgcgaacgccgaggaatcggcgcccgcggctgctgctaaccacggcaactcgcgcctcccgcgcagctcatacgttcccccgcacctccgcggccaagcggctcctgcagcgccggcgcaagctggcgcgctgccctcggccgccgccgccgcgcagccttctgttggccagcctggtgtggttggtggccctcgctgggcgggcattgtgaatggtggtggtggtggtggtggtgggagcgtaggtggttctcgccagggctttggtgctggtggccgcggtggaggaggtggtggtggcggtggtgcatggaactcccgccctgggggttgggaccgaagagaccgtgaaccggatccttttgccaatagtgaggctgcggaagttgactttgagggcgagaacactggcatcaattttgaagcctatgaagacatccctgttgagacaagtggccatgatgtgcccccaccagccaatacatttgcggagattgatttgggtgacgcgctgaatgagaatatcagaaggtgcaaatatgtgaagccgacaccagtgcagcgttatgccatcccaatctccattgcaggacgggatctcatggcctgtgcacaaacaggatctggaaagacagcagccttttgtttccctatcatcagtggaatcatgaggtcaaggccaccccccaggtcacggggttccaggaccgcatatcctcttgcactaatcctatctcccactcgtgagctttcggtccaaatccatgaagaagcaaggaagtttgcataccagactggtgttaaagtggtcgttgcatacggaggagcgccaattactcagcagctgagggagttagaaagaggtgttgaaatccttgtggcaactcctggccgcttaatggatttgttggagagggctagagtctcactgcagatgataaagtatttagctcttgatgaagctgatcgaatgcttgatatgggatttgagccccagatacgtaaaatagttgagcagatggacatgcctccacgtggagagaggcagacgatgttgtttagtgctacatttccaaaggagatacagagaatggcttcagatttcctcgccgattacatatttcttgctgtcgggagagttggttcaagtactgatttaattgtccagagggttgagtttgtccttgatgctgacaaaagaagctacctcatggaccttcttcatgcacaaagggcaaatggtacacatgggaagcaagcctagcaatcaggtaagtgacaccaaaggcaaagcactgcggtctgtggacttgcaaaatgttggttagctatgtattggcatctcacaagcttgtaatgcttgacatgattgttgaaatattcatctatcaattgaaacggctgaatgatgtaaactgtttttccggtttgatgcatctggatgttgctggtgcatgttgcctttgccgtgattctacactcctaaactttctagtggtagaaactttgttggtgttctagtgtacgttgatatatctttggaaacttggtttacaactttattcccnnnntaatattaccatctttgtttttt

SEQ ID NO: 46501 - DNA, 1797 bp, Oryza sativa
  Clone ID: PAT_MRT4530_49361C.1
atggatccaggacccatgctggccgatccaacacttatggtgagggcggatcaacgaggaccaccccacatggtattggtggaccgctacgttgcactcgtggacgacatacaagaggtgatcgacgaaataggaggtgtgtcgttcgatgtgagcttgaaggcagccctcgacgccctcccgaagtgcagcgacggacaagagtgggacgaacaacaacagtccgccatcagggcagagatcacacggcaccgggccgaggtcctggagccggcgttcgccatcttccgagaccgtaaagcctgccgccctgcagcgcctggcacgatgcgtaaggagcccatggcctcccggtgcaactccggctcctactaccgtgaggtactggacggcatcgaccctcgcttttctcacctcaccggcggtgccatcgtgaattctctgaccattggggtctcctggccacccagccatgacctatggaatcaccccttgtccgcctccatctccagctgccatgactgcttgcttgtgctctactttggcaactaccgtcccgggatctcttcgccagggtgttactttgtgctcaacacctgggccaactcggtcgctatcgtcccgcctctgcgcgccacctgcgtcatcaccatgtcgcactgcggcattgggaccggggtcgccatcctacgccataacgactactacgactatgtcctcgttgagctcttcccccatcaggacagccggacccacctcgcctccaacaaagccactcttttcttgtggtggtctcctagctctagcccgctcgccgatggccagtggatacggaaagaggtgctgctccccatccctgcaacttccaatcaagataaggacgacgcgacacggccgcccacctactcctttcgtgaaaacatggtgacaggaatcttggtttgcgatattgacaagctcaacaccagcactgacgacgaggatgatcgcttgttgttccgcttcatcccattgcctgaggaatgcgtgatgaagcctggccttctatctcgggagaggccagcggaggagcaccgcaccatgatctgtatggacccggagaccatcctgttcgtctccatggatagctacatccaaggcctccccattggcgatacagtgctcatgacatggactctcaagttcccactcacgaaccactggacctgggagaagcactctgcgccatccttgtgcgtgggagacctcctaaatgatcttccagtcttaaaagaatccaagaatgacgggaagacgcagcacattgccaactgcccggttagtagcattgacaggcaaaaccatcttatcactagcctcactattaccaagtatgagaggaagcatgagaacgggcaatggggagtcgtggaattgtacgaggtcagcattgacatggaccgtagaacggtcttggagttgtcttctctcgaaagtcgccattcaaatatatttgcagctgactttagttgctgcttacaacagcatcagggtgatctccacatcgtcgaccgcattaacagtttgatcttccccttttttccccttctatttctgatattgcccgaactttttctcttttatgaattttctttcttcgagacaatgtcgtgggaaagcttacagcggagtcgctcaacattgaagtcgcctaacgaggaagaagtggttgataaggatgatgaatattgggagtgggtgttccccgatgaagtgggtgaggatgaatatcaacatggcccagacctgtcatgttaa

SEQ ID NO: 46502 - DNA, 628 bp, Oryza sativa
  Clone ID: PAT_MRT4530_49362C.1
ctttgattaatctggcaagagagagtatagttaatggagattctgttatgcttgttcagtctgctaactggctggatgtattacttgtggtagttcagaacaagttgactccaagcacctcttccagaggagatgcgacagtacgacaccttgctcgtctgaaaagcaagggttcccggaaaatcatttccagtgctacctcaactaatggaactatgttggcctattcagattgtgtgaaaccctgcctttttgcactaagacataagggtggaaaaaagtttactctagacaaactagagctgccaaagggattgctgaattctcagtgtatgctgttttctattgactcatccagtttgattctagctggccgtgatggaaagatttatgttgtagacattgccacacgggaaatttcaaatgtctttcaacctatgagaaaaatggatggagcttccaaagaaccacctgttacaaaaatgttcctcagtgcggatggacagtggttggctgcagttaactgttctggggatatttacatatttaacctcgaggtgcaaaggcaacactggttcatacctagaatgaatgatgggtctgttacatctggtggcttttgtcccaa

SEQ ID NO: 46503 - DNA, 558 bp, Oryza sativa
  Clone ID: PAT_MRT4530_49363C.1
atggccaacgattcattggctacagggcgtgtgatcggagatgtcctggatcccttcatcagcaccgtcgatctcaccgtcatgtatggtgatgatggcatgccggtcataagcggcgtggagcttcgcgcaccggcggtcgcggagaaaccggtggtcgaagtcgggggagacgatcttcgcgtcgcatatactctggtgatggttgatcctgatgcacctaaccctagcaatccaactctgagggaatacctccactggatggtgactgacatcccggcttcaaccgatgctacatatgggagggaggtggtgtgctacgagagcccgaacccgacgacggggatccacaggatggtgctggtgctgttccggcagctggggagggagacggtgtacgcgccggcggtgcgccacaacttcaccacccgcgccttcgcccgccgctacaacctcggcgcgcccgtcgccgccgtctacttcaactgccagcgccaggccggctccggcggccggaggttcaccggaccttacacctcccgccgccgccaagcctaa

SEQ ID NO: 46504 - DNA, 1827 bp, Oryza sativa
  Clone ID: PAT_MRT4530_49364C.1
atggcgccgcgcggcgacgggaagaaggggaagggatcggggaagcccgaccagctgcgccctaagagtaagcagttcaaaaagcactcgcgcaaggaggaggtggcgggtgagggggagcagcaggagcgtccggcggccccggactccgccgccgtcctcgccgccgccgccgcagacgacggcgacttcccgagaggagggcgtagcctgctgagcagggatgaggtggcggaggcgcgcgcggaggcggacgcggacttcgagagagaggagaggaggggaaagaggaagaggaagggtgcatcctcgtcgggagccggtggcgacgacgacctggggagcctcttcggcggggctaccaccgggaagctcccacgcttcgctaatcgcgtcaccttaaagaatatttcaccaaatatgaagctatggggtgttgtaattgaagttaaccaaaaagacattgttgtaagtctacctggtggaatgagagggtttgttcgatcagaggaagtgcatgacattacttcgcaagaaactcgtaaggatagtgagggcagtatatgtgcagatgttgttcatgttgggcagctcgttccttgtatagttttaagagttgatgatgataataaggaaggaaaagtaaacaagcgtgtttggttatccttacgattgagccggatatataaaggcctttctctggatgctatccaggatggaatggtactcaccgcccaagtgaaaagtattgaggatcatggttacattcttcattttggagtatcctcctttagtggtttcatgccaaaggctgacagagaaagcgcgaagattgagagtggacaacttatacagtgtgttgtgaaggcaattgataaagctcgggaaattgttcacttgagttctgacgaagatttgctttctaaatctattattaaagatctgaaaggcctttctattgatcatttaattcctggcatgatggtcaatgcacgtgttcattcagtcctcgaaaatggagttatgttatcatttcttacttatttcacaggaacagccgatatttttaatttgtccaactccttcccctctggtagctggaaagacgattacattaagaataagaaggtaaatgctcggatattatttgttgatccgtcaacaagggcagttggacttacattaaatcaacagttacttcgccttaaagtaccctctattaacgttaaagctggagaaatctacgacaaagcacgtgttttgaggatggataaaagggctggtctttttcttgaaataccttctccaactccatcacctgggtttgttagtatacatgatgtctcagacaaagatgtgaaaaatgtggagaagaagtttaaagaaggtagcatggcacgtgtccgtgtgcttggagtgcgacatcttgaaggagttgcaataggcacgctaaaagaaagtgcttttgaagggtctgttttcactcatgctgatgttaagccaggaatggtattttcgagtggcgtgaaagcactttgcccacttccacacatgtctgagttagaacatgttgtaaaaccgccgaagaagtttaaggttggagttgaattaactttccgtgttttgggttgcaaatccaagagaataacagtgacattcaagaaatctctggtcaaatcaaaacttgatgtattggcctcatatgctgatgctaagattggtttattgacgcatggatggattactaaaattgaaaagcatggctgctttgtgaaattctacaatggagttcagggttttgttagcaggttaatctcaaacctttga

SEQ ID NO: 46505 - DNA, 270 bp, Oryza sativa
  Clone ID: PAT_MRT4530_49365C.1
atggagtatgaatgccgggtacaatttgctagcttagactgaaagaacaatccattaggtttacctaaatggtccgagcattcaaagtacggttgtagaggtcgctgccaggtcaatccaaggatgtgcggattcactttgtagatcgacaatgtcaatccaacatatcatggtgaaaaaataactgagtctaataaaacataagtagattatcaactattaaaggagcacagaaatgcaatacgcattgaatgacgtagaaggggtcgg

SEQ ID NO: 46506 - DNA, 669 bp, Oryza sativa
  Clone ID: PAT_MRT4530_49366C.1
acccgggatccggcagaatgcattaatctctggctttgtggacacctatctcacccttaaccaagcggaagagacaatttttaaagaagctatcgctgaattttcccccctggaacaggaggacgttatgcagttaacaaccagttggatgcttcagggcattgaacagggcatcgaacgtggacaaaaatctctgctactcaaacaaattagacatcgttttggagagttgaatgcagttaatttgtcgaggattgacattctcacagtgcctcaattggaacagttgggagaagtgctgttggactgctctgatttcgcagaattagaacaatggctagcggcccaatctgaaacacctgagcgaaaaatttagtgaatttccagaggtggatgttgccatgaatgttcccaaagaatcaggtttcaaccatcggcttccaattccaaactgagttgataaagttgccgacggggcagtttagtttcttctgccaattgccgactagcctgggagcgagttaaccctttagccattaaacttctcaattcgtcccgtagattttcttcagagaagctgggcctgtcctccggtgtagaaaagacaatgactaagcaaaattctcctttcggtgtattttccctaaagtaggcgatcctcatagagtc

SEQ ID NO: 46507 - DNA, 180 bp, Oryza sativa
  Clone ID: PAT_MRT4530_49367C.1
atggcgccagaggtggagagggcggggccgatggacgtcgacggagggggcgggggagatcgaggccgggggaagaatagcgaggtgacggagtcggacctgcgtgcgacagagtcggacctgatgcgatgcgaaccaaagaaaacatcccatgccaaaattacccctaaacgatattag

SEQ ID NO: 46508 - DNA, 1212 bp, Oryza sativa
  Clone ID: PAT_MRT4530_49368C.1
atggtgacatcaacagtgaagttggaggaggttaggaggatgcaaagagcggaggggatggcggcggtgctagcgatcgggacggcaacgccggctaactgcgtgtaccagaccgactacccggactactacttcagggtcaccaacagcgagcacctaaccaacctgaaggagaggttccagaggatgtgtgaaagctcgcagatacggaagaggtacacgcatcttactgaggagatcctacaggagaaccctagcatgtgcgtgttcacggcgccgtcgctggacgcgaggcaggacatggtggtggcggaggtgcccaagctggggaaggcggcagccgaggaggcgatcaaagagtgggggcagccgatgtcgcggatcacccacctcgtgttctgcacgaccaacggagtggacatgcccggagccgactaccaggtggccaagatgctgggcctacccacgtcggtgaagcggctgatgatgtaccagcaggggtgcttcgccggtggcacggtgctgcgcgtggccaaggacctggccgagaacaaccgcggcgcgcgggtgctggtggtgtgctcggagatcatggcgatggccttccgggggccgtccgagtcgcacctcgactccctcgtcgggcacgcgctcttcggcgacggcgcagcggcggtgatcgtcggctctgaccccgacgaggcagccgatgagcggccgctgttccagattgtgtcggcgagccagaccatcctgccgggcacggaggacgccatcgtggggcacctccgcgaggtgggtctcaccttccacctgcccaaggacgtcccggagttcatatccgacagtgtcgagggcgcgctcaccgacgccttcatgccgctcggcgtccacgactggaactccatcttctgggtggtgcacccgggcggtccggccatcctcgaccaggttgaggagaaggtcgccctccacaaggcccgcatgcgcgcctcccgcaacgtcctctccgagtacggcaacatggccagcgccaccgtcctcttcgtcctcgacgagatgcgcaagctctctgccgacgacggccacgccaccaccggcgagggcatggactggggcgtcctcttcggcttcggtcctggcctcaccgtcgagactatcgttctccacagcgtccccatcaccgccgccgcccctcttattatgcagtaa

SEQ ID NO: 46509 - DNA, 118 bp, Oryza sativa
  Clone ID: PAT_MRT4530_49369C.1
agggggataaaagactgcaaaagaggatattggaccgatgctacaccatttttatgtttgatacggacactctcatcctaaattacggcactgccaagtgcgatacactttgtccccc

SEQ ID NO: 46510 - DNA, 577 bp, Oryza sativa
  unsure (1)..(577): unsure at all n locations
  Clone ID: PAT_MRT4530_4936C.1
gcagcatgcaacttagatcgatatcgatctcatgcatccacacagagcacctgcatatgcttctctccttggcaatattatgctttaatttcagctagcttagctgcagggtgtactgctagctccttgctaacttctgttgaaaaatggaacaggatatgccgggcgttgttggtcgatcggatcgtggacagttaccatgtcgcactatgcatgcacctagctgttcgatcgatcaatctccggcgtttcctttctcacgtattctaaggttaaaatctcaattagttctctcgtacaattttatgagtaaagattctacgactacatatgagtaaaatctacaatttaacaatttttatatgtacgattctacgatcacaacaatcctaagcatgcttggcacaattttagctctagctntcacctctctgaagttgaagctcagctaaacaatttcagctctacttaaaatggaagcggngctgngtngagcgttttcacaaaatgaactaggaagtggaattgagtttaagcagctctacactttactccagacttacttctgaagtaaaat

SEQ ID NO: 46511 - DNA, 381 bp, Oryza sativa
  Clone ID: PAT_MRT4530_49370C.1
atggtgacaaaaacaccagtcggcgccagtggaaccaagccagtggcggaaacactagtcggcagcggtgaaggccagccggtcggtgaagacgtagacgcccatgcggaaacaccagtcagcggcgacgaaggcaagccggccggcggtgaagtcgtagatgcccaacagcggcggcataataggccagccgtgcaggcggagacactagtcggcggcgacgaaggcaagccggccggcggtgaagtcgtagatgcccaacagcggcggcataataggccagccgtgcaggcggtgacaccagtcggcggcaacgaaggcaagccggtcggtgaagacgtagacgcccaacaacgacggcgtgaccaaccaaccgtatag

SEQ ID NO: 46512 - DNA, 846 bp, Oryza sativa
  Clone ID: PAT_MRT4530_49371C.1
cacgcagcatcctacatgtcttcttcctctgtccgtgcatgcaagtgtcaaccgggccgccatgcgcacaatccacgtgtcacgtcaccctcctcactcactccctataagaaactctcggcgcgacacgcatcgtcttgaccgtcatccgcgatggccacggcggcgacggcgacggcgcgtgcgcacaatccgctgcgccgcatggagggcgtcgggttcaagtccgcgctccgggccagcccgcgcgcctccgcgctcgccgcggccgcgctcctcgtcccgctcggcgccgctctgctggtctccgccggggccgtgctcctggccacgctcgccggcctcgcgctcgccgcgccgccgctcgtgctcttcagccccgtgctcgcgcccgccgcggcggcggccgtgatggccgcggcggggctcctcgccgccggcgcgctcggcgtcgcgggcgtctcggcgctggcctggaccgtcgggtacatcaggagaggcggcgcgcgtgggagtgggggcggcggcgtggccggggatgatcgtgcagccgctagacgacgggaagaggcacggcgcgggaggggcggcgtttgtcgggcatcgtctccgggacgccggagatgacgacgcggcgcgcgacaaggcgcaggaggcagccagggcctagctagtgggcgcgatgctggaactaatatatactagtacggtggcactgtgatgagccattatatcgtcgtacatgtttcgtttatgtatatgtaaaatgaagttgaatattattggtcccaaaaaaaaaaaaaaaaaaaaaaaaaaaaaaaagggcggacgctcgcgatctagaac

SEQ ID NO: 46513 - DNA, 204 bp, Oryza sativa
  Clone ID: PAT_MRT4530_49372C.1
atgaaggttgcagcagcggtggcggagctgaaactcacaagagtggctagggtggctggcccgacgccgactgagtcggagctcgcgctcgcacgaaggttgcggcagcggtggcagaggccgaagctcacacgagtggctggggaggcgggccaaagctccaggcgcagcggcgggcacaactggggcgactgcggcaactag

SEQ ID NO: 46514 - DNA, 1314 bp, Oryza sativa
  Clone ID: PAT_MRT4530_49373C.1
atggtcgcccgctgccacctgctctcgcagcccttcttcccacccgcagttgagggagggggagggaggggccgcgcgccgccgcatgctgtcgcaccgccggccggccgggagagaggggaaaagaggagagtgggaggagaggaggagatgagtggagtgggaaagagggaggtgggaggagaggagcgggcggaggaggagatctcgtacctcattaccgaggaggttgccagctccaagaggcatccagcgcctccaccagcgtgcgccctcacatcctcccatactcagcccttgcgcctcctccctgtagtagcggcgccttcttccgcctaccggctgcagcagcggccagcggcgcctcctctccttgatgcggcaaaagatggagaagcgcgacagcgagaagatgaagaagcgcagtggctgactgggggtgacgacaaggcctcctcatgcaacggttccaagccattgatgctgctcgaggggcggatccggcgacctcttcccctcccgcacggatcccgtcatctctccgccctcctctcgtgcggatccgccatcggcggcgatgggaggggtggatccagcgacctcttcccttcccgcatggatccgtcgtctcttcgcccccacgctcacacgggtccatggatttggagcctcaaagatcttattggctccgctactagtggcgacgagaaggaggaggggcccgcggtggcggtggcggtggcggtggcggcccgcggcgacacaggggctgagcacaacaagggaatgtcacacggcaacatggtggctcgaggaggaggaggaggaggaggtgatggcctctacacgcggtggcacgaggcccttggaggctcagaccacacgacaacagcgccacgtggcagaagctcgaagacgacgacgctctcgggcgagcctctagatccacgcgccgacgtcgctcccgaggatcaggggcggcggatcctcgcgccaccgtcgctcctgctgcacctgcgcccacttgagcaccgccccatgcaccgccgcggcaacctcatccatggcagcggcgtcaagaagcgcggcagcaacatgcaacaacgtggtctggcgatggtggcggcgtccatcctcatccatggccctcctcgtcttacgttgccgtcgtccgccgcccgcccctctgcgcagagagaggtgaaggggagaaatgacagggtgaacaatgtctggtttcagattcaggggggtaattcgatcgaccgcgatagttcagggggagcaatagcatcctctatttctcttcagtga

SEQ ID NO: 46515 - DNA, 309 bp, Oryza sativa
  Clone ID: PAT_MRT4530_49374C.1
atggcggcggcggcattggcggcggcggcattggcgcggccgcgaggcagtggcacggcggcagtggcggcatcagcagaggcgacggcagtggccgcggctatggcggcgtcgacagggcggcggcaggggcatggcggctgtggcggcgtcggtatcgatggcggcggcggcggcctgtggcagcggcggcggcggctgtggcgcggctgtgacttccataatgtccttgttgacggccatatcatggttccccatcacagccgttcaggatggggtttggtgtggacgctctggacgaactcctga

SEQ ID NO: 46516 - DNA, 756 bp, Oryza sativa
  Clone ID: PAT_MRT4530_49375C.1
atggaaaccgccgcctcggcgtccacctcaacgccggagggggattccggccaacatgccgccgccgctccgccgcgcatgaccaccgtatccaagcactacttcggcggcgcctcatcggcccacaaccacgacctccgggtggacatcatcgagaatatagaagaggattacgggatgtttgtctggccatgcagtgtcattctagcagagtacgtgtggcagcagaggtcacgcttcactgcctccacagttgtcgagcttggtgccggaacctcactaccagggttagtagctgcaaaggttggagcagacgtcacactgacagacatcgcacataatacagaggtcctgaacaacatcagacaagtatgcggtctcaataatgtcaactgcactcttaataagtcgacaacactcatgcaggtattaggacttacctggggagaatgggatgaacctacatttgacttgcatcctgatgttattcttggagccgatgtgctttacgactcagcaagaattgttttacccttctccttgtgtgtcaactatttgattcctgtatgcagtggtcatcatttgattgaatttttaatggtgaagtggggtttgaagtgtttaaagcttcgggatggcttctccttccttccgtcatgcaaggctgcttcactacaagggaacattcagcttgttgagattgcacttgacaaggaaaaaccgaactgctcttcagctgacgagaacaatctgtag

SEQ ID NO: 46517 - DNA, 210 bp, Oryza sativa
  Clone ID: PAT_MRT4530_49376C.1
atgagacgaaagaaaatcaatgtattgctgaagaaggagggatttagccgattggaacttacctcagcgtactcagttgttggcgcaccagaagggctggcggaagaagacatagctgagggcagagatctcgtcgagaggggaatcgccggggagtcgcctttgcgtcggagaagtcgccggagaagaaaggggattggatttgcttaa

SEQ ID NO: 46518 - DNA, 198 bp, Oryza sativa
  Clone ID: PAT_MRT4530_49377C.1
atggagaagacggcggctgcccctgcatctgctgctgctgccgcaggaggcgccggaggaggttaccgcggtatttacgttaccgtatccccgcggaagctggaagatcacatccaaatgatcattgcatgtgttagggacgcgcacgcgtgtgtatgcgtgtgttgtggtgtgagtgtggaaaatttggctggatga

SEQ ID NO: 46519 - DNA, 192 bp, Oryza sativa
  Clone ID: PAT_MRT4530_49378C.1
atgactcctttcgtctttgtcctagtgctgcggcacgctgagcaggccatgttctcagagaaacaatgtgagctggacggagtggcagagaacggcgatgatgcagatgaggtgaacgacgacggccgcggcagcaccaaggacggccggccggccggcaatgccctcaacggaggaccggcggcgccctag

SEQ ID NO: 46520 - DNA, 454 bp, Oryza sativa
  Clone ID: PAT_MRT4530_49379C.1
cccgggctgcaggaattcggcacgaggagagagagagaactagtctcagttttttttttttttttttaccaaacgatcgagtagtaaaatgcttcaaagaccactagtctgagtacaaaatgtgtccatggttacatcgaagtcaaaaaaacaacaacaacaaaaaaaaaaaaaaacggttataaacccgcgggaaaacagtagagtgtctgaacacaatccacatatatctgaaatcgatcaagaaatcaaaaatcaacacaaaccacggtgaaagaatcgacaggagatagatgcatcgatcatggcgagagagagagaatcatcaaccggagatagatgcatcgatcaatgcatacgaacactggatcatatatcgaaattgattctactgtagcatcgccgtggcggagaccagcgccaacgccacggcagcgaaggccgacttagcgcc

SEQ ID NO: 46521 - DNA, 591 bp, Oryza sativa
  Clone ID: PAT_MRT4530_4937C.1
atgccggaggtggtggtgccgcggctgaccggtaaacaagcgaggaggaacgggcggccggaggactccggcgaggcgggtagaggggttggtggcgacacggcggcttccgggcgaaaccgaggggtggacgaggtggagggctacgtcaccgtgccgagggaggggacggcagcgccggctgacgcatgggcatggcgaaaggggcagccggaggagatgccgccgaggaggaaggagaagccggcgcgggcgacggtgttccggcgaaattcgggcgaggaggaggagatgccggggatgagggcggcgtcgcggagtcgagggaggtggtggcgacgtcgaccggcgctcaggcagggagatagaggcggctggaggcggccgacgcggatgaaagggaagggcgacggcgggaacgcagctccgggggtctccgcgggaaacggagggcaagccggggaaggggaggcagctgcgatgctggaggaggcgacggcgcgaccggacgacgctccggcgaggagggagagacggctggaggcggccggcggcacgggagagagaggaggacggcggggagagggctag

SEQ ID NO: 46522 - DNA, 378 bp, Oryza sativa
  Clone ID: PAT_MRT4530_49380C.1
cccacgcgtccgcgttttcgtggtctttttcgtgggcggacgcgtggtccacaacgagaccggttccttcgacattgctttccgccttggaacctgcttattccacgttggatattgggtatcgctggtttctcctgacgaggtggcgccagatcaataagctttggatggccaaggacgcgaggtaaaggagacataaatgatgggggagtgggctccaccagaaaagcctatcccgagctacgagtatgaaggctgatcattctgacgaaaggttaaagagatgggggccgacttggaccttgacgtggtggtacacccctgccctaaaaacgggccccactttccgtgcaaaggtaataaagatgggcgataaag

SEQ ID NO: 46523 - DNA, 861 bp, Oryza sativa
  Clone ID: PAT_MRT4530_49381C.1
tttttttttttttttttttttttttcgaggaaccgacgacaggagtttctcctgtcggaatttatagaagaagagaattggcccagttaataagggaaaccgggcccaaaaaccgaacaagcacggttaattaaacgggaaaccggcaaaaacctatacagaaaaggaaaagaaagcaactaatgagacctcacacaagtcgtcgttgccgagcttgccagaggcaagcagcttcaaacaacaaaatgcacgaggtctccagaaccacccaacatcctctagtagagcagaaaccttatgagcgaagccttcaacaagggaaacaacattaagaatgttgtcaacgcccgttcccaaatgaaacccggttttcacctgaagagagagagagccatcatgacaatacctccaaggaggaaacggcacccacaggcgtcgatatcatcaacctagaatagcactaggcaagcgtcgtcaccgaccgagcccgtcgccggtcaccccggctagattaggaagccgggcgaccggatctggcgacgccgtcgcccgtcgtcgaagccgtggagagccccaccgccgcgccgccgtcgccatggagagccccactgccgcgccgtccctgtcgccgcgacctcaccgtcccgccgccatcgtcaccacgcccgcgccggggcgagatgagccgaggaggacggccccgccgccgccatcccagcacgtcgcccggctttgccggcgacgagctccggcggcggcgaagcacggaggaggcaggaggaggggcggcggcggctagggtttcgccccctaggttggccacgcctcttcacagcctttccgtgcagctcgggcctcccg

SEQ ID NO: 46524 - DNA, 445 bp, Oryza sativa
  Clone ID: PAT_MRT4530_49382C.1
tacatgatgggttaggtggcggggagcgtgaggagcatgagtggaaaaagatttttttggaagcaggagtcggtgattacaaaatcaagcccatattaggttttatatccgtcattgaggtctacccatgatcgtgacagaatgatggcaaaatcccaaactagttatgataaaagttcaagcaacgtacttaataatttgatccacatgtcaacaaatgtgaggattccctatctttttcacgatgatgaccttcattgtgttatgaaacaagatatgtgatccaatccatatatataggatggatcggcaactgtggatggcttgcgcacggcggttgtgccgtgccccatgccttttcgctcttgtgacgctccttgcaacgggtgctatggttccccaaccatcgcacctatagttaccggctctttccccatatatattg

SEQ ID NO: 46525 - DNA, 130 bp, Oryza sativa
  unsure (1)..(130): unsure at all n locations
  Clone ID: PAT_MRT4530_49383C.1
nagctgcatactattattataggcagcaatccaccntctcnatgcttgatcttagcttaattgccnncagactcctcncaacctgggggcttttttgcgatnaaacttttcnactgcccctgcctgactt

SEQ ID NO: 46526 - DNA, 462 bp, Oryza sativa
  Clone ID: PAT_MRT4530_49384C.1
atgagcgaaaaggctgcgacgcacggtcgtctcgcgcaggagaaggcgcacgtacgttgtgtgtggcctcaggtcgagcacgagcttgcgaatcgtcatcgtgaggtcgggcaggaggaggcattctgctcacggacgctgcgccgcaaagtctggacctaccgctcgtgctacgacggcgaggccatgtacctgcacgtggcgtgcgtgaaggagatggtgcaggagatcttggctgctggccacggcggcggcggcggcgatggtggcggcaggagcatcatcagcgtctccatcctggagaagacgatgaagaagcggaagcggtccaggactggcaaggcggtgaaatgcttcctcaacttcgccatctccgtcatcgtcagcgtgctgttcggggacccaacgggattggcggtgcctctcgtcggagccttcatctccaacgtcgtctacggctag

SEQ ID NO: 46527 - DNA, 1389 bp, Oryza sativa
  Clone ID: PAT_MRT4530_49385C.1
atggcggctcgggtgcccggaggaggaggcgccgccgcggcggcggaggcggaggttgtcccgacgttctcctccctggagccgatctacggcgacggctctccgctcgacgaggcgcgcctccgcttggcccgcctcgccgacaagttccacgccgtctacgccgcgcgccccgcgctcttcgcccgctctccggggcgggtgaatctgataggggagcacatcgactacgaggggtactcggtgttgcccatggccatccggcaggacatgatcgtcsccatcaggagggcaraggggaaggaggaaattgacataaaaaaccacaaatggggccactatttcatgtgtggatacaagggagtttatgagtattgtaggtcaaaagggatagatatgggtggacctgttggccttgatgtagttgttgatggcacagttcctacaggatctggactttcaagctcagcagcatttgtctgttcagcaacaattgctatcatgggagttcttgagaaaaatttcccaaaggctatatctatcatggccaaacctggatttgctgagttgatagatttcaatccaatccatgccactgatgtgcaactacctccaggcggtacatttgtgattgcccattgcctggcagagtccaagaaagcagagacagctgcaacaaactataacaaccgtgttgttgaatgtcgcctggctgcaattgttcttgccatcaaactagggatggaaacaaaaaaggctgtctcctctgttaccaccctctctgatgttgaggggttatgtgtctcttttgctggaaaagagggttcttctgatcctggagttgccgtgaagaaactattacatgaagaatcatatacaacagaagaaatagagaaaattacaggtcaaagcctgacatctatcttccagagctctcaaacttccttggatgttctaagagcagcaaagcatttcaagttatttcagcgtgcctttcatgtgtactcggaagcaaggcgggtttatgccttcagagatactgtattgtcaaaactcagtgcggaagatatgcttcaaaaactgggcgatcttatgaatgaaagtcactatagctgcagtgtgttatatgaatgcagctgtcccgagttggaagagcttgtaaaagtatgtagagacaacggagcactcggagcacgtcttactggagcagggtggggtggctgtgcagtcgctttggttaaggaaggcattgtcccgcagtttattctcaatttaaaggaaacgtactataaatcaaggatcgaccggggagtgatcaaccagaaggatcttgggttgtacgtgttcgcgtccaagccgtcgagtggagcagccatattcaagctgtag

SEQ ID NO: 46528 - DNA, 1997 bp, Oryza sativa
  Clone ID: PAT_MRT4530_49386C.1
cgacggggcgtgagggagaggacgacgactgattcgctagacagcgcgagaagcggaagaggaggaggcgagagagcaccagcgatggcggctcgggtgcccggaggaggaggcgccgccgcggcggcggaggcggaggttgtcccgacgttctcctccctggagccgatctacggcgacggctctccgctcgacgaggcgcgcctccgcttggcccgcctcgccgacaagttccacgccgtctacgccgcgcgccccgcgctcttcgcccgctctccggggcgggtgaatctgataggggagcacatcgactacgaggggtactcggtgttgcccatggccatccggcaggacatgatcgtcgccatcaggagggcagaggggaaggaggtgcgcgtcgccaatgtcgacgacaagtaccccatctgtgtctacccggccgaccccgacaaggaaattgacataaaaaaccacaaatggggccactatttcatgtgtggatacaagggagtttatgagtattgtaggtcaaaagggatagatatgggtggacctgttggccttgatgtagttgttgatggcacagttcctacaggatctggactttcaagctcagcagcatttgtctgttcagcaacaattgctatcatgggagttcttgagaaaaatttcccaaagaaagaagttgcacaattcacctgtcaatctgagcgccacattggaacacaatctgggggcatggatcaggctatatctatcatggccaaacctggatttgctgagttgatagatttcaatccaatccatgccactgatgtgcaactacctccaggcggtacatttgtgattgcccattgcctggcagagtccaagaaagcagagacagctgcaacaaactataacaaccgtgttgttgaatgtcgcctggctgcaattgttcttgccatcaaactagggatggaaacaaaaaaggctgtctcctctgttaccaccctctctgatgttgaggggttatgtgtctcttttgctggaaaagagggttcttctgatcctggagttgccgtgaagaaactattacatgaagaatcatatacaacagaagaaatagagaaaattacaggtcaaagcctgacatctatcttccagagctctcaaacttccttggatgttctaagagcagcaaagcatttcaagttatttcagcgtgcctttcatgtgtactcggaagcaaggcgggtttatgccttcagagatactgtattgtcaaaactcagtgcggaagatatgcttcaaaaactgggcgatcttatgaatgaaagtcactatagctgcagtgtgttatatgaatgcagctgtcccgagttggaagagcttgtaaaagtatgtagagacaacggagcactcggagcacgtcttactggagcagggtggggtggctgtgcagtcgctttggttaaggaaggcattgtcccgcagtttattctcaatttaaaggaaacgtactataaatcaaggatcgaccggggagtgatcaaccagaaggatcttgggttgtacgtgttcgcgtccaagccgtcgagtggagcagccatattcaagctgtaggccaccaatccaccattctttcgccacctgtaaatcgattcagaccagaagcgccacgacgcaagcacgcaggttcctacatgacctaagtccacccacacgtcaatgtatctttatacaagtacttattagaaacaataaatcatgtctattaatctattactatgccgggacacaaccaatagagacttcaaaacaatgatgcatcagtggttagtagggtgtcgatggaggttgcttttttttttttttcttatacagtgatacgatgatacttctagtacttgcagtggacctttggactttggtcaagttattcaggtgtcaaaaaaaaaaaaaaaaaaaaaaaaaaaaaaaaaaaaaaaaaaaaaaaaaaaaacctgcagcccggg

SEQ ID NO: 46529 - DNA, 421 bp, Oryza sativa
  Clone ID: PAT_MRT4530_49387C.1
ttgactgtcgttagcgatcaagtttcgaccgccaatattaccaaaatagaggagaactagttatacttgcaatgcatatttaagttagaataataatattccactagtattaggattactaaccttttgcagagaataaccataaagtggaggagaatcgacatcaaaccaaatgatcaatcaatcggacgatatcgagaatcagacttatgtatgaatgggccaagaacttagaaatgacacgtcgaattgggccaaaattcacaagtctgcagagtagagcaaaagaggaggccacctgccgaaaatgggccagggaggcccagcccatggttcggccgaatcctcttcggtgccgttggatgccggacttcttctggacggtgtgcattgcctccctattgtaacgccccgattttcg

SEQ ID NO: 46530 - DNA, 975 bp, Oryza sativa
  Clone ID: PAT_MRT4530_49388C.1
atggcttccggttgggctcaacttcctgacgatctcctggacaatgtggcgcagaggacggctggcatcaaggactacgtccgcctccgcgccgtgtgcaagtcgtggagatctttcttgcgcccaaggtcgaggccgccatggctgatgctcccctacgacccatgcagcgagagctgcgtcaggggcttcttggacgcctccgacggcaccgtgcacgagattgacctgccgggacacgagaggcaagcggtgctgtggctcgtcgcacggctggctcgtcctcgagcggtggcccgccgtggggtgtgctccacgggccgcgggggggggggttctgctcccgggcccttctgcgggggggggaggcgttggcggcgctgcggttcatggagtgcggtgcgggggagcggtgggaggggtgcgcgttgggcagcctgggccggcctgtgttccagtgggaggtgcgcgtggctgcgctgtggtgggagccgttggtggtcggcggctggtggccgttggttgtcctcgtcgtggccgcggaggcggttgttttctgccggccgggggacggttggtgggttccgctggcgtgctgtgggtgaggcttcgcgtccgttgagttggggtggcagggtggcttgttgtgtttggtcagtcaccctgggcgcggaggaggaggcggtgttctgcaggccgacggacgcgtcgtggacgcccctcgcgtgcccggcgggagccttcgcggccgtcgacgtggcgtgccagagcggcttgttccacctcgtcagccaccacgggcgcgtcgcggtgttcgacctcgtctcgccgctgcgtgaggtgcccacgcgccgggacaggctccacgccctggcgcacacgtgggacggccggtgcctcgtccagcgccgtggtggttgtgggcacgagccgctgctgttggcaacgtggagcggcggcggcggcgccgggtag

SEQ ID NO: 46531 - DNA, 1056 bp, Oryza sativa
  Clone ID: PAT_MRT4530_49389C.1
ttttttttttttttttttttagtagcaagtgcaacggcaaagccatgatacttttatttatcttacagcactggctgtacatcttgtgctgagaagctggttacacaaagcttgaagaagagcacacatagaacaatactagttttacacatagtagtacatcttgtgctgagttagctggtttcgtcacagtgcttggagaacatcacataactccttcgtgcatgaccaacatcataaccattatttgccatatctttgggtgaaacatggcagcttagtcctcgttatcccagacctcagatgcactcttgtatggcccatgggtcttgttcacgaagagctcctctcctgtcaggactcgcttctcatctttgatgccgcacaagacctggaagtcctcttcagggatctcccatccaaacacctgcatattctccttaatcctttcatctttagttgattttggaataacgcttgttcccctttggagagcccacttgatgagcacttgacctggagtcttgttcagcttgttggctatcttctcgacaactggatcatgcgcaaggttcttttcaggaagaacccagtgggggtagtaggcagtaacatggaattccatgttttttgcaggcctcgaaaatcttattgttcttccaaccagggtgcatgtcctttaatgctggtcgaactctctcaggagccaagtttgtgcaccatatttttgacgtcacaaacaaatctttcctgttgattccagcttccatcgcagctttaagccctttgccgacctcctgttctattccatattgagcagccgtatctacatgcctgtatccagcctcagtgatggctgtctgaacggagtgagcagtatctgagccggccctccaagtgcctaacccaactgcagggatggcatgaccactcttcagaacaaagtgatgctcatcctgcgccatcgccttggcactcgccatgatcgcgcctttctattaccttgcttgtcacaccgtttagctatcttcacctttctagactgctttcttcgcc

SEQ ID NO: 46532 - DNA, 1398 bp, Oryza sativa
  Clone ID: PAT_MRT4530_4938C.1
atggcggccgagccggccgatctgtacgtggaggtggaggagtccgcccgcgacgacgacgtcgacgtcgacggccgctcccgcgtccccgtccccgtcccctccccctccggctgggagctcccgccgtgccccgtcctgcgcaacgtcttccgccgcctcccccgcaacccggacttcgacggcgccaccttcctctccaagccatggctcgagctcccctgcgacgggcccatggtgatcgccgagccgcagcggctcatgccggcgctgctgctcccggaggggatggcgctcgacccggcctcccgcgccttcctcagcctcgccgacgggcgccgccatgacatcgcgttcccccacgcccgcggcgcgcgctgcgtcgggagcacccgtggctggctcgtcatggtcaggaagggccccgagggagtcgccggcgccgccggcaccgccaccatccacgtcgtccacccgctgctcccgcacctcgagttccgcctccccgacgagttctccctcttcgagatccaggtcaccgcgcccgaggagcgcttcctcctgcgtctgacgccgtccgagaaggcgcgcattcgtgcgggcctccccgtggaggagacgggcgcggagttactgcagcgcgtgttcaagacggcagaggggttgcgcccccccgagccctacatcaccgatgtcacgctctcgtgcagccccgccagctccgacgacgactgcgtcgcgctctgtgtctaccgccacggccgttgcctcgccatcgcgcgtcccggggacgcgtcgtggacgcgcgtcgaggtgggctgggaatacatggagccgcacgagtacaggcgcgagttcctgagcgtggtgcaccacaagggcagcttctacgcggcgtgctacgacggcatggtgctgcgcgtgtccatcccgccgcccggcagcgcgtcgccccctcgggtcgacaagttcgcggacgcgccacgcagggagagcatccggtgggcgcggtggtggctcgccgtggacaccgcatcctcctccgccggcggcggcgcgctggtgctcgtcgcgaccgaacggcgctggtggaagcagaagatgtacatgtgcgcgttccggtgggacgacgagctgcggttctggcgccgccccaaggacttgggcgggcgggcggtgttcgtcgggcgcggcacggcgttcgtcgccgacgcgcggcacctgccgtggtgcgccggcaactgcatctacttcacccgcgacgagcgggtgcgcaccggcgacgacgtgccggtgcggtgctgcgacgtgcgccgccagaagctctactccgtccacaatgcggggcccaaggtggcgatggccccacctgtctgggtcatgccgttccatgaatag

SEQ ID NO: 46533 - DNA, 711 bp, Oryza sativa
  Clone ID: PAT_MRT4530_49390C.1
atggtcgaggtcttggaggaagaggtggtggtgcacacccccattccctccgggagtgaggatgctagcgggagtcgcggcccccgtcaccgtcgccgcaactggcgaactccgccccgtcgcgaccccccgcggagggaggatcccacccggtcgggtggctcggccctctccccgcctcccggcggggggaggccacggcgcgtcggagcacgtcgccgcctgacatacggcgacggtgactcgccccgaggcgcgcttcaggcggcgggagcccttctacggcatcctccggtgaacgcggagcatcctcaggttggtgacgtcgccaacctggtcaccactgcccagcgacagctgaccgcgggtggccgttccaccgccactggtacgtcacgtacccccaccaccctctcctcatcagcaaggaggagggcccgtcggtcggccacggccttgaggcgatccacggccccaacgtcgtcgggggcctcgggaagtcggaggcatcacgatgacctctacgaggagcaggacgctcgaatcaacatcgagcaacaccgggacgagcgccgcgctgcccgcatgggagaaggcgcctcctcgtctggagtgccgcgttcctcctcgcgaggcggcccgccccccacgttcacccctggagggactgcttgtagggccttcgttgtgagtctccggaatgtccggtga

SEQ ID NO: 46534 - DNA, 108 bp, Oryza sativa
  Clone ID: PAT_MRT4530_49391C.1
gcggctgagggggtcgtgccattagtacggtgggtccagccagatggaagcgatggacgcgaaggccgaatgaagccctggcgcattgggcagttgacaagggattga

SEQ ID NO: 46535 - DNA, 732 bp, Oryza sativa
  Clone ID: PAT_MRT4530_49392C.1
gcacgaggtgcaaccatcgggtctctttactcatttgtggtatttctatttgatctcttccagacagaacatgaatacgatgttccttatgtgaaggtcatacatgtcttggtcggtgttcttttgttcttcttaagcttgacaataggttctctgttatgctggcacatatatctcttatgtcataacatgacaacaatagagtaccgagaggcaactagagcgaaatggcttgcacagaagagtggacaggaagtatcggcaccgctttgatcttggcacacgaaagaatattcaaatgatcatgggcccaaacatcctgtgctggctttgccctactgcaacggggcatctcaaggatggcactgagttccagatcacaaacaactgatcggatcaacaaggaagcaattgctgcacacgtacatacttcatacatacattgtagatttgcgagtttatttggcgaccaaagttcttggccgttccatttgcttgttgcagtagagagctccacatttgtcaccagaatctttgtatgacagcatgtgaaatgttccatttccctcctaatctccatgtattctcttgcttcaatttatttgtgtgcagagctgtagatagatcaagtgatttgagttttgagcattgtgtactgacatattgaacggcaaaactatcaatttgaccagaattttcatgtcaaaaaaaaaaaaaaaaaaaaaaaaaaaa

SEQ ID NO: 46536 - DNA, 1239 bp, Oryza sativa
  Clone ID: PAT_MRT4530_49393C.1
atggcgctgccgctgccgccgaagggcgccctgctggccgccgtgacgacggcgtcggtgctgtccatcctgtgcgtgctgtccttcaccgactcgctgtcctacctcgggttccaggtcaggggcgtcgacaagagggagagcagccgcagctacctctactggggcgccgccatcgactgccccggcaagcactgcgcctcctgcgccggcctcggccaccaggagtccagcctccgctgcgccctcgaggaggccctgtttcttgacagaatatttgtgatgccttcaaggttgtgccttaattcagtgcacaatacaagggggattattaatcaaagcgatgcgacttccaataaaagtggcaggtgggaaacaagttcatgtgcgatggaatctttgtatgacatagacctcatatcaagaactgttcctgttgttttggacaatccacaatcatggtatgctatagtatcaagaagtacgaagctaggagaggaaggagatgtagcacatgcacaaggagttagcagacaagaactcaaagaaaacacactttactcaaaggcattcctcataaaccgcaccgcaagtcctcttgcttggtttatggagtgcaaggatcggaccaagcgtagctctgtgatgttaccatacaattttctgccatctatgccagcaagaaaactgagggatgcagcaaacaagattaaagtgatacttggtgactacgatgctattcatgtaagacggggtgatctactgaagaataggaaagatcgatttggtgttgagcgaagccttcatcctcatctggacagagatacccatcctgagaacatcaaaagaagaattgcaaagtggattccgcgaggccgtactcttttcattgcttcaaatgaaaggacaccaggcttcttttcacctctatcagacagatgtgactttagcgattcgtgttctcatggatttaccacggcacatggtttgtcttcttctgttatcaattacttcctccgtttcacaatatacaagttagcatactcatcaaacttcagcagcatattggagccagtaatcgataacaactatcagctgttcatggtcgaaaggttaatcatgcaaggagcaaggaagtttgtgaagaccatgaaagaattcgataatgacctttctctttgcgatgaccctaaaaagaacaccaaagtctgggaagaagcagtttatacagatggctga

SEQ ID NO: 46537 - DNA, 432 bp, Oryza sativa
  Clone ID: PAT_MRT4530_49394C.1
cacaaaaatcaactaaacatttcataaactttgggtctttttccaacattattactcatattttaacatccttaccttccaccctatgaccgcttgaaacagattatagcggtaatttccgccttcccacaaacaaaacctattacttatacacatgcaaaccaacattcccaagctattatacatttcctcaaccaaagcatgttgccatcctacctcctaccataaataatacacacatgatacattatcttactatcaacaagaacgcactactggacacgatttacaggtactcaaggccaacacgcattccattggctgttcataatcctaaaaatccaaccctttatgcaaatcaggagacatgagctaacctaacaatcttgaattgctcattcacataatgcgaaccctcctaatcattacaaa

SEQ ID NO: 46538 - DNA, 145 bp, Oryza sativa
  Clone ID: PAT_MRT4530_49395C.1
tgttggaacgggctctggtctcggggcccttttcctggagagtcgtttcgtggactatggcaagaagtccaagcttgggctcactgtgtacccagccctgtcaggcctccacctctttggttagagccatacaacagtgacctct

SEQ ID NO: 46539 - DNA, 1136 bp, Oryza sativa
  Clone ID: PAT_MRT4530_49396C.1
cgcccaccgcccgcctccccaccgccgccggccggctgatgtcattctttttacaacttgcctcgatccttactgcaaatggcaaattcatgcaagaaagagtgtagctaataggtggaggataactagtgcaggtgaagacaaacatgctcagtgcggaattatctggcaagtacttgcagctaacttcaaggtttattggcaacaggttacagacatttgtccaagctgagccaatcttgtgtcctgtaggtattgtcgaggcagttgagcaaatatgtcactatcgacatacgtacaacaaagcttggcgtgtttagcaagttgctatgaaggttgtttggggagattgggacgaggcatatgaatgccatgaaagaaaaaaaaaacccgaacatgcattttcgtgttgaggctcaccatgagaagtcaagaattgtggaaggagtgcatagttgtgtatttggccgtgcgtcatgatattcgggcagttagtggaggcattcaagcacttgaggtcggtgttagcaattgatgggaccttcttgaccggtaaatttaggggtgtattgctcacaaaaatagggacattgtctgatcagccataatagagaagtgtgtataatatctgataagcacccaggcatattgaactccatcaacaacgagatactagggcatcaacccattcaccatagatggtgcacgaggcacctatgcactaacttctatatcactagagctacccaggatcagatgaatgacctcgagcgcatatgtcaaataaacaagaaagttgtgttcctatgtgcggtgaagtgccccatgggtttggttggaaagtgatcaaagaagtggctagaggacaatatgccacttaaggttaaatgggccagatcatttgataccgatggacgtctatacaacttcatggctagcaatatggtcgagagtttctacaatgtcttgagaggcattcaaaaattctttttatgtcaaaaggagaatgtgtaataacttttttataccaagagcacgatatgagaggagagatgagttgcacaagaaacgggggcgggaaaaaaatctacatcatatattagaaatggagaggtatatacgtgggtttagactga

SEQ ID NO: 46540 - DNA, 1773 bp, Oryza sativa
  Clone ID: PAT_MRT4530_49397C.1
atggggatctacgtgggatatttatccccgtcgattattagatacctggagccccttacaggggatttactcacggcccggtacgctgattgtatcttcaatgaagaacattttccggcattagggggagaattcaagtatcacattgaatgcccagaaataaattgggatgccttagacaccctaaaggaagatcctcgtaccacagaatctgaacttcaggttaaaaggatcattgatttgcagccgtcaactggggtgcatgaaatttccgtaaactatgttgaatctggagaatcattcaaccgtaagactacaattgtccacatatactttgcatcatcagttgcagataccatccaaaatgatccagatccaaaatccatagtagagtgcaagaagcgctcggactggaacaaatggaaggaagcaattgaagcagagttagcctccctcaataaaagagaggtattctcacaagtaatacctacacctccaaaaaccttccccgtgggtttcaaatgggttttcatccggaaacggaatgagaacaatgaggtggtgagatataaggcgaggcttgtagcacaagggttcacgcagagactcggcattgatttcaatgaaacatattctccggtcatgagtggaatttcgttccgatatttgatttcactggcaattcaaaagcgtctatctatgcagttgatggatgtcgtgacagcatatttatatggatcactagattcggacatatatatgaagatccccgatgggatctctataccgaatgggagcgcaaatcgcaagatgtattgtgtaaagctcaaaagatcactctatggtctcaaacagtcgggcagaatgtggatcctccacaggattttgcacaggattttgaatatcattggcaacacacaagatattgatgaagcccgccgccaccttaaggcagaatttgagatgaaggatttgggtaaaaccagattttgcttaggtttgcaaatcgagcaccttcactcaggcattttagtgcaccaatctgcctatgtccagaaattattggagaaattcaatatggacaaagcacatccaaacaaaacccccatggttgttcgatcactcgataaagaaaaatacattttccgaccacgggaggaaggagaggggatattaggaccagaatatccctatctcagtctcattggagcacttatgtatcctgcaaatagtactagaccagacattgcggttgcagtcaatctattagcaagacatagtgctgctccaactaagcgtcattggaccggcggaaaacaaatcctcaggtacctaaatggcactaaatatcttggcttattctttcagaaaactgctgatcctagcttggttgagtacactgatgctagctatatgtctgatccccacaacgccagatcacaaacaggctttgtattcctccatggaggaacggccatatcgtggaagtcatctaaacaaacattagtggctacctccacaaatcattcagaaatcatcgcactgtttgaagcatcacgtgaatgcgtgtggctccgcaggatgataaaccacattgagcaatcttgtggcatcggttcatcagaatcacctactattatctatgaagacaatgctgcttgtattacacagatgcaaacaggctacatcaagagcaatatcaccaaacaaattgctcctaagttgttttatccccatgagcttcagcaaagtggagaaataaacatcttatag

SEQ ID NO: 46541 - DNA, 1416 bp, Oryza sativa
  Clone ID: PAT_MRT4530_49398C.1
atgcgcacgaggaaacaaaggatagaatcctctgatacagtaaatgaaactcaacctcaagttgagagacaccaagtggattcatcagattcacttcccacatcaacagtgcactcaatttttgatgatgggacattggaacgccccaatgcggtcatattgggaaatactgagccgtcaactggggtgcatgaaatttccgtaaactatgttgaatctggagaatcattcaaccgtaggactacaattgtcggcatatactttgcatcatcagttgcagataccatccaaaatgatccagatccaaaatccaagaaaggttactccaacaaagatgattgcccctgcatattcatcaaaagatcctccacaggattttgcatcatatcagtgtatgtagatgatttgaatatcattggcaacacacaagatattgatgaagcccgccaccaccttaaggcggaatttgagatgaaggatttgggtaaaaccagattttgcttaggtttgcaaatcgagcaccttcactcaatcattttagtgcaccaatctgcctatgtccagaaattattggagaaattcaatatggacaaagcacatccaaacaaaacccccatggttgttcgatcactcgataaagaaaaagacattttccggccacgggaggaaggagaggggatattgggaccagaatatccctatctcagtctcattggagcacttatgtatcttgcaaatagtactagaccagacattgcgtttgcagtcaatctattagcaagacatagtgctgctccaactaagcgtcattggaccggcggaaaacaaatcctcaggtacctaaatggcactaaggatcttggcttattctttcagaaaactgctgatcctagtttggttgggtacactgatgctagctatatgtctgatccccacaacgccagatcacaaacaggctttgtattcctccatggaggaacggccatatcgtggaagtcatctaaacaaacattagtggctacctccacaaatcattcagaaatcatcgcactgtttgaagcatcacgtgaatgcgtgtggctccgcaggatgataaaccacattgagcaatcttgtggcatcggttcatcagaatcacctactattatctatgaagacaatgctgcttatattacacagatgcaaacaggctacatcaagagcaatatcaccaaacatattgctcctaagttgttttatccgcatgagcttcagcaaagtggagaaataaacatcttacagacaaagtcttgcgataatctggcggatctcttcactaaatccctacctacttcctcgttcgagaggtgtgttaaggggaattggtatgagactactcagagacttgcaagcttcagggggagactctctgaatga

SEQ ID NO: 46542 - DNA, 2836 bp, Oryza sativa
  Clone ID: PAT_MRT4530_49399C.1
tatttatatttttcagcatttacattatagaatcatatccacccggatttgaaaatggaatacatgttagaggaggaggacccacaagttttatggacatctctgaaaaatcgatatgaacagcataggacatggtatgagtgacagataattcccagaatcatcagattttgtgtgcacctcatgtgcaactaggaaattaattttgagaccctcatatctcaaaataaaggctgagccactaaagtttcttgaacgcattcaaggagacatttgtggccccattcaaccattgtctgggccattcagattagacaatgctgcagaattttcttccaaagctttcaatgattattgtatggctttaggaattgaagtccaacattttgtaccatatgttcacacacagaatggtttagccaaatctcttatcaagagaataaaactcattaccagacccttattgcaaaattgtaacctaccaacctcatgttggagtcacgcagtcttacacactggtgacttaatacaattgcgcccaactgcataccatacaactttcccgttgcaattggttcgtggtgatcctcctaatatttcccatctgcggaaattcggttgcgttgtatacgtaccgatctcaccaccaaaacatacatcaatgggccctcataggaaaacggggatctatgtgggatatttatccccgtcgattattaaatacctggagccccttacaggggatttactcacggcccggtacgctgattgtatcttcgatgaagatcatttttccaggcattagggggagaattcaagtatcacactgaatgcccggaaataaattgggatgccttagacaccctaaaggaggatcctcataccacagatcattgatttgcaggtagctgcaaacaatttgccatactcatttagtgtgagtaaaagagtcacaaaatcatacattcccgcaaggaatgtgccggaaaaaatagaggtaccaaataaaacaattcaactcccttcctcgaaagagagtgggagaattacggcaaatcctcgaatgtgcacgagaaaacaaaggatagaatcctatgatacagtaaatgaaactcaacctcaagttgagagacaccaagtggattcatcggatccacttcccacatcaacagtgcactcaatttctgatgatgggatattggaacgccccaacacgatcatttgggaaatactgagtcgtcaactggggtgcatgaaatttttgtaaactatgttgaatctggagaatcattcaaccgtaagactacaattgtcgacatatactttgcatcatcagttgcagataccatccaaaatgatccagatccaaaatccatggtagaagcgctcggcctggaacaaatggaaggaagcaattgaagcagagttagcctcccttaataaaagagaggtattttcacaagtaatacctacacctccaaaaaccttccccgtgggtttcaaatgggttttcatccggaaacggaatgagaacaatgaggtggtgagatataaggcgaggcttgtagcacaagggttcacgcagagacccgtcattaattccaatgaaacatattctccagtcataagtggaattttgttccgatatttgatttcactagcaattcaaaagcgtctatctatgcagttgatggatgtcgtgacagcatatttatatgtgtcactagattcggacatatatatgaaggtccacgatgtgatctctataccgaatggaagctcaaatcgcaaaatatattgtgtaaagctcaaaagatcactctatggtctcaaacagtcgggcagaatgtggtataaccgactaagtgagtaccttctacagaaaggttactccaacaatgatgattgcccctgcatattcatcaaaagatcctccacatgattttgcattatatcagtgtatgtagatgatttgaatatcattggcaacacacaagatattaatgaagcccgccaccaccttaaggcggaatttgagatgaaggatttgggtaaaaccagattttgcttaggtttgcaaatcgagcaccttcacttaggcattttagtgcaccaatctgcctatgtccagaaattattggagaaattcaatatggacaaagcacatccaaacaaaactcccatggttgttcgatcactcgataaagaaaaaaacattttccgaccacgggaggaaggagaggggatattaggaccagaatatccctatctcagtctcattggagcacttatgtatcttgcaaatagtactagaccagacattgcgtttgcagtcaatttgttagcaagacatagtgccgctccaactaagcgtcattggaccggaggaaaagaaatcctcaagtatctaaatggcactaaggatcttggcttattcttttagaaaactgctgatcctagcttggttaggtacactgatgctggctatatgtctgatccccacaacgccagatcacaaataggctttgtattcctccatggaggaatggccatatcgtggaagtcatctaaacaaacattagtggctacctccacaaatcattcagaaatcatcgtactgtttgaagcatcacgtgaatgcgtgtggctccgcaggatgataaaccacattgagcaatcttgtggcattggttcatcagaatcacctactattatctatgaagacaatgctgcttgtattacatagatgcaaacaggctacatcaagagcaatatcaccaaacatattgctcctaagttgttttatccccatgagcttcagcaaagtggagaataa

SEQ ID NO: 46543 - DNA, 842 bp, Oryza sativa
  unsure (1)..(842): unsure at all n locations
  Clone ID: PAT_MRT4530_4939C.1
ccgcgcccctatggtcgccggcggtggccataggcacggcggagcgacggccgagagaggggaagggaagggggaaaagaagcggcggtcccgggctcaccctaggtcgacggcgacgacgaaaaaggcggccggagcggagaaaggcggcggcgcggctcgggtcgacggcgttctggcggtcggcgagcgaaacggaggggtggacgaggtcggcgagtatgcggcgaacccgaaggaggcggcgccaaggtgggaggtggtccggggcgacgacggcggcggaccggagctcgacagcgacggcggagagagagagcgacggcgcgagctcgattccggcgaggaggaaggccggcgagaggcgaaaccgnacgcagtaggtgcgggcagggtttaaatagagctgggtcgggagagggtgcccgggaaagggagaaaccgggcgcggaaggtccggccgccatcaatggcgccggcgagatatgcgggggcaaatccgcccgtttgaacgcgagagagagagggaaaaatggggttaaagggagaggggatcacggggagtgatttccccctctttattgcacgcggagacggcgggaggtggcgggattcgcggcggcggcggcgctagggcgcgggcgaggcagcgggaggaaggggatgatgggtgggccccacccatcagcgagggtggcgggcgggcccgcccgtcagcggcgcgcgcgcggggagaggccggatgggccgcggggacaggagagggagggggagggagatgggccgagccggcccaagagggagagggagggaaaggggactttttagagtttttcttttta

SEQ ID NO: 46544 - DNA, 3592 bp, Oryza sativa
  Clone ID: PAT_MRT4530_493C.1
atggcgaagactatggaacaaggacggcgagaggcgaaggatcgtgcgggtactctgccaagccggaggcctcttgggggaaggatgtagggcgaagagtatatgccgaagggagacgacttcgccaaagcaagcttgcccccgcgagggccgaagaagccttttccggcccatcaagcctaggggccattgggccgacgatcgcctaacggcccatcaggagtccatgaacctctattacactatgtatctatgtaaatgtccctttcataagggtaaccatttgtcgtttcgacaacagttggcgtcgaccgtggggacctccgagcaaaaccactgagagcaaacgccaccgaagaatgtcgtaaaggagaaggttacaaggcgaaaggaaagcgacgccggggtggatatggctgccgaagagggagcagagccttcggcgcttatcgccgaagatgggggagcgccatctgcttccgcacctgcgccatcactaccgccttcggcccctgctacctatgtgccatggcgaaggcggctgcggcggcaagggcactccagaccagggcggagatcctttcgacaagccaactgctggtgccccaagccgctccgtcgcagccggcagcggcccaaactgcgctcgccgctgtgcaagcccaagtctaccctgaccccgagacacaaaccgaagccgacatggaagccgtgcgacagaacatgacacgactccaagacatgcttcgccaaatgcaagaatagcagcaagcgtacgaggcggcaaggcggtccaaggtcgcttcggcaccaatcctccagtattcggcaggctatgtcccaccccaagtctatctacaagtgccgacccagccccttccgccacaagtcgcgcaagcgccaatgtacttcgctgggcagccatcgaccgcagcagcgcatccggcccctcacgtgcaactgcaagctcaaccgatcgctgcccaagtacatcctcaacagcctggccaagtgccacaaacaatggcagaaggggcttcggctctgtaggcgcagctccaagctttccttcagcagctcagccaaccccacaacatttcaagtacagcgccttcggcccgcccggaggggaatacaagtcaaggtgcgcctagttgcttgccttcgaatcagccaggtctaggggcttcgccgtggagtcaaggaccgcagttcgactctatcaatgttgccaggcttcggagcaaaccaagcaccaaaccaggtcaccatgacatggtcacagccaactttcgacccattcatggcggctcagcaagcatcaccaatcggggccgagcagccgaatgccatggcccaacctcacgcgcaagccgtgatttcgcccttcgccacgccgtacccgcagcaaggtgtcgtgaacagcgcagggggcgaaaaggggctaccgctgagtgggggaatcaagacccgtccaatcccaccccagttcaagttcccacccgtcccacgctacttaggcgaaactgacccaaaggaattcctctccatttatgaatccgcgatcgaagcggctcatggcgacgaaaataccaaggcaaaggtaatacatctcgccctagacggcatcgcccgctcttggtatttcaatttgccagccaatagcatttacacatgggagcaattgcgcgatgtctttgtccttaactttcgaggcacctatgaggagccgaagacgcagcagcatcaactcgacattcgccagaggccgggggagtcgataagggagtacatgcgtcgcttctcgcaagcccggtgccaagttcaagacataactgaggcataagtcataaacgctgcttcggccggtttactctagggcgaactcacaagaaaaatcgccaacaaggagccgcagacgcttgaacacctacttcgcatcattgacgggttcgcaaggggcgaagaggattccaagcgacggcaagcaatacaagctgagtacgataaggcttctgtcgccactgctcaagcccaacaacaagttcaagttgccaaaccatctcctctcgttgttcgccagccccagccggagatccaagcacaaccgccaaggcaaggtcaagcccccatgacctagaggaagttcagaaccgaccgtgcgggcaaggctgtgatggctgtcgaagaagtgcaagccctccgcaaggagttcaacgatcagcaagcaagcaaccatcagcagcctgtccgcaagaagtatctgaaccagcaaatcttttttggcccagaagatgccgcaggagtaatgttcccgcatcaagaacctctggtgatctcagccgagatagctggttttgaggtccggcgaatcctggtcgacggaggaagttcggctgatgtcatctttgccgaagcatatgccaagatggggttgactacccaagcccttaccccagcaccgacatcgctccgaggattcggcggagaagcagttcatgttcttggccaagcacagttgatagtagccttcggcacgggggaaaacagacgcgaagagcaagtattgtttgacgttgtcgacatcccatacaactacaacgccatcttcggccgtgcaaccttgaacaaattcaaagccatttcccatcacaattatctcaagctcaagatgcccggcccggcaggagtgatcgtggttaaggggcttcagccttcggctgcttcaaaaggtgatttggccataatcaacagagcagtgcacaatgtagaggccgaaccgcatgaccgggcgaagcacgcgccaaagcccgcccctcacgacaagatagtcaagatgcagattgatgatgccgaccccacaaagctcgtatcactggggggcgacatgggcgaagaagaagctaagaacatcctagaggtactcaaaaagaacattgatatcttcgcctggggccctgatgaagtgggaggtgtttcggcagatctcatcatgcatcacctggcagtcaagccggatgccaagccaaggaaacagaagctacgcaagatgtccgttgatcgccaggaggcagcaaaagccgaagtccaaaaattgctcaaggcaagggtcattcaagagatcgatcatcttgaatggctggcgaatctagtgctggtgcggaagtcaaatggcaaatggcgcatttttgtcgatttcacatacttaaacaaagcatgtccgaaggatgatttccccttgccacggattaaccagctcgtggattcgacagccggctgcgaactcatgagcttcctagatgcatattccggctatcatcggattcgcatgaacccggccgacatccccaagacagccttcatcacaccgttcggcaccttttgtcacctcaggatgcctttcggtctgaggaatgccggagcaacctttgccaggctgatgtacaaggtcctttacaagcaattggggcgaaatgtggaagcttatgtcgacgacatcgtcgtaaaaagccgcaaggctttcgaccacacgtccgacctacaggagaccttcgacaacttgcgcgcaactggtcaacaaagaaactgaaat

SEQ ID NO: 46545 - DNA, 1993 bp, Oryza sativa
  Clone ID: PAT_MRT4530_49400C.1
atggaagaagagatgtgcctagtggacagttgtaccactaacactatacttagggaagtcaaaattttccaaactctcactaagagggaaggacaagttttgaccatcgcgggacgcgatgctatgattgtcggttccggaagggccactatcatacttccaatgggtacacaaataaatatcgaggaggcattattgtatcccgattcaacacgtaccctactaagttatagagatatccggaataatggaattcatgtggaaacatatgaagaaaacaatgaggagtttctcctcttgaccaaagatactggatatggcaaacaaacaattgaaaaggtgccttctctcccgtctggattgtactacacatacatcaaacttgtaccacatgttgcatataaagtgatttttcacaatgtggatgcatttaaaacttggcatgatcgccttggccatcccggcatcggcatgatgagaaaaatcatgagcaattcacatggacatggtatgagcgacagaaaattcccaaaatcatcagattttgtgtgcacctcatgtgcaacggggaaattaattttgagaccctcatatctcaaaataaaggctgagccactaaagtttcttgaacgcattcaaggagacatttgtggccctattcaaccattgtctggaccattcagattagacaacgctgcagaattttcttccaaagctttcaatgattattgtatggctttaggaattgaagtccaacattccgtaccgtatgttcacactcagaatggtttagccaaatctcttatcaagagaataaaactcattgccagaccattattgcaaaattgtaacttaccaacctcatgttggggtcacgcagtgttacacgctggtgacttaatacaattgcgcccaactgcataccatacaactttcccgttgcaattggttcgtggtgatcctcctaatatttcccatctgcggaaattcggttgcgctgtatacgtactgatctcaccaccaaagcgtacatctatgggccctcataggaaaatggggatctacgtgggatatttatccccgtcgattattagatacctggagccccttacaggggatttactcacggcccggtacgctgattgtatcttcaatgaagaacattttccggcattagggggagaattcaagtatcacattgaatgcccagaaataaattgggatgccttagacaccctaaaggaagatcctcgtaccacagaatctgaacttcaggttaaaaggatcattgatttgcaggtagctgcaaacaatttgccagtctcatttacttgagtaaaagtgtcacaaaatcatacattcccgcaaggaatgtgccggaaagaatagaggtaccaaataaaactattcaattcccttcctcaaaagagagtgggagaagtacggcaaatcctcgaaagcgcacgaggaaacataggaaagaatcctctgacacagtaaatgaaactcaacctcaagttgagagacaccaagtggattcatcagatccacttcccacatcaacagtgcactaaatttataatgatgggacattggaacgccccgacgcggtcatattgggaaatactgagccgtcaactggggtgcatgaaatttccgtaaactatgttgaatctggagaatcattcaaccgtaagactacaattgtccacatatactttgcatcatcagttgcagataccatccaaaatgatccagatccaaaatccatagtagagtgcaagaagcgctcggactggaacaaatggaaggaagcaattgaagcagagttagcctccctcaataaaagagaggtattctcacaagtaatacctacacctccaaaaaccttccccgtgggtttcaaatgggttttcatccggaaacggaatgagaacaatgaggtggtgagatataaggcgaggcttgtagcacaagggttcacgcagagact

SEQ ID NO: 46546 - DNA, 280 bp, Oryza sativa
  Clone ID: PAT_MRT4530_49401C.1
cgtgacgtggactagattcccgatcttccgaaagattctgatagtcaatgatttgaacggagtcgcgacacaaatcgatctggcttcttaaacgaacacgctcttgagccccgcaatcgcagtaccacgtctcctctggttatcacccatatcgaaacgctccaaaggcctaaatacggtgacgcagcaccggaacagattcaggacgtcaacttgttcggtcgattttcattgactcggaaataatttggacgtgggaccaaaaccattggaaatgtta

SEQ ID NO: 46547 - DNA, 498 bp, Oryza sativa
  unsure (1)..(498): unsure at all n locations
  Clone ID: PAT_MRT4530_49402C.1
gcgggttcttatagttttggggccattacatttacacattcagtatctttagcctgttagcccaacggtatcttttacgggttagtttgattgcttaattcaatgtgtgcgctgttgtcaaatctctaccaagacctcaggtagcaagttaatttcagtcactccggtatcgtaaagacataccaagtaacttgccgcttcttggtttttctttggtcaatgaaactaatgctattttgtggtggggaggccgacattgttactcggggagttacctgtttgttccttcaaacatgtgctcttacgtgaacatggatatggtggtgtttacaatcaacacgcatctatcagcgatgtcgtcttaagtgtggactccacttcactaagtattgctcggngttgcggatggcagcacctgggagcctatgtaaacctcggttcattctacctggttggcattccggtagccctacttcttggctttggtttcaagatgga

SEQ ID NO: 46548 - DNA, 677 bp, Oryza sativa
  Clone ID: PAT_MRT4530_49403C.1
gttggtgcttcttcgatctacaattgttattattgcaattacaggaagaacaactagtggtactaacctgactgtactgctatcctgtatgaaattatacatttgtataggctactgaacacgaacaatcaagccatgcatcaccatcttacacttgattacactaacttgtcccgatcgatcgatattgaacagcaaaactaaactaattttttttccctttgcgccggcgagctatgtagcttaggccatggcagccgtggcgggcggttcagatgagggcgccgtgggcggcgtcgagggaggcggccatgggcatggggaagccgaaccatggcgcgtacagctgggcctcgtcgacggcggggcgcacgggcacgggctgcgccggcgccacgggctgccttggcggcggcggcgcgggggcgcccgtgagcctctgcacgaggtccctgaactccctgggctcgacgcggtacaccttgggcggcgcggggcctggcgccgccgacggagaggctcgccacggcttggccggcggcttctgcaccgccctgagcgccgcctcgtgcgccggccgcctcgcgtcggcagcgtgcatatccattgaattccacaagaagaagaagctaagataagcagagtgagagagaggaggaagaagaagagcctcgtgc

SEQ ID NO: 46549 - DNA, 737 bp, Oryza sativa
  Clone ID: PAT_MRT4530_49404C.1
cgggtccttatccaccgccgacgctgcctctcactctcccacactctcactctctcagatccaccgcctcctccgcgcccaagaccgccgccgccgccggcctcctctccaagtccgtgtcctccatgcccaagaccgccaccgccggcttcctctccgcctagtcctcaagaccgacgccacggccatttcaccgaccgtcgccgcctcctcgtcctcaacgctgtcgcctcctcctccctcgaagattcggcctcaccgaccacggccgcctcacatcctcctctccatatctacgcccagcggccgtcgaccttgtcctagccgccgcgtcgacctcctccacgccgctacctcctccggggccgctcaagatccggcctccccgacagccaccgcctccctccacgccgtccccgagccaggcgccacccaagactgctgtccccgagcccggtgcctccctccacgccgtccccgagcccagtgccgcccaagaccgccgttcctgagcccacgtcaacctcctcaccgagcccgccaccgccagaaggggggccgccgccgccgttcgccgtgctcgcctccccgcgttcgctgcctctgccgccgcctcacctcgcatcgccgccgccgcgctcgtctccccgcgctcgccgcctccgccgccgtctcgcctcgcctccccgcgctcgctgcctccgccgtcgcctccctctaatccattcccaaaactg

SEQ ID NO: 46550 - DNA, 2288 bp, Oryza sativa
  Clone ID: PAT_MRT4530_49405C.1
cgcgagcctcgctcgcatcggaatctcacgcgatccctctgccccccgccgcggcgccggccaccaccgccagatgcccggcggcgcgcggcgccggtgaagggtgagggcgagcagcgccgtcgcgcgcgcgccccgcccgtttggattccattccttcctctccccactcacacccactgctcaatttattcccacgcgccccacgctgacgcctcgtcgcactcgtgtctcgcgtcccgtcccgtctcggcgtcgcctcgccttcgccttcgcctatttaaccacgcgtccgatgctcttcgccaggaggccgctcgccaccgccgccagccacctcgcgcccttctcccctcccctcctcctcttcttcgcctccgcctcctcgtcgtgctcatccgccgcgtcgccttcttcggcctcgggccctagagggtgcagtgctgtaaggatggagaccggtgcggtggagccagcatcaacaggagcaatatggtcaacgccatcagtggaacctagaaccatttctgttgggaaagagatattctgcaaccggtcactcaacatgaggaacatcactgcagtaggatttgatatggactacactcttgcgcagtacaagcccgagacatttgaggctcttgcttaccatggcacaatagagaagcttgtcaaggaccttggctaccctgaggagctgttaacatggcagtttgactggaaatatatggtcagaggattagttcttgataagaagagagggaatatcttgaagatggatcggcacaagtatgtgaaagttgcttatcatggatttagggaaatgtcaaaagaagaaaaagtgtctgcttatggaagtacattgatacgagattcctttgatgagcctgactatgccctcatagatacacttttctcattgggtgaagcctatctgtttgctcaacttgttgatttcatggataacaatcctggaaaagtaccttcaggcactgactatccgcttatgtacagagatgtgaggtctgctgttgacttgtgccatcgtgatggaacattaaagagaatggtcgcaaaggatcctagcaggtacatcaacgaggacttggccattgtaccgatgcttgaaatgattagaaaatctgggcgctcaacattcttggtgacaaatagtctgtgggactacacagatgttgtcatgaactacctctgtaggccatatacctcagatgtaagctccagtcacaaccacaagtggcttggatatttcgatgttgtgataacaggaagtgcaaagccagggttcttccatgatggtaaccgtgctggactgtttgaagttgagcctgattctggaaagcttttaaatgctgatcttcatgttagtaatatgattttattggaagccccagatcagggaggaaatgttggtcatcttcacagattactttctgttgcttctagttctcagatcttatatgttggagatcacatttatggagacatactgcgcagcaagaaagtccttggttggcgcacaatgctagtaataccagagctagagcaagaggtgaaacttctttcggaatcaaaatctactcgaaaggagcttaggcatcttaggatggagcgtgattcaattgaagataaaatccatcgtcttgaatggtcactcaagtttgaaaatcttacagaagatgagaaggaaaagttattctcggagcatgacattctgctgcaaaagaaggaacatgttcgtcggcttcatcaagaggctcaaaggcaacatcatcataagttccataaagtgtgggggcaactcatgaagacgggttatcaaaactcccgatttgctcatcaggtcgagagatttgcgtgcctttacagtagtcaagtcacaaactttgctttgtattctcccaacaagtactaccgtccaagcgaagattacatgccccatgagttcgatgtgcttgggctgtaggagttctcccggtctccttgaatagattttcagcttgcatctggataggagcatgatcttttgtcctgtggctcttaccgtctaataacattgtagtttctgttaattttgtaagcaagtgtgggattaatctggtgaatgttcacctgttcttttcaagttaccgctgaaaaaaaaaaacgaaaggtttgtgtaattatagtcggccatagcagatcagccatttaactatatctttttgtacataataacaagcttatagtgaaattaaaggaaaagtttttgatggaaaaaaaaaaaaaaa

SEQ ID NO: 46551 - DNA, 290 bp, Oryza sativa
  Clone ID: PAT_MRT4530_49406C.1
cttccggcatgaacacagatggctacgcactccatctgaaggctatcacggaggcatacctgaggccacagcaggaccagggattgctgtacctcaaggtcagcatggatggcagcgccgtacctgaggaacattgacctcaagacttacacgaactacaaggacctgtctactgggcttgacaagatgttcagaggcttaagtactggcacggatggcttatctgactaccgtaaggatggcgaatatgtatctgacttatgacgacatcgatgcagattgcatgctcg

SEQ ID NO: 46552 - DNA, 1029 bp, Oryza sativa
  Clone ID: PAT_MRT4530_49407C.1
atggaggcggaggcggagacgtcgacggtgaccgtgacgacgggcggcgagggggaggaagctgctgagccacggcaaggattgaagccccctgctttgacccatgctcttccttcctccttgatctttgtcaaaattgaggacggcgccgatgcattgttgcggaatattcttgcgtttcgttcgcaccagattttccacgggattaaaatcaccaaggtcagtcctggtccatctctgaatttctgcccatatcctctttgtgagtctgcatttggccaggagggtttcggactaaggctgggtgcatatatagaacacctcctagtctccaacttcttgtgcttgctagggcctagggcactcaagctcaaagaatacttcagcaacttcggcgaggtcaaccgggcaatcgtggtcaccgaccttaacacgaagatgcccagggggttcggcctcatccagttcgcgtcggaggagtccacagcgagggcgctcaagaaggacagacacttcctctgtggccagtgggtggaggttgtggtccccactagcgtcttgctttccccgagaggcaaagacgttgggcccaagcccccaactttcgcgtcggaggagtccgcagcgagggcgctcaagaaggacaggcacttcctctatggccagtgggtggaggtgagccttgcaatgcccaagcagcagaatgcaacttctggcactagcaaattgccagttcaggctcacccgttttatccaacgacatcatcaaactttaccgccgccgctaattatcccaacgtcgttaatattgtccatgtggtgacacctatgaattgtgtcgtcggcagtacttttaaccctcatattggcttcgaggtacctgggatgaaactgagtgatggtgtgatcaatgttgtcactgctaattactcctaccagtacccctaccttggaggtggtgaggttccgcctcaaaactcagcgatgtatcttcaagcagcacattattatagtggtgcgatgatgtga

SEQ ID NO: 46553 - DNA, 586 bp, Oryza sativa
  Clone ID: PAT_MRT4530_49408C.1
gcacgaggagccatcgagcacacggctcttcgcttgcttgtgttcttggctctcttcatgccgtggttcttcctcctcctcctcctcctccccgtcgcgtgctcctgttgccaccacatcctcgcatcctcctcctcctcggtacggtattcgccgcttccatagcggaggcatccatggctgcagcggcagggcaaggtgatgcaagatggcgagaagatgctgacctcgccggtgcccacacaatagcggcagcaggagggcagaacgtgaggatgtcggggagggagacactggacttgccatcggcgtggatcagatgtggtggccctggctaaggtcactcctctcacgaggctgctcatatgtgttcttccctagccattacctctcccatgctgcatcattaacttgatttcggcggatggagtagatgaagaaaacaaaggtgggttcatttctgttcggacttttaacgatgttgcagcctattatttatctctattgcactttattctattaaggtgtttcgttttcttttgatttgatgttgcatatatcaattcttcgtgtcgcaattggtgtg

SEQ ID NO: 46554 - DNA, 411 bp, Oryza sativa
  Clone ID: PAT_MRT4530_49409C.1
atggtggccgcaaagaagacgaagaagtccacggacaacatcaacaacaagctgcagctcgtgatgaagagcggcaagtacacgctcggctacaagaccgtcctcaggaccctcaggaactccaaggcgaagctagtgatcatttctaacaactgcccacctcttcggaagtcagaaattgagtactacgctatgttggccaaggtcaccgtccaccatttccacggaaataatgtcgatctggggacagcctgtggtaaatacttccgtgtttgctgcctcagcattattgatcctggtgactcggatatcatcaagaccacggcttttaccagtcaaccaaagtttcgtgggaacattgttcttggattggaaaattttgttcctggcccgaatcatgttttcaattag

SEQ ID NO: 46555 - DNA, 262 bp, Oryza sativa
  Clone ID: PAT_MRT4530_4940C.1
tcctcggagaacccgccatcggacacatactcgagcttcccgtccccagcgggcgacgggcagtcccctctcgtgcctaggtgaatccggaagcgacagaggccgtcgcagggcccgccccgctccatcacgcccacccttgcctggatgcgtcgactagaggaaagatgttcaagtgacaggcatgacttgccttgctctgctgctggagggacctcggcgactatctcgaagtacaccggagcgtcggagggatcggaat

SEQ ID NO: 46556 - DNA, 1575 bp, Oryza sativa
  Clone ID: PAT_MRT4530_49410C.1
atggacagtactactgcatcctactacaccaccttgctgtgcggcgccctgctactcgctgccgtcgtcttcaagctcaagacggcggcagctttttcccggcacaacgccggcgtgaacctccctccggggccatgggcgctgccggtcatcgggagcatccactgcctgctcggctccctgccgcaccacgccatgcgggagctctcccggcggtacggccccgtcatgctcctccgcctcggccatgtccggacgctggtgctgtcctccccggaggcggcgagggaggtgatgaagacccacgacgtcgcgttcgccaaccgggcggtcaccccgacggcgagcatcgacatcgtcttcgcgccgttcggcaagcacctccgggagctccgcaagctttgcgcgctggagctgctcagccccaggcgcgtccgctccttccgccatgtccgcgaggaagaggcggcgaggctcgctcggtcggtggcggcggcggcgtcggcgtcgtcggccgtcaacgtcagcgagctcgtcaagatcatgacgaatgatgtcaccatgagggctatcatcggcgacaggtgcccgcagcgggaggagtacctcgaggctctagacaagaccatggatctcctcgccggattcaacctggtcgacctgttccccggatcgccgctggcgagggtgctcggtggccgatccctgcgtacgacgaagcgggtccatgagaagctccatcaaattacggaagccataatccaaggccatggaatcaaggacacggttggtgacgaacaccatgagtgtgaggacatcctcgacgtcctgctgcggtttcagagggacggtgggcttggaatcaccctcactaaggaaattgtcagcgccgtgttgtttgatctttttgctggcggctcggagactacgtcaacaaccatactctgggccatgtccgaacttatgaggagtcctcatgtgatggagcaagcaaagtatgagattcggcaagtccttcaaggtaaagccatggttagtgaggcggacattgaaggccgactccactatctgcagctggttatcaaagaaactcttaggctgcatcctccggtgccaattgttatacccagattatgctctaaaccgaatagtaagattatggggtatgatatacctcaaggtacttcggtgctggtgaatgtatcagctattggaagagatgagaagatttggaaagatgtaaatgagtttaggcctgaacgatttaaagatgatattgttgattttagtggtacggattttaggtttattcctggtggttctggtcgaaggatgcgcccaggtttaacatttggagtatccaatattgagatagcacttgtaacccttctataccattttgattggaagttgcctagtgaaacagacacacatgagctagatatgagagaaacctatgggctcactacacgtcgtagatctgaccttttactcaaagctactccttcctatgcacgattgggttggtccaccaatatgcagatatacagtgtcaagtgtttggtctatgaataa

SEQ ID NO: 46557 - DNA, 645 bp, Oryza sativa
  Clone ID: PAT_MRT4530_49411C.1
aactcttccacctcgcagtcgccaccccgagcagaagccgccgccgccgcccgaaaccctcgccgccgtcgcttctcctcggggcgcagccatggtggccgcaaagaagacgaagaagtccacggacaacatcaacaacaagctgcagctcgtgatgaagagcggcaagtacacgctcggctacaagaccgtcctcaggaccctcaggaactccaaggcgaagctagtgatcatttctaacaactgcccacctcttcggaagtcagaaattgagtactacgctatgttggccaaggtcaccgtccaccatttccacggaaataatgtcgatctggggacagcctgtggtaaatacttccgtgtttgctgcctcagcattattgatcctggtaacttccatacgtctacctagtatttgaaagaaactaaacaaaaccgttatttgatagtaatactgtacaatgcgcttgatttccaggtgactcggatatcatcaagaccacgggtgagcagtaaggatgagcggttccgctggcgcttcagatgctgtcacactgagctgttcagacattgtagttgttgctggacttgatttggtctctctcgtgtatcgacagcttttacagtcaccaaaagtttcgtggg

SEQ ID NO: 46558 - DNA, 1266 bp, Oryza sativa
  Clone ID: PAT_MRT4530_49412C.1
atgactcccgccgatgccttcctcatcctcgacttcctcgccggcaaccgcctcatcccccactccgtcttcaccaccctcctcgcctccctcccatccgtctcgccccacacctctcctcgcctccgcgcaggcctcgctctccgcgctctcgactccgccctctcgatctcggagtcgtcggagatggacgcccccaccctcctgcgcaaggcgcgggctgtcctcgcggatccagaccttgcccccttctttccgcagcacctcgctgcacccgcctctgccgacgacgccccggccgccgccgtggctcacctcaaccgccttctcgacgttgagtgggcgagcctccctccttcctcgctcgagatcgcggccgaacggatcgttggctctcaagccctccattcgtgggcaaatgccgaccacgcccaacgttcaaagcttcgtctactcgctgaaaaatactccacttctttgtatcagttttactcacccttagccgtttctgcagtaggagagtccacagcgcttgagattttagacacgcttcaacggccggatgcatccacaaatcatccaggaacgctgcctcaagttgataatgcaccggaaacaaacggtgcttctcattgtgctcaacaaaacgatggggccaagagcggtcttgttaaacaaaatgctgaagccgatcgtcctcaacaagatagcactcgacatcaacaagactcggtgcaaggagcatccaattcccaacttaaagaaagttcagtaacaatggaatctattagaggcacgggtcctgatatcacaggctttatggaagaagctacacctcgtgttgctggacagtttgcccctgacaacatcaagaaccatcaagtcacaggttctaagcgcagtttaatggagaggaatccgactgccagcacttatgagggggagcatttgtgtaatattatggtggtatctcatcgtatttttgaagtgcagtgggatggcagcgattccgaagggaaaaggcctgcagcaaagcgccggttacccatttttgaaaggacagcaaaaccttctcctacagctgcacataagacgagaaaaaagtggagcgagaaacaagaaaaaaccttgctggaaggggtggagaagtatggaaaaggcaactggaaagatatcaaaatggcataccctgatgtatttgaagatagatcgacagtagatttgaaggataaattcagaaatttggaaaggcatctatgcgcttga

SEQ ID NO: 46559 - DNA, 866 bp, Oryza sativa
  Clone ID: PAT_MRT4530_49413C.1
gcacgagggctatgttggccaaggtcacgtccaccacttccacggaagtaagttgacacccaggggtgtttcgacatctcttgacctttgcaaagatttaaacagtgaggcatgctggagagtacctatgtgtcgaaattatatcggtcaaacgccatcggccgcacgcgcccgcacctcgcagtcgccaccccgagcagaagccgccgccgccgcccgaaaccctcgccgccgtcgcttctcctcggggcgcagccatggtggccgcaaagaagacgaagaagtccacggacaacatcaacaacaagctgcagctcgtgatgaagagcggcaagtacacgctcggctacaagaccgtcctcaggaccctcaggaactccaaggcgaagctagtgatcatttctaacaactgcccacctcttcggaagtcagaaattgagtactacgctatgttggccaaggtcaccgtccaccatttccacggaaataatgtcgatctggggacagcctgtggtaaatacttccgtgtttgctgcctcagcattattgatcctggtgactcggatatcatcaagaccacgggtgagcagtaaggatgagcggttccgctggcgcttcagatgctgtcacactgagctgttctagacattgtagttgttgctggacttgatttggtctctctcgtgtatcgaacagcttttaccagtcaaccaaagtttcgtgggaacattgttcttggattggaaaattttgttcctggcccgaatcatgttttcaattagaacgcttggctgtttgttcactgaaaaaaacataaaaaaaaaacgttttacccccgcctcattggccggttgtttaacaacgtt

SEQ ID NO: 46560 - DNA, 387 bp, Oryza sativa
  Clone ID: PAT_MRT4530_49414C.1
ggggtttgttgttttttttttttttgaataaaagagtgactctttatttgaacagacatttgtctgtattattacacagttcaataacaaacacatcatatatttttatggaattaaaaggaatgcatcaccatcggtttaatacaaactaatgagacaaaggacatgttccatatattctttgcttgcagttggcttcaacggaggtttctcacttgctcatctgaaaacaccaggtgcaccatataatgcttcttctgaaaagggaacttgtcaaatgcgtgcaacctgaacaaattattcgtagcaatgcagatctagcaactttacatctttcagtacatccggaacaagtaatggcatattacactgtactacaacttaaag

SEQ ID NO: 46561 - DNA, 1596 bp, Oryza sativa
  Clone ID: PAT_MRT4530_49415C.1
tcaagctcctcctgaaagtactgcagactctagcttctttgcatctagttcagcttgtatctctttcatcacattggttgtcttggcagcgggctgctgaattccgacgttgcgcaaaaatgtgtttgacttcggcaacactttggaaacagcttcaatagaagtcttagcttgctgcccatcttctactgatggtgaagtgagggcttcccaggtatgcatatcctctatagctttcttcacaggttcactaaaacctttagttttgctacaatgcaactccttaaagagatcaattgcagtgggctcactgtctttgtatttttcttgcttcttgtgctctgggcttgaccacatatctaccaattttgtccattgctcatcggtcatacacttcaagggcgatgtagtcctcacttgattagcaggtaccccatcaaagtacttctttttgagcctatacctcatatggcgtgttccacaccttaggatgtcttccattgcagctattacaggatcgctgtggatatcaatggagaattttcccttcagtttgccctttaagttatcaagttgactactatcattcttgtagtctgtccaacttggatatattggtatatgctgcctgattatgatcccactctctgaggccagctttgcagtttgcataggagcctctggcctttttttcccttccttgacaatgattggtatcatggtccctaaacctttgcttatggaatcaatctctttgcccatgctcttcccccttgtctccacttgtatactgctagtgagggtgccacacatattgacaataaaataacagtagggtagccacttgccttgtccagtattgttggtgtcaccctgattctggtttgcagacaaatcaggttcgagtccaacctctgtggcttcaatcaggctagtggtggacacttgtttcatagccctttgcctagtgcatctcattgtttcttctagattttcaagtgctagcactctcttagatgctcttcctgttccagttgtgacacaatcaccagtgatggccacatcttcccctagtaacaaagcctttgactttttgccaacagctttcttctttgcaactgaactctggaatatttgtgctagtttacggatacccagctgattagcaaatcgattgttcctcatgatattccaagccctcgacgtgcttaagtccatgtcttcctcttctcccaatccagggccgcccaatccaagcctcgaaaccctaaggaggatgagctgagaagtacctagcatctccatggcggccgcttcatctggaaggaccgaaggatggcgggaatgtgtgctgttgccaccaagcaccattgtcttgctcctaggagggaggcaaggggttgccgcaggatctggaaggacagaaggagggtggggaggcttgttcttgccgccgagcatcttcctcccaggcccatcgtcttgctcctgggagggaagcaaaggggtggccggtttggaagccgagcaagatctgcaagaaggttgttcttgcccggcggctgtgcagatggagggagtgggaatgattctagg

SEQ ID NO: 46562 - DNA, 519 bp, Oryza sativa
  Clone ID: PAT_MRT4530_49416C.1
atggcgtggcgagcgtggaggcagaggaaggccatggtgacagacgccacgtgcgcgaacaccctcgcggcggcgcaacacggcaaagagcttcctggggcagcgaggtcgacgatggcggccgcccacagcgacgtctccgttagacatggcaacgggaaattccccgtcggagattacaccaccagacccgcctccgcggacgagaatttcccccatcaccatctgcctgttttgcaacggggcaacatctttcaccatcaccttctccgtgcggcgagcggcagccttgcgtggatgacggcggcgctaggacctgctgaggcggcgcggcggccctgcgcggacgacggcggcggctggacctggcggcgcagcggccctgcgcgggcgcgggcgcggcggcatggggacctgctgcggtggcgccggaccctggcggcgcaacggccctgcgcggacgacggcagcgtcgggacctgctgcggtggccctgcgtgggctctggcgcgccgctag

SEQ ID NO: 46563 - DNA, 249 bp, Oryza sativa
  Clone ID: PAT_MRT4530_49417C.1
ttttttttttttgtttatttttttatgttttttgtttttcaaccgcacttttactttgctgatcacaaaaggaattgatatagggacctagtttataactttacttaacccaaacagcatatttaacccttacaaaacaccacttggacacagacaaaagaccatcacttattcggacacaaaatcttgttcaaaagagtactcaaaaaagaccattgagccgcggcccattaaagccttgaatttctc

SEQ ID NO: 46564 - DNA, 183 bp, Oryza sativa
  Clone ID: PAT_MRT4530_49418C.1
atgggtcacatggtggagaggccagggtttatcttaccgccggggccggggttaccgcgccccggcggtaagcacggttaccgcgcggtaaccgcggaggttaccgcggttaccggtggtaaggtaaaccctggtgacgggggagattgttgggtcctgggcctacacaacccaaaagactag

SEQ ID NO: 46565 - DNA, 654 bp, Oryza sativa
  unsure (1)..(654): unsure at all n locations
  Clone ID: PAT_MRT4530_49419C.1
aancncnanacggnnaattgggttccnggccccccctccaattttttttttttttttttgcaantcngaaaatnaatganattttattccatggttcntatttcnantgtttgcacnccaaaatatgcaacaccttattactaaaatncatgttaccaacgtttgatcnacaacnaccacnggaaaaaaattggaagttganaggggncntgttgcncntgtttggcatctgcntccccatcttcntcatctgctgctgcccnaatccnncncnaatnacttgttgcatgctctgcatcatcnggcaacnggtgccccagtggcacngangcatcctgccttgttgctgcntgcaacnttgcngccgcatgaacgcccttngntncgacntnancattgnntgtngaaactacccntgcccacgttttcctccacgtnctgccnnncccgattcctggtccccntngggttaatgtttggnngggaaaataccgcnncattngngaattggccttaattggcacntgccaaaaaaacaattaagggnnaccnggncaanancttncctgntgtntccgcccattgctgaatccacaanacattgttaacaaancccccttgccantncngcnaccngggattcnntttccaagg

SEQ ID NO: 46566 - DNA, 5129 bp, Oryza sativa
  Clone ID: PAT_MRT4530_4941C.1
agattccgacgtttccggagagtctgttttcgcaggagaagattttgaagagttccaaggccagcaaggcaactcctggtttggaatggtatattcctggtttggagatagatctgtacagccgggtatggttgttcagaaaggttgggcctatacaacaggatgccgcgctacaagcctgagtacttgtttggtgttgagggatttgtccaggagttgcgtacgatgtcctttgccataggatttgggactgcccttttttatgcccagattcctcatgatcgtcacgaagagaagtgccgagtcaaagtcaccttgaacagtaatagtgaagatatcccctcagtgatgttcgaagctggaggaagaaactacatccatgcatgtcaggaggtggcaaggatcgccataggagagctccgcaatcgctacagtgatcggttggccgacactgagtatcactaccatcctcgtcaaccacagggaagtgaccgtggcagctaccttgagactgaaggaattgagaatgatgctaccacaaggcatttggttgagatgctgtgggctatgatgaaacccgtgcagagactgtgttagcagctcaagatcgtgaagaccggaatcgtggtaagatttgcaagctagaggacaaggtggatcgtttggagaaggaactagccatgttgaagggagaagcaccaccgcagaaggccagggttcgttttaccgcaaggaagagagctctatttgtccctcgctaccaattggcgccaaagatggtgctcactcgcagcaacgggaatggccccaacaacaacaacaacaacaacaatggagagaatcccacacttgcccaagtcctggctcaacaggcacagcttatgaacatgatgatgcagcaactccagaaccagcagaaccagggaaataaccatgcacctccccagaacaagttagcagaatttcttcgtgtgaggccgcccactttctctagtaccactaatcctgttgaagctggtgattggctgcatgccatagaaaagaagttggatttgcttcagtgcaccgatcaggagaaggtctcatttgcatcacatcagttgcatggccctgcctctgaatggtgggatcacttccgccttaacaggacaactgctgaacctatcacttggcttgaattcaccgctgctttccggaagacgcatataccatcgggagtggtgtctctcaaaaagaaggaattcaggtcgctcactcaggggtctcgctctgttaccgagtatctgcacgagttcaatcgtctggctcgttatgctccggaagatgtgcgcactgatgaagagcgtcaggagaagttcttggaaggacttaatgatgagctttcttacccactcatgactggggaacagaagaaatgccggattgctcacttcaaggcacaacaggggaatagtcagaggccgcgtcttaccttaggaccctagaccatgccacagggaggttcttcgtctgttgttcgtccgcagcgtcagttcttcaacaacaatgctggcaacaacatccgcaatcaagctccacgccctattgcagcttcgacaccgcaacaacctgccaagagggagcaaggcagcaagcccggggtgtgcttcaattgtggagacccaggacattacgctgacaagtgtccgaagccccgacgtgtgaaggttgtccctgaccagagcaactctaccgtaccagcatcaaaggcccgtgtcaatcatgttgttgctgcagaagctcaagatgctccagatgtgattttgggtacgtttcttgttaacttagttcctgcaacagtgcttttcgattctggtgctacacattcattcttatctatgagttttgcgagaaatcatgggatggaagtagaagatcttagacgtcctttgatggttagtaccccaagtaatcaggcactctctttgcaacgtagcccctctgtcagaatagaaattcaaggagtaccatttctggccaatcttatcctgttagaatccaaagaccttgatgtcatcctagggatggactggttagccagacataaaggtgtgatagactgtgctaacagaaaagtaactctcaccagcaatgatggtcgagttgtaactgttcatgcattgtcttctgagtctttgagatcaaaactgaaccaaataactttggaagagattcctatagtccgggagtatcccgttgtgttcccagacgatttacctggtatgccgcctaaaagggatatagagttcagaatagatttggtaccaggaacaactccgatccataagagaccttatagaatggcagccaatgaattagcaaaagtcaagagacaagtagacgatttgcttcagaaaggatacatcagaccgagttcatctccgtggggagctccggttatttttgtagaaaagaaagatcatacccagaggatgtgtgtggactatcgtgcactaaatgatgtgactatcaagaataagtatccgctgcccagaattgatgatttgtttgatcagcttaaaggtgccaccgttttctccaagatagatcttcgatcagggtatcatcagttgagaatcaaagaggaagatatacctaagacagcttttaccactaggtatggattgttcgaatgtactgttatgtcttttggacttaccaatgcccccgctttcttcatgaacttgatgaataaggtgtttatggaatacctagacaacttcgtggtagtctttattgatgacattcttatctactcccgaaccaaagaagagcatgaagaacatcttcgccttgcactagagaagctacgagaacatcaattgtatgctaagtttagcaagtgtgaattttggttgtctgaagtgaagttccttggtcacgtcatctcagcaggaggagttgccgtcgatcctagtaatgtggaatccgtaaccaactggaaacaaccaaagacagtttcagagattcgccgtttcctaggcctcgcaggatattatcggaggtttatagagaatttttccaagattgctaagcccatgacacgactgcttcagaaagatgtgaagtacaagtggtcagaagaatgtgagcagagttttcaagagttgaagaatcgcttaatatcagctcctattttgattttacctgatccaaagaagggtttccaagtgtattgcgatgcatccaaacttgggttaggttgtgttctgatgcaagatgggaaggtggttgcctatgcatctcgtcagttacgtccgcatgagaagaactaccctactcatgatcttgagttagctgcagtggttcatgcgttgaaaatttgacgtcattatcttttcggtactcgtacagaggtgtacaccgatcacaagagtttaaagtatatctttactcagccggacctgaacatgagacaacggagatggttggaattaattaaggattatgacatgggaattcattatcacccgggaaaggctaatgctgtagcagacgctcttagcaggaaaggctattgcaatgctacgaaaggacgacagttgccattggaattatgtaaggactttgaaagattaaatttgggaattgtcagtagaggtttcgttgcagccttagaagcgaagcccactctaattgatcaagttagagaagcccaaattaatgatcctgatattcaagaaaccaagaagaatatgagaagaggaaaagctatcggtttcttggaagatgagcagggaactgtatggttgggcgaaagaatctgcatccccaacaacaaagatttaaaagatgtaattctgaaagaagcccatgatactttatactccattcaccctggtagtaccaagatgtaccaggatctcaaggaaagattttggtgggcaagtatgaagcgtgaaatcacagaatacgtagcagtatgtgatgtttgtcagcgagttaaggcagaacatcagaaacccgccggtttgttgcagcctttgaagattcctgaatggaagtgggaagaaatcggtacggatttcatcactggtctacccagaaggtcatcaggccatgactctatttgggtgatagtcgacagacttaccaaagtggctcatttcatcccagtaaagacaacctattccggaagtcggttggcggaattgtatatggcaaggattgtgtgtttgcatggcgtccctaagaaaatagtgtctgatcgaggcagtcagtttacttcaaatttttggaagaagcttcaggaagagatgggttctaagctgaactttagtactgcttatcatccgcagacagacggacaaaccgaaagggtgaatcagattttggaagatatgttgagagcttgtgctttagacttcggtggaagttgggataagaatctaccttatgcagaattttcatacaacaacagttatcaagctagtcttcagatggctccttacgaagcactgtatggtcggaagtgccgcactccgcttttgcgggatcaaacgggagaacgtcaggttttcgggacggatatcctaagggaagcaaaagagaaggtaaagatcattcaagaaaggttgcgtgtggctcagtctcgccataagagttatgccgacaatcgtcgcagagatttgagttttgacgaaggagattatgtgtaccttcgtgtcacgcctcttcgagaagttcatcgttttcacaccaaaggaaaattggcaccgcgttttgtgggaccttataagattgtcagtagaagaggagaggttgcttatcagttggaattacctcaatttttggcaggagtccataatgtgttccatgtgtcgcaattgaaaaagtgtttaagcgtacctaccgaagaagctaatcttgaacagatagaagtccaagaggatcttacctatgttgagaaaccaatccgtatcttggaaatagatgagagaagaaccagaaatcgagttatccgtttttgcaaagtccaatggagtaatcactcggaagaagaatcaacttgggaacgagaagatgaattgaagtcagctcatccgcatctgttcgccagttcttccgaatctcgaggacgagattctgtt

SEQ ID NO: 46567 - DNA, 171 bp, Oryza sativa
  Clone ID: PAT_MRT4530_49420C.1
atggcggcaaccgacactccgacaggcaggcgggcagccgagcatcagagcggccgcgcgaaccgcgagcagcaggccggcggcagcgtggagccgcgggagcacggggactcaagcgcgccgccgccgtttcagaagcagcagcagcagccgccgccgctgtcgccatag

SEQ ID NO: 46568 - DNA, 777 bp, Oryza sativa
  unsure (1)..(777): unsure at all n locations
  Clone ID: PAT_MRT4530_49421C.1
ccacgcgtccgggcgaggcctcgccgtggagcctgctcggcggcgcggtggccgcgctgctgctggtctgggccgcgcagatgctggagtgggcctggctggccccgcggcggatggaacgggccctcagggcccagggcctgaggggcacccagtaccgcttcctccatggcgacctcaccgaggacctgcggctcgtcacggcggcccgctccaagcccgtgcccatggaccggccccacgacttcatcccgcgcgtcgcgcctctgcttcaccgtgccttggaggaacacggtagggtttcttttacatggttcgggccaatgccaagggttacaatcactgatccggacttggtccgtgaagttctatcgaacaaatttggtcactttgagaagacaaagctggccactcggctttctaagttactcgttggtgggcttgtgatccttcatggtgaaaaatgggtcaaacataggaggattatgaatccagcctttcatgcagaaaagctaaagcggatgttgccagcattctccgcatcttgtagcgaactaattggcagatgggagaatgcggttgctgcttctgttggaaaagccgagctggacatttggccagattttcagaatttatcaggagatgttatttcaagagcagcatttggtgtcagacaccacgaaggcagacaaattttcctacttcaggccgagcaagctgaacgccttgntcaatctttccggagtaattacatccccagcttatctcttttacccg

SEQ ID NO: 46569 - DNA, 603 bp, Oryza sativa
  Clone ID: PAT_MRT4530_49422C.1
atgccgtccttcaccaccggcacggccgtactgctgctcactgcctggctctacgtgccggagaagagagacccgctagccgcgataggaaacggtaggcacgtcagtgggagacgattcttcctgccgcacggagaggttgaaggtttggggatgggtgttaacgccaaaatgccgatgagaattatcaagtcgccaacagtcggattcttggaggattcggttaaggaaacttatctagaagagaccgagttcaaggaggattttttacttatcaaccggcggaatttggcacctgacgcggggctgcgtcagttcagttcgatctccggcgaagggggcgcgtacgaggtggtgtcggtggcattggtgcatcagcctctgggactgcgggctggttgttctcgagaggtgcatccattgattagctacttcctccgttccacaatattaatgagttatgcatcattaatgagttatgaggaatcggggcaatcctcagagacagttccggcggacccatttttgcttgctgcaggcctctgcagaaatgctctggagcgctggaagcagagctccgtgcttgcgctgatggattggtga

SEQ ID NO: 46570 - DNA, 186 bp, Oryza sativa
  Clone ID: PAT_MRT4530_49423C.1
atggaggcgctgggtgtcggcgaccggcctccgcaggtacgggagaaacgaacgcgggcgaaggagatgcagcgcgtgctctgcggggggctccgactgcgccgcgtcaaccggcggcgcgagggtagatcagtaatcagccataacatgttttgtcgagctcacaagattggaatctcccgctag

SEQ ID NO: 46571 - DNA, 400 bp, Oryza sativa
  Clone ID: PAT_MRT4530_49424C.1
cgctgcatacatctatccatccacggagagtgtagcgccacacgccagtttactactcaatgctaatctgatcattgccggatgagaggatttgctgtacgactgggttgcatcgcattagttcgatacgtcgcatgtaaagaccataactagctctgatttgacggacaggacacgaatgctgaggatgatgattgggtgcagcacgccgatgttctgaggtcccctcttggtgcatgggtagcggtcagcccaccaccgtctgcgaagacaggtgcgaccaaactagcatggcgtttattgggcgtcgcggagtcaggcgggcgcctgcaaagtcgaagcctacgccaacttggctagtgccaagccaaaaaattcctgctccgtccaagatcctttg

SEQ ID NO: 46572 - DNA, 629 bp, Oryza sativa
  Clone ID: PAT_MRT4530_49425C.1
gggaaaaaaattggaaaaggggggttaaaaaggggggggaaataaaaaggggggggaaaaaccccaaaaaaaagggggggaaaaggttttttaaaaaaaacaaaattaaaaattccgcaaaaacccgggaaaaactggaaaaaaggtgggggaaagccccattttaaactaaaactttggggaagggaaaaacccccccaatttaaaaaagggggaaaaaaatttttggggggggaattgccccccccagttaaaaggggccccccaaaacggaatggggggaaaaccctttaaggcccgggtttggaaaaaagaaagggggggttttggaaacaaaggaattttttgggacccccttgggaatcaaaaggggcccaaaaaaaaaagggggggggaaaaattttaaaagggaaaaaacccccaaagggggggctttgaaaaggacaaaccggcccgggggaagggtccccggggtttgggaaaaaggggggccccaaaccatcccccccatttgggttgggaaaacccgggggggggaaaaaattggccccaaaaaaaaaacaaaggtaattgggggccctttggggggggaaaaaaaccaaagggttttaaaaagggcaaaaaccccc

SEQ ID NO: 46573 - DNA, 299 bp, Oryza sativa
  Clone ID: PAT_MRT4530_49426C.1
cgcacgcgtctgcgcactcgtgcgggcaatcgtgagcatcggggagcaccagcaagtgtacagctgctgcaagcagtgggcgccacaaatatgctattggacatactcactggaccagtgctacacattctacaggaacaaatgcaacgcccgtagcgccgtcagctccggcgacaagcaactctggaatgacagctgaccatacatccactccgtccataactgttattgcaggagcggggcgatcgatcacatgctgtgaggcatctacatgtagctacgagccacatatgcctgca

SEQ ID NO: 46574 - DNA, 812 bp, Oryza sativa
  Clone ID: PAT_MRT4530_49427C.1
gtccggattccgggtcgacccacgcgtccgattatggctgggttttcatttacatgccctgtacattggtgctttcattgtaaaggtctagaagacaggactcaagaaccactgcaatttgctgtttgcagacgctgcccaagatcgtatcatagaaaatgcttgccaagggaaatttcctttgaagatattaacacgcagggcatcataacccgtgcatgggagctttcaaaaagaattctgatctactgcttggaccatgaaatagaccttgatattggaacaccacccagagaccatataaagtttcctcatgttgaaaaatcagcttattctgcaaagaagaaagtcaaagaattagctgagaagaaaagacggatttgtgatgattcatatgtttctgaacctttacagaagcgcgcaaagttaaatgagaagtttaatgcaaaaggtgacaaatctaaaaaagctggtgtgaaaagtgaatttgaggaagttcttgaatctgaaaagaaaaaaacaaggagcctgaaaaagagaacacagcctgaagaacctttggttgagtgtgctgctgctgctgctgcaaacaatgcaaatcgacctgtgaaagaacgagaaaaagaattagggacttcatcgttggatatggggaagatacctcttagctctttccctattgtggatagtgaaacggagaagaggtgagtcagttggatatattgtttcatgtaaacagactataacagcgagggcaacagaatattttttcttctcctcaggcaaatatgttagtggttggtgatggatgc

SEQ ID NO: 46575 - DNA, 212 bp, Oryza sativa
  Clone ID: PAT_MRT4530_49428C.1
caataaaagctggttgggtgaccgtctttcctataaaatgtgagaaatacaacaatgatgcaaacttgtctgaaagattgggtttgggagacaacaaacaaaacccaaattcgatggtggagaatgatcagtgatacatttgagtcggacatagagtagaagccttgtgtcagtaatgggtttccgagttacgaagcaacttgaattttcca

SEQ ID NO: 46576 - DNA, 345 bp, Oryza sativa
  Clone ID: PAT_MRT4530_49429C.1
atgggggccgtgtctatgcaccagaggatgagaggtggttttaccaatattatggacgccacggaagacaacggcacgcggtggcgcgcggccggcggcaggagaggagggagcaacgcgcaaagaccggcgaggcgggcagggagggaggatgcagggaggccggcgatggccgagcgctgtgggtgggggcttgatggcgacgaacgaagggagaggtgcacagccgacggcggccaacgggagagggagcggcgaccgccctccgccgcaacctgccaccaccaccgagctcgtcagcgaccgcccaccggagcgaggaggacgacggccggcaacgggtga

SEQ ID NO: 46577 - DNA, 532 bp, Oryza sativa
  Clone ID: PAT_MRT4530_4942C.1
aattaaaaacgtcgccagagcaacacactactgatgggaaaaaaacgctctgtgccagttttcgtagaagaaacacatgatgcacctccatggctcgcagggatggatgatacagtgaaaccacaaaagcacttttagcatctggcctactgtgtgagtgaggcacctcactgggtacagaggcctaatggacccctacgaatgcgatcttttttctttatcctcacctacgaaagtgtgggtcactggcttgcttggatagggcagtcttatgtcatcaaaaactttgggggccaagcgctcgttggccctggtgaacgcatcaatgttgtccttcaactgaaccttggccagtgatccgatcattgcgctagctatgaatggacgctgacgcacatagaccatttccagctggactgcccataggccgagcttcttggcatgcttgacatattcattcgatgattacttaggccacgatgcattgcagcgcttcatgtatccaaggatgagatttagcctgatcttcttt

SEQ ID NO: 46578 - DNA, 1866 bp, Oryza sativa
  Clone ID: PAT_MRT4530_49430C.1
cccacgcgtgcgcccacgcgtacgcttcgccgagtctcgccggcgtacgccgcaggcgccccacctcctccggcgagccagctcggagctagacgcctgccctccccactctcgccggcggtgggcagcgcgggcggagcccctgcgttggccggacggaggtaggagatgacggaggcggcggggttagggtacgcgctggtagcgctgggccccgccttctccctcttcgccggcgtcggagccaggaagcccttcctcgtactcacccttctcctcacgccggtggtaggcgcgcgggtggagctcctgcgttggccggacggccgggggagtggacggtagcgacgatgctagtgtaggtggtagatgctctaagcaccgcctttctccatgttcgtgggtaacctgtatctagtaagcccttaccttggttctacatcctgctcaccatcactttattctggcttataagctcgataattctatcgggaatatggaggctatttctccctatatgatccagagctttgtggccagcatcaatcattgccatttcttctgttgcaatgtgataaaggatgcgatttttccttttgtcggctattaagtctcttagagtattggtcactcacttattctccatgtttattacttttaatgcgtatcacgataaaaagagaagtgatcaagtatttgtcccagttgttcatctgattgcttctgtaatgacactaatcaatcttgcacctgggggctgcgtaattggtacaccactattatgcgtcatgggtgcagtgacgttgcaatactgctggcaaatggttatcattaaagaattaaaattagcaaacaccaatctctctatggcgtttggcagcgaacattccagagcctaccgtgtacaccgagtcaccgagaaggccgcttaccctttttctctctctgatggtggtgggtggagccctatgttgcctagacggcgagatgagatgatggtggcgggtggcggtttgcaggtgtctgtcttccgcgagcttccgcttcccgcttctctgcgcgcccagagaggtaagtgtgtgtgtgtgatggcggcgttggtggtcgggagggcgcgtggcgggtggggattcgggcacgagcgggtcggcggtgggtcgccggatgacgcccggtgggacgcgaggaagaaggagagagcggcggaggagggcgtgaggtcgccggacctgaggaagaaggaggggtgggactttgggcagcgtcgcgtcggcggcgggtcgccggacgatgacaggtgggacctccggaagaggacccgaggttcgccggacgatgcccggtgggacctccagaagaagaggagggaggaagaggagaggaatggcggtgggtcgccggagccggagctggggaagaagaatgatgaggaggagaagaagaaggtggtggtggtggtggcgaggggggaagaagtagaagaagaggaggtgaagagggggaagaagtggtgcgccggcatgcgcgtgccgtgggtggaggaggggccgcacatgctgtacgcgggacccagtttcctcgccggcgctgcaccggatcccagctctctccccatcccctccttcggtcctcccagaaggaggacgagcagcagtggcggtggtgtggccgtgcgcgtcgcgctgatattcttggcgggcctcgtgctacggttacgtcagttggaacgtgtacgagttagtaggctagcgttgctgtgccttagccagtaggtatgcaattcttatccttacatctgttgcatttcaagaaggcattcctcttggcttttggaggctttacaagaaaatgggagagatgctggat

SEQ ID NO: 46579 - DNA, 1479 bp, Oryza sativa
  Clone ID: PAT_MRT4530_49431C.1
atggcaatcgcggtcggccattgccgcgagctgagtccccccggtggcggcgtccgcggccggcactgccgcctccgctccgtcacccagctagactgcccggtgttcgacgaccatgacctggacctggaccgccgagagcgcaacgggcacgccggcctgtcgccgcggcggagcctctcctcgccgtgcttctccaccgtcgtccctcccgccgccgaccgcgccgagcccgcgcgcgacgacggcgagaagatgatgccgcgcgtggagatcgtcgcgggcggccacgcccgcggggtgcacgagctcatcgcggaggccgcgggcgccatcgcgacggggacgcgcctcgtgccggcgcagggcgggatcggcggcgcgctgctgctcgaggacggccgctccgtcgaccacgtggcggtgatcaagccgctcctcgacgacgcgtcctcgccgtcccacggcggtggaggaggctacgcgagcaaggccgtgctgcgggaggtggccgcattcctcctcgaccacgacggcttcgcccgcgtcgagccgaccgcgctgatcaagatctcgcgacccgccatgccgacgaccacggcctcgatccagcgcttcgcggcgcacgagtgcgacgccggcgagctcggcccgtcgcggttctccgtggcgtccgtgcaccgcatcggcagcctcgacgtccgcctcctcaacatcgaccgccacgccggcaacatcctcgtcaagaagtcgccggagagcgagtgcgccagcggcggcagcacgttgacgccgctggacctcgtgccgatcgaccacgggctctgcctcccggagcagctcgacgacccctacttcgagtggctgcactggccgcagtcgtcgctgccattctctggcgccgagctggagtacgtcgcgtcgctcgacccgttccgggacgccgcgatgctccgcgccgagctgccgtcgctgacggaggcggccatccggatcctcaccctctgcaccatcttcctgcagcgcgcggccgccgcggggctctgcctcgccgacatcggcgacatgatgacacgcgagttctcggcgatggaggaggggctcagcgcgctcgagtccctctgcaagaacgcctacgattcctccaccaccaccgccggctcatcccctcggaagcaccaccactccgacgactccgacgacgagagcacccagttcggcatggacgacgtgcccgccgggctccctcctcacctcttcctcctcggcggcggcggcatcgccaagagcgtgagcttctccgcggcggagcagggcgccgccgggcgcggcgccgcgcggaagcgcatgtcgttcaaggcgctgagcggcgacgagtgggcggcgttccttgaccggttcgagcagctgctgccggcggcgctcgacgccaagaagcgcgccggcctgaagctcaccaggctgggcacctccttctga

SEQ ID NO: 46580 - DNA, 648 bp, Oryza sativa
  Clone ID: PAT_MRT4530_49432C.1
tgagcgcgcgtaatacgactcactatagggccgacgggctaccacgtcgtcgtcgtcgtcgttctcccccttcctctcggctcggtcctccgctccgtgacgccgcgattccaacccccctcatcctcgcctccggtccccagtctccgacgccacgagatggccgagattgagataaaaacagcacctgctgatttccgctttcctacaacaaaccaaaccaggcattgtttcacacgctatattgagtaccacaggtgtgtgaatgccaaaggggaagcaactgctgactgtgagaaatttgccaagtactaccggtctctctgcccagcagaatgggttgagaagtggaatgaacagagggagaatgggacatttgcaggaccactctaaatctcctgtttgagagtcttctcagatcagtccactgccctcgtcggtgtcactgctatcatctggtttgaatttatgctgctgcttttgttcttcaagcttgtgttgcaaagcaagagatccttttatatgtgttgcactaataatttagcatggttgcttgacatgatgtttcacagatctgtttattcacatgattttattcaaatataagcattttgatacttcaaaaaaaaaaaaaaaaaaaaaaaaaaa

SEQ ID NO: 46581 - DNA, 996 bp, Oryza sativa
  unsure (1)..(996): unsure at all n locations
  Clone ID: PAT_MRT4530_49433C.1
atggctactgccgccccgccggcggcttccggtgcccgacgcctcggccggccgcgggcggggctgcgcgtcggggcagtggcggcggcggagggcccgtcgtgcctgtacgtggggcccatcgagacggccagccaggagatgctcgaggcgctctaccatcaggccagggattcctactacagcggccagcctttgattgtcgatgacatgttcgacaaagttgagttgaagctccgggtttatggatccccatccgtagtgaagtatccccgttgcagcctcaagaggcaatcgacggtaaatgacatggttttaatcggattgggctatctgattggttatccgatttcatctgcatctgttggtgcactgcaaggcttgctgacaaacaatttggttgcactaaaaggttcttgcccaaattgcggtgagcaggtctttgcatttgtcaagacggataattccatcaaagctccccatagagcagaatgtcatgtctgcagctgcccactggagtaccgcactaaagttgagaaatccttgtcgggaactagaagaacatgggtttatggcagagtttatcttgtgaagcaagggcatccaaggaagcggaaatggttgaaagactaaggggcctgggcgagctgcgggtgtatggctgggggttgcttgtgaggcatggggcttccctggacgccggattggctgaaacacttttaggcctgtgcctcttgctgctccaaggtgcgtggttgtttctctgttctgccgctgttccgtgcttcggggtgactgcctcggtatgtttgccgatcttgctcttacggctccttgtgcgtttctgtttctcggttcaaccatgtatcttgtaaagtggtaaattccttggaaagattgccaaacatgaacaaatgttaaattgatgatgcagtattatgaataatggcgtnccttctcatatatttgttcattaaaaaaaaaaaaaaaaaaaaa

SEQ ID NO: 46582 - DNA, 744 bp, Oryza sativa
  Clone ID: PAT_MRT4530_49434C.1
atgccgggagcggcggcgggggatgaggcggcggcggcggcgggagggaggcggccgacggcgtcggagcggcggcgcatgtaccgcgacctggcgcagtcgctgcggtgcggcctccgcgacgcgtccgcggggttctccttcctccgcctccgcggcctccgcgcgctcctccgcgccctccgctccgccgccgccgccgacgccgacgcccgcctcttccgccactcccaggccctccgcgacctccaagtggtgccggtgctgttcgagcacagcctccggagggcgcagggcgacgcggtggtgacggtggggcaggtgctcggcatctcgcccgccgtcaagctcagcaaccccgccaccgactccgaggtggcgctcgcgctccgggtgctcgagggttgctgcctcctctgccgggactgcgccgccgccgcgcatcgctacgacgccgtcaaggtacttctgaacattctgatgactcggggcacgcttgaacaaaaagcttgtctggacacccttttggcgttgatggtggattcttcagaaaatttgatggatttcaaggaacatgaaggactagataaaattggtgatcttgttaaggacacacaaagagatgacaatgtaagatgttcatgcgacctatatgtactaaagtacatcgagcggtttaatgggtcaggacttgcaaaaaaatcactcagcacaacatcaatgttttcaagcgacaattattga

SEQ ID NO: 46583 - DNA, 170 bp, Oryza sativa
  Clone ID: PAT_MRT4530_49435C.1
gcacgaggcaagatcgcaagaacgcaacaagagaggaggagattgatgtcgtcttcggctgtgattccgccgccgtcgccagagaggagggtgccgatggtggctgtgccggtggtgaccgacgatggaggcggagggcatggggcgaagggggaggagagtgtgagcgg

SEQ ID NO: 46584 - DNA, 1012 bp, Oryza sativa
  Clone ID: PAT_MRT4530_49436C.1
ccggccgggatccattcatccacccagcaaggcaatggatgcctctgaccaaggttgccggctgctcggcgcccagagatcgctgcacggcctcctcggcggcggcgccatggcggatgtggtgctgtggaggaggaaggaggtggccggctggtcgctggcggcggtggcggcgtcctgggtcctcttctattgcttgcctggctacacgctgctctccttcgtgtccagcgtgctcatgatcgtgctcgtcgtcctcttcgtctgggccaaggccgcgcggctgctcaacagcgccgtcgtcttctccgcccggcgccgccgtcgtcagtccgccaccgcccgcgccggcgtccgtctgtcgccagcatcgtccatccttcggctgcggtggcagggaaggggtgggggagaagcccattgtagatgggggatgggtagcgggcgggcggcgtccgtggtggtggtggtggtggtggggaggaagatgaggaggacgaggacagggcaccctcgccggcgtgctccagccggaggacgcgctgcgcgagtgatggaggatgacgatagcggcgacggcgaacggacgacgctgtggctgacacgggcgcgggcgatggacgacaatgatggcggcgacagcgaacggacggcgccgccgctgacatgggcgcaagcgcgggcgatggacgacgatgatattggtgacggaggacggacactggcgcggctaacaccggcgtcggcgccggcggtggcggactccctctctccgcggccacgccacgccgtagacgatgacgatggacgccgacaaggatggacgatgccggcgacggacggacgccggcgcgggcggtggcggactgacggcggcggcaccggacggagaagacgacggcgctacggacggaagaaacggagtggcacggaacgaaggaaattcgcgctttgacctggtgtcttgcatggacgccgttgctgacatgtcagcatgtctccccaccaatct

SEQ ID NO: 46585 - DNA, 1048 bp, Oryza sativa
  Clone ID: PAT_MRT4530_49437C.1
gaatacgccatcggagtacgaatttccttcgttccgtgccactccgtctcttccgtccgaagcgccgtcgtcttctccgcccggcgccgccgtcgtcagtccgccaccgcccgcgccggcgtccgtctgtcgccagcatcgtccatccttgtcggcgtccatcgtcatcgtcgtcgtcgtccacggcgtggcgtgggcgcggagggaggcgagcgcgacgcgagggctagcagcggggcgagtgtggccgcgagtgctagcagcggctgcggtggcagggaaggggtgggggagaagcccattgtagatgggggatgggtagcgggcgggcggcgtccgtggtggtggtggtggtggtggggaggaagatgaggaggacgaggacagggcaccctcgccggcgtgctccagccggaggacgcgctgcgcgagtgatggaggatgacgatagcggcgacggcgaacggacgacgctgtggctgacacgggcgcgggcgatggacgacaatgatggcggcgacagcgaacggacggcgccgccgctgacatgggcgcaagcgcgggcgatggacgacgatgatattggtgacggaggacggacactggcgcggctaacaccggcgtcggcgccggcggtggcggactccctctctccgcggccacgccacgccgtagacgatgacgatggacgccgacaaggatggacgatgccggcgacggacggacgccggcgcgggcggtggcggactgacggcggcggcaccggacggagaagacgacggcgttttcgttcgttcggtcacgggatggatgctgctcggcgctgccaacaatatggccacccgggcggatcgtgggcgtcgcccgcccgactagacccaacgcggcggccaacaatcgtgtccgtctggtggattcccacttcagatacatattggcgtccatcattccattgggcgacctgcatgcccaggccaagaattgggatccgcttaacaattgcacgccaatcaaacacaagagaatatcctacatctcttcatactga

SEQ ID NO: 46586 - DNA, 544 bp, Oryza sativa
  Clone ID: PAT_MRT4530_49438C.1
ccgggctgcaggaatcggcacgaggccgcgtcatcgttcgcagtcagctcggtcggtcgagttctcccttcttaacctcactcgtgctggatcttctcctctcgttctcccctcttctgctccgtacgtacgtgttgggtgcgcgcgcgttgtactggaggagctgaggaagcgattgatcgatggatcatcggtggtggccgcggcggcggccggagccggcggccatcgacatcacgtgggtctcgtgcaggggcgtcaggtcgtccgtccccttccacacgccctgcctctacgcctccatctacctgcaccacccgtcgccgtcgccttcgtcgtgcgggcgccgccgcccgcaccgcgtcaagaccgccacggaccgcgccggcggcgggaacccggagtgggacgcgccgctgcggctctacctcccctcctcctcctcgtcgtcgccggcgacgtcgagcgacaacaaggacgaggttctcttgcggttcgagctcaagtcggaggtggccgtgctcggggacgtgctgtccgcgac

SEQ ID NO: 46587 - DNA, 1431 bp, Oryza sativa
  Clone ID: PAT_MRT4530_49439C.1
atggatgtccttggccaaccatgcccggtattcgaactaaatgggggaacaaatggtagtctacgtggttttatcatcagatccctgccgacctgcttactgacaaagagtgtccccttcactttctcttgcaaaaccactaaggttgtagccgaaccatcagcaggcctaacggcagattttcttgctattcattctcgaggtgaagaacttgtttcgaaatttagtgctcgaggcttggttgaagaatttgtttgtcttggtatccaaccgctcacggccggatggaatatttctctagggcagatgctgagcgaagctacttcgactttgcctccctttgaggttgatttgaacattgttatccctgcaaacattgtccgcccctgccaaacatatcttggtccttataccaaagatgagcacgcgaagtaccaaaccttgcaaaatggttcaaggatgaacagagtgatgtctgcccttggactcgagatccctgctcgagttcatcctgagattgttcttgactcgggcaagaaaaagaagaaaaagaagaaggctacgaggaaatcgtcctctgatgaagacgatgttgaagttgaagaaaacaaagaaaatacagataatgaaggtaatgatgggaacgaagagctcgggagaatgaagaaaatgaggggaatgaatctggcgaagacagctcgagcagtgatgtttccaacaagcttaaaatatattattgagaagcacagtaccatgtggcaggatgagtttgtttcagcatatgacaacttcaagagggacatgattgatttgcatgcaaaaagaacatgtgatatgatttctgacataagcaaggtcaaggaaggtagatgccaaagagttgataaattgatttgcaattccgagaagtttgtgtctgaaagctgtgtaaaatgggtgaaatcaatcaacaaggagcaaaaacttcctaaactagatctgttctcatttaacataagttactttttttttgcctcccaccccatcaagttgttcttcccaattgtacgtgacaagcattgggtgctgacttgcatcaaccttttgtgggaacaaataaattactttgattcaatcaagaggggtgatatttctcagtggttcatactgtctcagaacctggtcacaaatttcaccaaggttgcagtggatgctaaaattccaatcaaagatatatcaaagtttcaaacttgctctcctccacagtatccagtacaaagcaatttgtttgattgcggtttcttcagcttgagatacattgagaattgggatgggaaaaacctgcaatcattcaatgaaggggacatgcctaactaccaaaaattcatgacacacatgatggtttcttcgcatctggctaaagttgaccatgatcaacttcaagcaaattag

SEQ ID NO: 46588 - DNA, 4473 bp, Oryza sativa
  Clone ID: PAT_MRT4530_4943C.1
atggccgagcaaggaaaagcgcacgacctctctccgagtgtgagcggcgacgacggggagccgaatccacgccgtcgagctcgtactcccccacctcctccgcgccaaagccctaagcagggggaggcgcttgagagggtcgacaaatccgtggcatcaccagccgcgggtgatgcaggaaaacggcgagatggggagcgtcgcctcctcgtctacggcgacggcagcacgcctcagggtgcgcttcaggctgctggcgcgctcctacgacacccgccggtcgtccatgacccggagtctccagcccaacgatggctggaagacgtggccaacttggtcatgacggcacagcagcgcctgggtgctggtggacggtccgccaccaccaggacctccggcgctgctaccaccggatccgtgtcgtcaaggcggagggcgcggcgagcggcggcggctgcacggcattcggctgccactccctcgtcgacaccttcgactcgggaggatcagcatggggagccggatgcccgcctcaacatcgagcgtcggcgtaatagccggcgtactccccgtgcaacggagggcgcctcctcgtccagagtgtcacctcgacatggacgtgaggatcagccctccgtgcccccggctggtggtgtcggctgtagagcctttgtggcgagtcttcggaatgtccgttggcccccaaggttccggcccaccatcaccgagaagtacgatgggagcgtcaaccccaccgagtttcttcaggtctatacgaccgggatcgaggccgctgggggtgacgacagggtcatggcgaacttctttcccatggccctaaaaggacaggcgcggggttggctaatgaacttgccacccgcgtcggtccactcctgggaagatttgtgccaacagttcaccatgaacttccaaggcacatatccgcgcccaggcgaagaagcggacttgcatgcagtacagcgaggcgatgatgagtcgcttcgctcgtacattcagcggttttgccaagtccgcaatactataccatgcatccctgcacacgcggtgatctacgcgttcagggggggcgtgcggcacaaccgcatgctcgaaaagatcgcttccaaggagccccagactaccgcggagctttttcagctcgcggaccgagtggctcgtaaggaggaagcgtggacatggaactcctccggttccggagtggcagctccggccgcccccggatccgccgctcagacagggcggcgtgacaggaggaggaagaagaggtcggaccgttccggcgacgagggtcatgtcctcgccgtcgagggcgcttcgcgggccactcgaaaggggaggcctgcgagcgacaaaaagaaagaggctggtactcccagcagggagcgccccgccggcaggtggtgctccgtccacaacacctccctccacgatctcgcggactgtcgtgcagtcaaaaatctggctgagcgaacgaggaagtgggaggaggacaggaggcaggaacgccgtgagggcaagtccccggcggttccttccggcaaatggcgaagtgaggccaagcagaaggcccccgctgttgacatcggtgatggtgatgatgacctaggtttccaagaacctggggccaccattgccaccgtcgatggaggagcgtgtgcgcacgtctctcgccggagcttcaaggctatgaagcgagagcttctggccatggcccctactcatgaggcgatgcgtcgggcgcggtggtcggaggttgctctcactttcgaccagaccgaccacccaccgtgcattgcccggggagggcaggttgcgatggtggtttcccccaccatctgcaacgtgaagttggggcgtgtcctcatagatggaggagcggctctcaacatcctttcccccgcggcctttgatgctatcaaggccccggggatggtgctccagccgtctcaaccaatcatcggtgtgacgccggggcacacgtggccattaggtcacatcgacctaccggtcaccttcggtggacccgccaacttccgcacggagcgggtgagcttcgatgtggcggacctcagtctgccctacaacgcggtcctagggaggcccgcgttggtgaagttcatggcggcggtccactacgcctacctccagatgaagatgccgggccccggtggtcccatctctgtccatggcgatcttaaagtcgcgctcgcttgcatggagcagcgcgccgaccgcctcgctgctgcgtccaagcccgagggtggtgacgagaggcttggcccctctgcccccaccgccccgaggcagcggatggccacatgcgacgaggtcccggaagacgcgctcatctacttcctgcgggcaaacgctgatgtcttcgcatggagaccagcggatatgcccggggtccccagggaggtgattgagcaccgtctcgccgtgcggccgggcgcaaggccggtccggcagaaagtgcggcggcaggccccggagcgtcaagccttcatccgcgaggaggtggctagacttttggaggccgggttcatccgtgaggtcatccatccggagtggctggcgaacccggtggtcgttcccaaggcgaacggcaagcttcggatgtgcatcgactacaccgaccttaacaaggcatgtcctaaggacccttaccccctgcctcgcatagatcagattgtcgactccactgcgggccaaataggacgtaatgttgaggcgtatgtcgatgacttggtcgtaaaaacgcgcaaccaagagaccttactctcagatctagcggaaacttttgagaacctccgctccgcccacataaagctgaaccccgataagtgtgtgtttggtgtacctgcgggcaagcttctcgggttcttggtctctgcccgaggcatcgaggccaaccccgagaagattcgagctattgagcggatgcgcccccccagcaaacttagggatgtgcaatgcgtcgccggttgcatggccgccctaagtcgtttcatatcaaggctgggagagaaggcgctacccttgtttaagctcctcaagcgctcggggccgtttacttggacggaggaagctgaaaatgcccttgcccagttgaaggcgtatctcagctctcctccagttctagtcgccccggagccaaatgagtccctgctactttacttagcggcgaccccccaagtagttagtgcagcgttagttgtggagcgcgatgaggataatcctcattctgcgcacccccactctgtgccgacttggcccgggagcaggcagggaggagaggcccccgagtcgaacggtggcctaaggcccccaacgaccggagtcggccctctgcccgcttgtcagacggtgccgggtgcccccgaccctcaggaaggccccgaggccactgcgggaaggccgcacttatcgccctttggccccgaggctaaccctgtgctgactcgacccgggagagagcagggagaagaggcccccgagccgaaaggaggcctgaggcccctgacgaccggagctggccctttgcccgcttgtccgatgacgccaggagcccccgacccccaggacggccccgaggccactgtgggaaggccgctcctgtcgtcctccgaccccgaggtcatcggcacagaagacgagtgcgtcctgaggggccacttggacgaagaacgccccgggggtacggcccctagcgaagaggatcggccccgccgaaaggtgcagcggcctgtctactttgttagtgaggccctccgggacgccaagacccgatacccacaggcccagaagatgctttacgctattctgatggcctcgaggaaactgcgccattatttccaggcgcatcgggtcactgtggttacgtcttaccccctcggtcaaatcttgcataatcgagagggtacaggacgagtggtaaaatgggcaatcgagctttctgagttcgatctgcactttgaaccacgccacgctattaagagccaggccctcgccgattttgtggcagagtggaccccggctccagagaccgtctcaatgcccgaggccagcacgaacccctcacagctgcctcaaaccgcccactgggtgatgcagttcgacggctctctgtctctccagggcgccggtgcaggggtcacgttgacctctccgaacggagacgtcctcagatacttggtccgtctcgactttcgagcgactaacaatatggcagagtacgagggactccttgccggactcagagtggcggccggactggggatccgccgcctcctggtgttaggcgactctcagctggttgttaaccaagtctgtaaggagtaccggtgctctgacccgcagatggacgcctacgtgcgccaaataagactctacctgaggaccgcgaagggagtgaacgcgtacaacgcatttccaaacgctatgtgctggtag

SEQ ID NO: 46589 - DNA, 401 bp, Oryza sativa
  Clone ID: PAT_MRT4530_49440C.1
gcaaatgagccatatattatgccattctttgggtatccttggtgcacttgcatatttggctgcgtgacttgctgagtatgtcaaatactcaccttgcaatcattcatcaaaggaagagttctacaatgatgttgatggtgtggaggattaggtgtagccctggtcaagctgcctgtggagtggagccgtctgcgccgtttatttattttccgaaaatcgacgaggagctgcggcaatgctgcgacgattgcaaccttcggtctcctttggcgtgcagactgcttgacaaacctgtaatccccttcggtcacctccacagaaacatggagttcgtcgttgtatctgaggagcttgagctcaatccgaacaacaaaattcaataatacactcggtggtttcat

SEQ ID NO: 46590 - DNA, 673 bp, Oryza sativa
  Clone ID: PAT_MRT4530_49441C.1
gctcagtccaagcgctgcttgcattggtccaggctaatccccaaatcttgcaggtgctaatataaatcaactcataagtttcttgttgcttttctttttctttgtagacattaaaatgccagtgcatatgctattttatgtgacttgagcaattctgttgattcacagccaatgcttcaagagcttgggaagcagaatccgcaaatcttgcggttgattcaggaaaatcaggctgaatttctccgtctggtgaatgaatctcctgatagcggcgctgctggggggtaagaaccaagagaactacaaaacatgtattatattctaattgatacacatacaatatttacattacattttatacgctctggtaaatcagaaacatactaggtcaactagcagccgctatgccacaggcacttacagttactccagaggaacgggaggccattcagcgggtatgtttgctttatatgctattttggattttctaatgaaagacaattcgctgcttctgaaattttcacacctcagtttccaaatgttgacacttatgtccaatttgtgatttacatcaagaaacttacccaaaatactcattagtcctttttgaaagttctaaatttgaacttttgttttataaccattgaatggatattttaaattttatgaccag

SEQ ID NO: 46591 - DNA, 1978 bp, Oryza sativa
  Clone ID: PAT_MRT4530_49442C.1
cggagttgtcgatttctaatacaagttttgcagaacaatatggttgttgtaaggtatagtgcggaggctctatcagcttaccaacatgtcatcacccagacatttggtagcaaggaagaaatcgttgatttttacaacaattatgctcgtggaaaaggttttagcaccagaaaatgctacttggaaagaattaaaggcacgaagcaggtgtgcctaagaaagttggtgtgcagtcgacaaggtttccgtgaaggtaagcatatgaagagaacgggtagaaaaggaagagctcgaaacctgacttgtttgtgggtgtgaagcaaaactagtcatcggacttaaccaggaaacagggcggtggttcgtgaaagattttatggatgaacacaaccattgtttagcacatgttgatcaagtttgttttctacgttcacaccgtaaaatcagtgatgcacagaaggcagatatccttgaaatggaaatagcaggagtgcgaaaacaccaaaatatgaatataatggaaaaacaatttggtggttatggcaatgttggatttgtatcaagggatatatataagcaagaaaccatagttgatggtgatgctcaaacggtgttgagtcacctaagggcacacaggagagggatcatgatttctttttcatgtatgagatagataagcaaggccatttgaaacatttgttctggtcagattcacagtctcgtctggactatgatgcgtttggtgaagttgtggtattcgacagcacatacaggacaaacaaatataacttaccattttgtaccgtttgttggattgaaccaccatagaagcactgccatatttggatgtggcattgtttctgatgaatcaggagaagcatatgactggttgttgaccacctttttcacttgtatggctcagaaatatcccatatctgttatcactgatggagatcttgcaatgcaaagagcatttagaaaattattatatgattactgttcagcacatgagtttgagagcaaatggatccattttagggaaaagcatgaaattaccagcggtgatacttgttgcatcaaatgtatgagatgaggatgttacgtgctacaacatatcaagaaggactatgttatttaggcttgaagagtaaccaacgaagcgagagtttgagctcaacattacatactcatcttgatgggcagatgacataattccgcatgatgcatcattataaggaatgcttatccaatttacggcgaaatgaggcgaagctagatagtgaggcatcccaatctgtgccattcacggagttggatgcttctaacattgagaaagatgcagcacatgtgtatacacctactgtttttgcattggtgaaagaagagatatgtggtgcaaggaagcttacgatcaatgaaatactagatagaggagatttgacgatatatgtgatatgtctgagggaaagaagagagcggaagtttcatgttgattgttcattttcagagacctcgttggaaagaatttcttgctcctgttgtaaactgcaatgctaagccacaccatgtagtcacatattttatgtgtcccaggggttgccgttgcattgctaaacggtggactatgagtgcgaagtctgctttcccatccataagaaagagtagcatgtatgattggtaaaaaagcctagagaggtaccgtgatttacgcaatttgagcaattcagcatgtttcaaagcttctgaatcaaaagatttgtatgacaagatgaagcatgcattgcggaaagtaattacggaaagcagtgcatctaatgttaaaaggaagtctaataggcatgggcctataataccacaaagcttgcaagctgaaccattcatggaggcaaaggttcaagatccggttaaaattgctcctagatgtgctcctagaaaccatacaagaggatcaaggattaaggcctttcctgcaaaaagc

SEQ ID NO: 46592 - DNA, 315 bp, Oryza sativa
  Clone ID: PAT_MRT4530_49443C.1
atgcgcaacgccaccgccgcagcgccgcgactaccccatcaattgcccgtcgtagcgcctcctgcctgccatgtgccatcctgcgacgccgcctctcctccagcggccagcgcctcctgcgacgccgtctctccagcggccagcgccagcgcatccaacgaccattaccactcgccagcggccagtgcctcctacgacgtcgcctctcctccagatccagtccttatcgtccccatcctcccgcttgcttgtcccatccaccgtcgccactctccagcggccaacgcctctacctcccggactccccgttgctag

SEQ ID NO: 46593 - DNA, 3642 bp, Oryza sativa
  Clone ID: PAT_MRT4530_49444C.1
atggccggagaggaagaaggtggtttgacggaggcgagcacggtggctgcatttctcggcgttccctgggattctcatcggaggccgccggattcagtgttcgctccggtcaatcgccgccgcgcccccaggaaaacttgtattgttctctttgcctacttctttgtaacctctagaagcctgatcactttgcaaactcccattttgacctccaacagagctctggttagcatggagattatgatttctgctgtggcaggtgatcttatcagccggttcatctcttcggtagcacaaaattacagaaaccatatacgtaaggaggatgatcgtaggaggctggaacgcatcttgctgaggatgcactgtgttgttgaggaagcagaggggcgccacatcacaaatcaaggaatgctcctgcagctaaagggatttattgagggattctacctcggatactacgtgctcgacaagatcaagttccaaccccctgaagaagaaagcatcgaagatgaggtgagtcatgagattcagtcatttgccttgtcagcctgtaactctcgcaagcgctttcgttttgctgatgccataagaaaacacacaccaatagcctttggtagcaggagcagaacaaacctgaaagatgttgttgatggtttagaaactaagattgcagatatgagggaatttgtcattctccttggtagccaccctcgtctaccacgtcagccttacagtacatatctatacatagagaattgtatgtttggcagccgtattgagaaggagcaagtcatcaatttcttgctttgcaatgatcctcatgatccgtatgttagcattcttcctattattggcccaccaaggattggaaagaaaactcttgtgcaacatgcttgcctggatgagagggtgcgcaactgcttctcccatatatttttctttaaagaagacgatctgaagaccggagagctctcgcttaactccaaggcttctcaagggaaatatttgtttgttattgagttcatttgggatgtggatgaggcagcttggacaaaattccaatcatatttgcagaatatgcccggtattggaattaaggttgtagtgataggtacaacagaggacattgctaagtttgggacaacccaacccatcagggtgaagaggccatccgaagaagagttttggtactacttcaaggcacttgcttttggaagtatggatcctgatgaacatccgaaactagcatctctggtcatgcagctagctactgaggtgaatggatcatttctttctgcaactatatatggtgaactattaagagctaatcctaacactcaattctggaagagaatcttattattcgtaagagagcttgcacggaagcacttgacttcctctggtctacaccctgacgatcttttcgaaagaaatatccctgtcgatatgagcaggatagccgttgtggatggtcaagttcaaggttgcctgctttatgatgttagggtcgctggccctgcagatggtgagctaccaaaactgacatcacgagacatgctactgggttgtgatattcctgtcgaagataagtttgatgtgctggtctggagatctcgcattccaccctactgtaactacatagttacgtatgagaaacgaaaaccgcgacgcatggttcctgacaggaacgcggtcctcctctggatgatgagtgtcctaaagatccaccaccatcacaaactgaggaatgtttttccagttcaaggggcctatggtagagaaaagggcaggagctctgccgtgatgcattatagaagaaagatagcaaagactaaatgtggttacaaggcacactacatgctgagacgtcttccaaatagatgttgtgttgagatttctgagaattggtttattttgcagaaaaggggacaaacaaagaaatactttcatggggccctggctactagaacaaattattctagaagcctgggtcactttgcaaactcccattttgaccatttgcttccaagcagagctctggtgagcatggagattctgatttctgctgtggcaactgatcttatcagccggttcatctcttcggtaacacaaaattacagaaaccatatacataaggaggatgatcgtaggaggctggaacgcatcttgctgaggatgcactctgttgttgaggaagcagggggacgccatatcacaaatcaaggaatgatcctgcagctaaagggacttgttgagggattctacctcggatactacatgctcgacaaaatcaagttccaaccccccgaatatgaggtgagtcatgagattcagtcatttgccttgtctgcctgtaactctgccaagcgctttcgttttgctgatgccataagcaaacgcacaccagtagcctttggtagcaggagcagaacaaacctgaaagatgttgttgatggtttagaaactaagattgcagatatgagggaatttgtcattctccttggtagccaccctcgtctaccacgccagccttacagtacatatctatacatagataactgtatgttcggtcgccgtattgagaaggagcaagtcatcaatttcttgctttgcaatgatcctcatgatccatatgttagcattcttcctattattggccctcaaaggattgggaaaaaaactcttgtgcaacatgcttgcctggatgagagggtgcgcgactgcttctcccatatatttttctttaaagaagacgatctgaagaccggagagctctcgcttaactccaaggcttctcaagggaaatatttgtttgttattgagttcatttgggatgtggatgaggcagcttggacaaaattccaatcatatttgcagaatatgcccgctactggaattaaggttgtagtgataggtacaacagaggacattgctaagtttgggactacccaacccatcagggtgaagaggctatctgaagaagagttctggtactacttcaaggcacttgcttttggaagtatggatcctgatgagcatccaaaactagcatctctggccatgcagctatctactgagatgaatggatcatttcttggtgcaactatgtttggtgaactattaagagctaatcctaacactcaattctggaagagaatcttattattcttaagagagctggcacgaaagcacttgacttcctctggtctacaccctgaggatcttttcgaaagaaatatccctgttgatttgagcaggatagccgttgtggatggtcaagttcaagatttcatggtttatgatgttagggtggctggccctgcagaaggtgagctaccaaagctgacgtcacgagacatactactgggtggtgatattcctgttgaagataagtttgatgtgctggtctggagatctcgcattccaccctactgtaactacatagttacgtatgagaaacaaaaaccgcgacgcatggttggtaaggggatcgcgagccaccgctgcactttcattctactagacaaagtcgtaaaaatgaaaacttctcacatgcatgctggtaggatgtctaacaataagtctttagtgggagatgatggagggaggagactttggtggaagatgatgatggattga

SEQ ID NO: 46594 - DNA, 978 bp, Oryza sativa
  Clone ID: PAT_MRT4530_49445C.1
atgaggattcggggagacggcggagtttcagatgtcgtccccgtcgcgtgcagggcggctgcggatgctggcatcgatcggtgtgcgtcaccaatttcaggtgaggaagaattaggaattaaagatgatgttaaggtggtcattttcaactttggagacagggaaaattggatatggcactgtggctgcacatatcctccggacactgctgttggcaagaagtatatttctggcaagataaatgctaggatatcaactacaagggctccagggagagatgtcggaattcctgactggtattctgtgtctgaaaagaaatcggtgttcgtccagcaccaacatatcatgaggttaatggaatgcagagtctttatcaggactgttggaaatgatccaaggagccctgagaagcaatctcgagagagggttgtgcttctgttttctttgattgggaggaggaaatatatgttgcaagagcacctgacgtttagatgtcatgggtggcatcgcagattattcaggaagtcttgtttacaggtatcatttggttctgaattgagtaatcgtgaccaacctttgatatggacctgtctgattttatggatgatgggctgcatatgttgctggaacaaccttgtgttgatgaccgagctaggtgtggtcttcacagacagcatgagcttctggtctaaatatccctccacggatcttgccatactctgccaaaagcctgcagaagtgaaagagttggtcagcattccaactcacttcgattttggggtcttgactctgggatacgacataggttttatgactttggcaaaatttcgatatgaagctgtttacgcgagagatattccagagatcataaccggggagcatttttggagaaattcagaagagatacaaagctgctaccgggtactaccaattgttttcgagggctcatctccaggtgcaggcaagtttggatactga

SEQ ID NO: 46595 - DNA, 1347 bp, Oryza sativa
  Clone ID: PAT_MRT4530_49447C.1
atgaggattcggggagacggcggaggtgatgaggaggaggcggcgatggcggtggtgtcggcgccgccgcagcatctggtcttcgcgtactacatcaccggccatggcttcggccacgccacccgcgcgctcgaggtggtgaggcacctgatcgcggcggggcacgacgtgcacgtggtcaccggcgcgccggagttcgtcttcaccaccgagatcagctcgcccaacctccacatccgcaaggtgctcctcgactgcggcgccgtccaggccgacgccctcaccgtcgatcgcctcgcctccctcgagaagtatcatcagacggccgtgatgccacgcgaatcgattctgaggactgaggtggaatggctcaacacgatcaaggccgacctagtggtttcagatgtcgtccccgtcgcgtgcagggcggctgcggatgctggcattcgatcggtgtgcgtcaccaatttcagctgggacttcatttatgcagagtatgtcgtagtagctggacatcatcatcgctcaattgtgtggcagatagcagaagattattcacattgtgaattcttactacgactccctggatactgccctatgcctgctttccgtgatgtcattgatgttcctcttgtggtgagaagattgcataaatctagatctgaggtgaggaaggaattaggaattaaagatgatgttaaggtggtcattttcaactttggaggacagcctgcaggatggaaactgaagaaagaatggctgcctgatggttggctctgtttggtatgtggtgcatctgaaactcaagagcttccaccaaatttcattaaacttgcaaaggacgcctatacacctgatttgatggcagcatctgactgcatgcttgggaaaattggatatggcactgtgagtgaggctttggcttacaagctgccatttgtatttgttcgtagagattatttcaatgaagagccgtttttgaggaatatgcttgagcattatcaatgtggcgttgagatggtacggagggatttacttactggacactggaaaccttatctgcaacgtgctatgacacttcatccatgctatgatggtccaataaatggtggtgaggtggctgcacatatcctccaggacactgctgttggcaagaagtatatttctggcaagataaaattgagcggagcaagacgtttgcgtgatgccatagtgctaggatatcaactacaaagggctccagggagagatgtcggaattcctgactggtattctgtgtctgagaaagaaatcggtgttcgtccagcaccaacatatcatgaggttaatggaagtgcagagtcgtaa

SEQ ID NO: 46596 - DNA, 367 bp, Oryza sativa
  Clone ID: PAT_MRT4530_49448C.1
ggccagcggcgccgctcccggctgctgccgcctcctgtcggcggcggcggggacggtgttgatccggctagtgtgcgtgcgcgcggggccagctgcgcctctcccggccgcctcctcctcctcctcgtcggtgggggcagggcacgtgcacgcggggccagctgcacctctccaggccgcctcctcctcgtcctcctcctcgtcgttatcgtcggccaaggacgccactcccgccctcaacggcagtggcggcggcctccgcgctcccgccggcctcccgctcgagcccgcctctgaagcttcgcgggggagggcgagggagccgttgccttcgccgtcggtcggtgccgccgacacccgactgtga

SEQ ID NO: 46597 - DNA, 1519 bp, Oryza sativa
  Clone ID: PAT_MRT4530_49449C.1
cccgggctgcaggaattcggcacgaggagcagacgccctcctcctccctctcctctccccacccatggtgttatgaggagaagaatactatgatcctcttcttggcttcttcttgcatcccctcccctcacatgccaacaacaaccccctcctccccctccattcgccacccctcctgcttccatccatggacgccactccgtcttcttgattgctgattagtcagctgcgctgcgctgcgttctccttgtgcttgtgcttgtgtgtgtgagagtgttcgagcgaaggaggggaggaggcaatggcggcggcgaggaggctgtcggagctgctgcaggagcagcaggagccgttcctcatcgaggccgccaagatcaggcggctgcggcgcggcggcggccgcggtggaggtggaggtggagcgtgctgccccgtggccgcgtgcaggaggctgctcaggctctgcaaccacgggttcaagaagaggcgaggctgcggcggcgtcggcggcggcggcggtgtcggcgggggcggcgtcagggggctgaggtcggcgctgagcaaggcgctgtgcggcaaggccgtgaggagggtgctccgctgggacagccttggctgcttccccggcggcgtcgaccgcgagttccgccggctgcggcggtccaccggcgacagcggcgagtgcgacccccgcgccatggacttcagcggccacagcaacgacgagcggccgccggggaggtggaaggcgcccggcattggcatggacatggacgtcgacgagtcgtcgcggcagctcagcccggtctccgtcctcgacctgcactccgacgacggcgactctcctgtgcactgccgctgtaagttctctgacctctacagggaggatgcaaagccctcgacctcagggagctcgccaccatccgagggcttcatcggcgccacctcaccatgcttcacctacaacatccatggcaagatcatcccaatggaggtagaagaagacgaagaagaaggcgacgaggaggaggaggagatggccagagccggcaagtccatcgagcagcagatctcctcgtgggagaggatcgcagaggacatctccaacatcccgagaatggtggagatggacttctcccagtcgatacaacaatggggcgagctcaagctcgaggcagccatggagatcggcacgaggatagagaccctaatctttgatgagatcaggagagaaaccgtctgtgacatgcttgcttcacactgtaaggagtacaatatgaagaatacaaacttaggagagttgagtggtatcagggccggcgcgagggcggcggggcacggagggcggcgcgtggccgccggcggcggcctgcggcggtggcctggcggccggcacgagggcggcgcggcgcgcggcgaggcagtggccgccggcggcagcctacggctggggcctggcggccggcgcgagggcagcgcggcgcgcggcgaggcggtggccgccggcggcggcctttga

SEQ ID NO: 46598 - DNA, 1151 bp, Oryza sativa
  Clone ID: PAT_MRT4530_4944C.1
aaaaggttttataaaaagaaaatcctaaaagaagttcttttcccccccctttttccctcttgggccggcacggcccattccctccctctctctctctctttccccccggcccatcggcctccccgcgcgcgcgcgtcgcttacaggcgggcccgcccgccgctctcgctgacgggtgggacccacctgtcatcgccctcctcccgccgcgcccgccgccgcgcccgtgccctagcgccgccgccgccgcggattgcgccgcatcccgccgtccccgcgcgcattaaagagaggggaatcactccccgtgattccctctcccgtttcccccgattccccctctctctctccctcggattcgttcgaatcgtgcccgcattcgtcgccggcgcaatcaatggcggccgagatctccgcggccggtttccttcctccccggccgccttctctcccttccgacgctataaaatcgttgcccgagctccgctcttccgtttccgccgttcaccgctcgctctcgccgtcggaatcgtgctcgcgccgtgctccgctctctccgccgtcgccgccgagctccgtcccgccgccgccgccgctccggacttcctcctgactcggcgacccctccatccgcttcgccgtgttgccgccgaccccgtccgccgctccgcttcgcccgcagaccgtcggagcgccgtcgccatcgtcatcccgagccgcgccgccgtcttcttccgctccgtccgccattctcgtcgtcgtcgttgtcccggggtgagccgtggaccgtccccttcgtttcccccttccctcctctctctcgggtgccactccgccgcgccgttggtcgccggcggcgaccatcggggcacgggtgcgcgccgctcccgtcggccgcgccggcgaggccgccctcgggcgcgccctcgcggctgccaagtgggcccggccgtcagccgcccgcgcccgtgggtgcggctgacgcgcgggacccacggcgccgaccgccgccagccgcgtgcgcccggtccaccgtggaccgagcggctgacgcgtgggccccacttcccgtggacccggtccgcgcgccccctccctcggcttgttcaccctagattaaacaaaacctcaactagtggacactctactcat

SEQ ID NO: 46599 - DNA, 279 bp, Oryza sativa
  Clone ID: PAT_MRT4530_49450C.1
tcgctgatcatccaaagcgctatgttttaggaagctcctcacactacctgtcagcacagatgtatccatagatggatccactgatgctcctgctcaaggttttaaactatacatacgatgtacatgccgcatcaactgtcgtttacgcaagggtctacgacctgtctggtatcatcaacgttgacgccagtctggccaccctcattggtgctgcagcagaataagccgatgctagcctactctctcttaatgacacgagctcggttttctggtgacacc

SEQ ID NO: 46600 - DNA, 1668 bp, Oryza sativa
  Clone ID: PAT_MRT4530_49451C.1
atgtcggggtaccttcacggcttcacccagaactcaggactttggttagtaaaacgccatggcacaagaaactctggacgccttgtcgaacgtaaacctggtagcattgttgaacgtgctaattgcatgctaatcatggctcatggggaagacctcgacctccaagctgcggaggccgcggcgccataccatgctctccagggcgatctgcgcgaacacgacgaggcgtctggccgtcgttgctcccaagcttgcctcctgtggacacttggtttgctggggctaaccatgttcctttccacgttcgccttcttctccaccacgacgcggccggcggcgacgcccacgctgggcgggaggtactaccacgaccacgacgccttctccgtcagcatcgccggctacgagggcatcgacccgggcagcgcgggcgccgctgtctcgccggcgttcagggtgacgctcgggacggcgaacggcgcgtgcgtcgaccgcgcggccgtgaccgtgctgtactcgggcgtggctctcgggtgggcgcacgcggagccgcgcgactgcgcggcggggcggcgggagagggacgtggaggtggtggcgcggggccagggcgtggggctgtcggagcgcctccgcggccgcatggcctcggagtggcgttcgtcgggcgcgctggtgctcgacatcgacgtgaaggcgttcgacgaagtcacctcgccagcctacgctgccagacacgttcctgacagattaattatttgtaaagttacgttggatgagcaaggatccgactcgtcggcttgcccgtgttccaaccgaattatggccttgattacgtttgtgcatagaagttcttgtcccttgcgaactactaccatgataaccatgaacaaacaaattaacgtgctcgatctactttttgcaataacaaacgtacgtgtacccatcaaaagccaagtctggtacgctacgtcctcgattgatttcgatctatatctccctgcctctcctgttcgccgaggtctcatctacttgccacccatgggcgccggcctcgttgaagatgaggatcgccgccgcgattgcctggacggccatccgcatatacaatgcgctgtcacggtgatccttatggcgatttgcttagcgctcccggtgtacgggtgctgggctagcgtatacggctacaagacgcccgatttctgggtgaaggtgcccggcatcgaggggctcgagaggggccccagcgcgttggccgcgcccgtcttcaacgtcaccctccgcgtcgataacgaagccacgcgccggccgttctgcaccagccgagccagcgcggcggtgtcgtacgcaggcgtgcagctcggccacgtcgacctccccggcgggttctgcgtgccggggcaggtggtcagctccgtgccaatcgtggcgaccagcgacggactggggatacccagcgagctctacgagcgtatggagagccagcggcggcggcacgagcgggtgtcgttggaggtgcaggtgagattggatgattgctgcggtcaactacctgtgatgctgtggcgcacggctgtggtacatggccagccacaggggccattcctttgcaaggtctcccctatgttgaaggatggcgaacctcgtccaccaagattatattactag

SEQ ID NO: 46601 - DNA, 535 bp, Oryza sativa
  unsure (1)..(535): unsure at all n locations
  Clone ID: PAT_MRT4530_49452C.1
cttgtgttcggtgtttttttttttttttttttttttggcgggagggagaaggcaaagattgcacaaccttggggtttgtccaaatggggcgcatctgagctagcttactttactttcttacgtaccgacataaggtgggtctctttctcttgctactcggggaacgccggggttccccttcttttgtttctccccccttgnaaggtttanaaggcggcaatggcggcggcggcggcgcccttgaagaggaggaaggagaggccctcgagggaaaagtaaataaaggtccccctggtgtgggtgaaaaaccacccaaagtttgcccccacccccctttgccaccccaccccgtacctttgtgcgacctccgccttgttgtgtccggcgttggcccggcatccggccccgtcnaaaaggtccgcgcgcccgcgccccccgggccggggccgccgcctgcttccgccccggtttgtccgtgtcctccccccggcccttgcccttgggtttttggccggcccctggggccccctcccct

SEQ ID NO: 46602 - DNA, 1110 bp, Oryza sativa
  Clone ID: PAT_MRT4530_49453C.1
atggagaagggtgatgaaaccctagccgccaagaagacatgccttatgtgtggtgctgccggcgccggcggcgacgttaccgccgccaccgctgacgggcatcccgccaagccctacgccgccgtgaaccccaccaattccgataccgccaacgccgatcagatcgagggcctccgcaccaccatccgcgacctggaggagaagctcgccgctgccaacaccatgatcgaggacctgaagcggagctcttctgccgacacgatggagcaaaccaaacaaccccttagttgcgcgaggagttggtcgacctgcgggaaatcttccaagcagagagggaggaacaactcgagcgtaactccggtcttctcgctggcggcaaggtctggcccgaacgcatggtgtggtgtggcccaggctccagtcggaggtggatgccgtcaaggagagtgtccaaacttcttcagccattctgataagggtaaatttgatccataccattgtaaatgtgtctattcagataacatgcctgaattttttgctgccgatgccacaggaaatccgcgcgaagcaccagaagaaggacatggccaacgagcgccccctcatcttgttagacttcatgttcctcaaagccatccttccgacgctcaatgtctcaccgcgcaaccccctgaccctcaccggcgcaacgttgtcgcggcggcctttgctggtggcagctcttcacctgcaccacttcaagttccggttttccagcaggaatcgactggcaaaggcaaacacagtaatcagcttcaacaacaattctgttgcaccggtggccgatgccctgatctccttcaacgactttgtagggtcgatagccaggcaggcgttggcggcgatgggacatcatatgtctggtggtatcctgtagctggatgctccccagcagaagctgtactttgggcccttctcaaccaaggtccccctccaccttccatgcgtaaccatatcaacttgctcccaacggccttgccgccgcaggttgggatggccatggacaaaggaaaggctcctttgattgagcttccatatgggatacccatggatgacttcctcgtcggataa

SEQ ID NO: 46603 - DNA, 351 bp, Oryza sativa
  Clone ID: PAT_MRT4530_49454C.1
atggcggcgagcaggatggggaagacgctccggtcgaaggcggcggaggcgccaccgccgtgcctgttccgcttcttcatctcaaccccgcgagttcgattcgtggcggagctccggcgaggccgccgccgtgagcgccgtcggcgggcgccgcctccccctgcgccgagttggccgcccatcccaacgccgagctcgttgctcgtggccgtgggtgggggtgggtggggtgaggacgtcatcgccggtggaggtagaggaggcaaggaaggaggcgcacgtgcgacgctctttgctttcggtgaaggcatcacggcgcccaatcgagacgcgcaacgtttcgccacctga

SEQ ID NO: 46604 - DNA, 195 bp, Oryza sativa
  Clone ID: PAT_MRT4530_49455C.1
acgtttaccctttttccccgtccgctccgtcttgggtgacggagaactcgaggtcgcccactgagatgtgcgctatacgagcagaggtgtggcgggcgacgagatgcggctcacggacaccaagctgctcacccggatgtgagccaaaaaggtgatgcggatcagtgatggtggctcttgacgcagcccggaaga

SEQ ID NO: 46605 - DNA, 288 bp, Oryza sativa
  Clone ID: PAT_MRT4530_49456C.1
atgtcgccgccatcagcgggaactcccgagccccgtcacatcgtcttcgttgctgttgtggtggatgcagcacgtagccatgacctggagctccagatctggaaaggaaggggtgggagaggggacaacgatggagctttggagagggggaggatgaggaggagacgctacccaaggaaggtgaaggcgtgccaccgcgtccagctcgaggatggggggcgacggcgcaggagagatggcggaggcgccgccgctacacaagggccaattccctatatgcccatgtaa

SEQ ID NO: 46606 - DNA, 126 bp, Oryza sativa
  Clone ID: PAT_MRT4530_49457C.1
atggttgcagctcctcatgacactgttgccgcatcggcaagctcaggggccttcttcagcgacatcgtcttcctctgctccgagggcttggctcacttttctagattgctatttgttggaatatga

SEQ ID NO: 46607 - DNA, 3115 bp, Oryza sativa
  Clone ID: PAT_MRT4530_49458C.1
cggtcgcgtggggccaccccctcactctcctcctctgctcttcaaccactggtgtgtggtgtgtgtggttctcttctcacaggtagaaggaagcaatggcgatgccgcccaagcccggcgatcagccctccccggggcggagccccaaccccaacctcaacctcccctgcccgctcccgcccatccctagctggggcggcgatggccacgatcaccttgaagccgccggcgacggcggcggcggcgggaggggaggtgtccgaggtggagctctcggaggcgggatcgccggatgtcggcagccagagcagcgggagcggtgggagcgggcggagcacggcggggtcctccgggtgggtgtaccacctcggcgtgaactccatcggccacgagtaccgccacctccggttcctcgtcatccgcggcaagacggtggccatgtacaagcgcgacccgagcaagaaccccggaatcgtcggggatgcatcgatagatgcgactgctatcgaaaatgcggcttcaattggtttggatgatgacaaccgtgtcatttacagtaagaaactgatcgtttctgcatttggggctgttctgggttgcaggttttctttggttctgctggaactgtatgtcttgcggttttacaatcggttggatcaaacaaagaaaggagagattgcatgtggggaccccggtgaagctaggaaatgggttgaagcatttgagcaggcaaaacagcagtcacaaaagatcttgagtggagccaagctcttacgccatataattatttacacctggaggcttaatcttgatgggcatcgaccacgtgtaaggagatatgcacaaggcttggggaaacttgtacgaattggtaaagggccagaaaagctcttgcggcagtcttcaaatcttcaaagccatgagataattaatacaaactttggaggcgattctggagatgcattcgaagcacacgaatggagatatgttcgaacatttaatggtataagaatttttgaagatattgcaaacacaaagggtggaaaaggggtacttcttaagtctgttggtgtggttggggcgaatcctgatactgtatttgcagtggttctcagctctgataagcataagcgatatgagtgggatatgctgactgccgatttggaattggtagaaacaattgatggatactatgacgtgctcttaagtatggagactgttttcaggtggaaaacaaagaaggattttgttttttccagacaatggtttcgtggacaagatggggcatataggcaactagctgtcaagtgtgttaacagcacatatagcagccgtcttccacgatatactttgtgttatggttcaaatgagttggttatgtgttcattttccccccttggtgcagccattttgcagattcctgcttgtcacaagaacaaacctccaaggcatggctacgagcgtacaaaaatcaattcctcaacatgggaactaagaaggttgaacccaccaggatcatcaactccgaaatgccttgttactcatatgttggaaatgagcccaagtttttgggatagatggaagagaagacataacgagaattttgacagaagtattgcttttgctttgctcagccaagtagcaggtctaagagaatactttgcagcaaatccagctttgacatctgatttgccttcaacagtagtgaagcccaaacagtctgattctttgatcatccagagtgaactggaagattctgaacttaatgatgaattctatgatgcacttgctagaggcgaatcctttgaagatgaggatagtgatgacgatgatgatatgattcctaaggctggaaaagtgaagttcaagaatatttcatgggctatcgcaggtcttgctatgaaaccgactaaaggtcataatcgtaaacacaagagacatttcaactcttcaagcactggtagacatcattttggatatcttaaggagaacataggtgataaaaatgtggtacacagaagggcgaggaagctgtccttcttaactatgattttacttctaatatgttctcctgcagcttcggttgagaagagtgaattggttacaaattcaactccggtaactattgattcaaaccatttccatggcacccttcgacgagcgaaaagtgagaatgacccaaactcttggagtgagcctggtggagagaagttcatgataagaggaaagacttacctgacagattacactaaggttgttggaggtgatccccttctaaagcttattgctgtcgattggtttaaggctgatgagcgttttgattcagttgccttacaccccaagagcctcgttcagtcagaagctgcaaagaagattcccttcatactggtcataaacttgcaggttccagcgaagccaaactataacttggtcatgtactacgcagcagaaaggcccgtgaataaagattctctgttgggaagattcattgatggaaccgatgcgttccgagatgccagatttaaacttataccaagcattgttgagggttattggatggtaaaacgtgcagttggaacaaaagcttgtcttctgggaaaagcagtaacatgcaattaccttcgccaggataactttctagagatagatgttgacattggttcttcatccgttgcacggagcattattggtctagtcctgggatatgtcacaggccttgttgttgatcttgctattctaattgaggcaaaggaagagaaagagctgcctgaatacattcttggcacagttcgcctaaatcgtgcgaatcccgactctgcagtacccatctaaagtcagttctatatttcttggctcaattatccttttctcccacagaaaaggtgggattttttttggcagatctgcttttctgcaattttctttattatctgtggttgcataccatttgtaaaaaagaaggtagcatcaatttcacatgtacagattacctattacagacatgatgctgtcgtacatacaaatagaggaaatgagcgtttatttatctccagtttgggaaaagcctcgagactagttctctccctcgtgccgattcctgcagcccgggggatcc

SEQ ID NO: 46608 - DNA, 242 bp, Oryza sativa
  unsure (1)..(242): unsure at all n locations
  Clone ID: PAT_MRT4530_49459C.1
aaagaaactgccatcagagaatggccacgattctcattggaatggtgtcaggaagcaattgatagtccctaaggacttgtgggttnagggaccctttgtgatctcgagatggatttgtacaagcgggtgatcatgatgataaaagcaaagggaaggaacatcgnctatagtgattggtgaggcgctgagagcctattgcataccgcaggcttgcttggggtttcccttaggaagaccgcttt

SEQ ID NO: 46609 - DNA, 2184 bp, Oryza sativa
  Clone ID: PAT_MRT4530_4945C.1
ttgaggagcttaaataggggtagtgccttctctcacagcctcgtagcgccgccgccgccgcgaatcccgccgctcccgtccgccccgcgtgcaatcaagaggggggaattaatccccgcgttcccctcccccgtttccccctctttcccctctctctctccctcggattcgttcgaatcaagcccgtaatcgtcgccggcgcaatcaatggagccgaatcttccgcgcgcgattcctccctctccggccgctctttccttcccccggcgctatttaaaccctccccgagctccgctctttcgtttccgccgctcgccgctcactctcgccgtcggaatcgtgctcgcgccgtagcaccttctctccgccgtcgccgccgtgcttcggttagccgccgccgccgctccgctcctcctcccgactcggcgacacctccctcggcatcgccgcatcgccgtcgacctcgtccgcgcctccgtttcgctcgccgaccgtcggagcaccgtcgtcatcgtcatcccgagccgcgccgccgtctccctccgctccggccgccgttctcgtcgtcgtcgttgtcccggggtgagccgaggaccgccgttcgccttcccccttccctcctctctctcgggcgccgctccgccgcgccgatggtcgccggcggtgaccatcggggcgcgggcgcgtcgctcccgtcggccgcgccggcgaggccgccctcgggcgcgccctcgcggctgccaagtgggcccggccgtcagccgcccgcgcccgcgggtgcggctgacgcgcgggacccacggcgccgaccgccgccagccgcgtgcgcccggtccaccgtggaccgtggggctgacgcgtgggccccactccccgtggacccgggcaaatgaaggctacacgagctgcggcccgatggctgacaatgagaaaggcaataaggtcaggagtcaggacattggtacctcaagctcccgagtgaatgaagcacaagacaccagttgtgcggcagtggtccaacacctgattaaccagaacaaattgcttatagagatactacagcagcatcggatgccaattttgaacccgagtcagatgcaacctcaggtgcagttggaggcagtccaagcactcacaccacaagtcagcgcaccgccaacatcccagaaggcccctcatgccatgccacatgttgacccaaaagaagcaagtatcatctgttttatgtgtgatgagcaagggcactacgcaaggaactgtcctcagcagaaaagaaaagcaccaatgcgaaccgaaggtgaagttcgtaagatgatcattaccagcacagaatggcctccaccaggaatgacaagacgtcagagaagaaacaccttccgaggtgcaccacagttgacagagcatcttttagctaatggaggtagagtgtctgatagtgaagattcagatcaagtctcctcagaagatgaagataaaatggaacgtaaggcatgctctcgttgtggagaaatcggacatgttgccagctcgtgtgcctctacatgcgttcattgtgaggaagaccatccacccgacaggtgtccaacgagcaggatcacttgtttcttttgtgaaggaactgatcatgtaccaaaagattgtcaattcagttttctgctgacgaagaagatggctaaccaacccgccggtttcaacggagagaagcatcaaggcaacaccaatcctcgccaagattacagtttcagcctaactccagtgccaggacagaggaatcaaaatgagaaaagaaaatgccgagtccgggaagatatctgttgcttcaattgtcaaggaatgggtcatttcgccgacaagtgcccaaaaccgagaaacatagctgccggcacgtcagtccacgcaactccctgcaatcagaagcttgctcctcaacgaatggtcatccatgcatcccgaagcagtcctatagcccgcgttgcaacagctccaattccaatgagtgcactaccacaaggtgtcaatgctcaatttcagccccagcaaagaattgtcgtagatggaaggagttgtgtctctccccgacctactccaggccgagccaagggcaatcaacctccggagggcgataccaagcagaagaccgtcatccgctgcaaccaacaatcagaaggaagcttctcctgtgaa

SEQ ID NO: 46610 - DNA, 620 bp, Oryza sativa
  Clone ID: PAT_MRT4530_49460C.1
tagactagctccataatctttattattatcttaaaaatgttggatatatgatttactaaaaatatttaaggtcccattagcttctctctatgcgtgaagattttctagctctgtcactctgtattagcagcctcctcatgtggctccggtggtaccaaacccgcgccacccccttttgtcaagccgtcatatcactgcctccctggcttcctataatcaaagctaagaatcattactcattgataagttggctttcaactacagaccttgatatgtaagtaaagtacttcttccgtcaagaaattcttgacgttctaagatttgtcaaccaaattatctttgtattaaaataactaaattacccctatttatttaattgagttgtcatttcaataatttatcatacactcaacatgttactaagaatccctacatataattaattaatgaattctttgaacactcgttaacaaatgacttgacagaaatggacagatagcccacttttctaatcaagttcgccactgtaacgacacgttttgtgagatattgttggagatgtagaatgactccttttctatgacggaggtagtagtaaagttgttggatttcaactccag

SEQ ID NO: 46611 - DNA, 358 bp, Oryza sativa
  Clone ID: PAT_MRT4530_49461C.1
aaaaattgtaaacattcttcttttttcctttttaatttttccaacattaacattgtcttttttataaccaccccccacatttttttacaccccccaaaaaatttactcccccatttttccaaaataaaaaaaatccccccttaacaaaccccaatttttttcacaaaaacaaaggatccttctccaaaaatctccctcttttcccccccttttttaaagtttaaacccccatcccttataatcctaatattctaaactcctaaaaccccaattttttacactacaaattacccataccattttttcttcttacccacttcaccttaccaaaacatatcctttacttttctttcccccc

SEQ ID NO: 46612 - DNA, 454 bp, Oryza sativa
  Clone ID: PAT_MRT4530_49462C.1
gctcgagactccctgttggtaatgaggtcgtgaagcttcttgctcctcgacattaccgggaacttgtggagatggaatgtcatgtcgccgacctcgatcacgacgtcgctggggagtccggtggtgcagaaccatgcttggcctttggagctcgattgctgctgctgctgctgctgatgatgatgatgatgatgattcttctcctccctggccatctccctcgcgctcttcatcttcctcccctgcatctcgtgatcctttggaagaacgaagcagacaacagcaatggcgaaaaaagaagaagaagaaaaaaaaaactctgctatgagctaaggcatttctcgggagaaaggaaggggtgtgatgtgtttgctcatttgctgtcgctatgggaatcagagaaggggaaggacaccagggagagacgagagacgagggagctctcaataatgaa

SEQ ID NO: 46613 - DNA, 354 bp, Oryza sativa
  unsure (1)..(354): unsure at all n locations
  Clone ID: PAT_MRT4530_49463C.1
gatccagcagttgagttgcactgagctcgatcgggttgatctagctgcgatcgaatcgatcacctgtgaaatcaaagcaggaacttggtagatcaggattcattcaggaaggccatggctttcgcgagcgcaagcaacggggcggtcaggttcaccgaggagcaggaggcgctggtgctcaagtcgtgggctatcatgaaggacgattccgccaacatcggccaccgcttcttcttgaagatcnttgaggtcgcgccgtcggctcgccatctgttctcgttcctgcgaaactccgatgtgccgctcgagaagaaccccaatctcaagaaacacgccatggccgtcttcgtcatg

SEQ ID NO: 46614 - DNA, 2152 bp, Oryza sativa
  Clone ID: PAT_MRT4530_49464C.1
atggggcagtgttacgcgaggaacgtgccggtggatggggaggggggaggaggggtggtgacgacgacgacgacgacgaccatctcggtgagcgcgtcggcggcgggggaggaggtggaggtggggagagggggaggagggggaggagggaggaggagcgggaggccgtcgccggcggggacgccgaggaggaggggggcgacgccggcgaggtcgtcggtggcggggagcccgtgggcggggagcccgctccccgagggcatcgcaccgtcgcctgcgccgtcggcgaccacgccgaggcggttcttcaggcggccgttcccgccgccgtcgccggcgaagcacatcaaggcgtccctcgcgcgccgcctcgggcagcggtcgccggccacggcccaggcgcagcaggccgcgaagccgcccgccgaggtcccgatcccggagcacgggggcgggggcggcgccgccgccggggaggtggagcgggagctcgacaagagcttcggctatgaccgccacttcgccgccaagtacgagctggggaaggaggtgggtcgcggccacttcggccacacctgcctcgcgcgtgcccgcaagggcgacatgagaggccaactcctcgctgtcaaggtcatctccaaagccaagatgacaacagcaatatcaattgaggatgtgcgtagagaggtgaaaattctgaaggctttatctgggcattcgaatcttgtcaaattttatgatgcatgtgaggatgcccttaatgtctacataatcatggagttatgtgaaggtggggagttattggacagaattttgtccagaggtgggagatacactgaggaagatgctaaagttatcgttgaacaaatattaaatgttgtttctttctgccatcttcaaggcgttgttcaccgtgatttgaagccagagaatttcctattcagcactagagatgaccattcacctatgaagatcatcgactttggactttctgattttatacggccagatgaaagattaaatgatattgttggtagtgcatactatgttgctccagaagtcctacataggtcatatagcacggaagcagacatgtggagtattggtgttatcacttatatcttgctgtgcggtagcagaccattctgggcacgaactgaatcaggcattttccgctcagtgctgagagctgatcctaattttgatgatgcaccgtggtcttcaatatctcctgaagccaaagattttgtcaaaagacttcttaacaaggattacagaaaaagaatgactgctgcccaggcactctctcacccctggttgcgagatgagtgccgaccgatccctttggatatgctagtttttaagttgattaagggtcctcttcgctctacacctttcaagcgagcggcattgaaggctctgtccagagcaataacagaagatgagcttatctacatcagagcacagtacaacttgctagaaccaagtagtacagatggtcgactatgcattgaaaacttcaggatggctcttttacaaaactctacagatgctatgaaggaatccagagcccttgatatcttgaatgcgttggagccacttgcctacagaagaatggactttgaggagttccgggcggcgacaatcagtccttaccaacttgaggctttatcacggtgggaagaaatagctggcactgcgtttgagtactttgagcaggaaggcaaccgtcccatcacaattgaggagctggcacaggtgcctactgtttctccaaagaagcagccgcagatgcgtgcagaagttcgcaaatgtcgtagtgtgctttacttttgccggacaatggtacggcgccactttattgttctcaggacaattaacaaatgctttcaccattaaattttttccctcgtttgcttgaaccgcgagatgtttatccatacttggcagtcggagggattcaagaaatttagggagccctttctgactattagcttgtagagaatgcttgtagagaaaaaaaggaaaccgaaagtgaaagttcacaatgtagttttagaagaaagaatgtgttttacctttaagagtatgtgtttctccttttacctcttctcatcttggtggttctgataaaagcgttcttgatctggct

SEQ ID NO: 46615 - DNA, 681 bp, Oryza sativa
  Clone ID: PAT_MRT4530_49465C.1
atgatccacacacgcacgcgcaggcagcgcagcaggcaaaggtttgctttgcatttttgcaggcgattgtttccccgcgtgggtgctctctgctggctgcgacgccatatatgcctttcttccccgcgccatccgtcgtcgtcgaaccatcgcgtcgcgtccccgtgtctgtcgagcgagatggatggatggatggatggatgggaccggacgaggcatcggtttctcgccggccgtcgtgttgcgtcgccagtcgatcgccaggtgaaaaggctgaggcagtcagagctttgcgccatggtgtccggccggccggggcaccgattaccggaggcagaggcttttgaggaggcggatccaatacagatgatggcactgtcggacggattcggctcgaatatggcggcggtggtggttgaggcaggtgcatctcgttattttgcagatggaggtggaggctacgggtggatgcgacgcaatcagtggcggaggcagaggatctaatgcaagaggatgcacgagcgtacggtggtgaaggcaaacgattaatctctgttcttggtagttagttcttgctaattcttgcatttgaccgtccaaagcatttcttttttcagattggagatgttatatttctttcggcaagtgaaaattttgaatttttggaaaaaaaaaaaaaaa

SEQ ID NO: 46616 - DNA, 3133 bp, Oryza sativa
  unsure (1)..(3133): unsure at all n locations
  Clone ID: PAT_MRT4530_49466C.1
aaattcaaagttttttccattttccaactttttaaaatttcgaccaattaaattaattttaggtgccacattaaaaaaattaatactttccaacccccgcatacaataaattttaatcctttataccttcacacccccncttccttttttttttatttttttatttttttttttttttttttttttaaacaccaccggaagcgtgtgcgtgtccaagactttgtaagaattataaatgtctgtacatatgcctgaacatacatacgagagattgacaatacataacgacacttcttgaattatgacttcataaacagggcaacaatgagctgctatgttgaaagaagcatgtgggattttctcaaaaaaaaaaaaagaagcatgtgggatactaaggaaagacttagcatccattattgataaagaataaatggtaagaaaaccttgcatccaggaggaattatttgaactcaagctgacggcatactcctacatgtttttctcacaatgagctgctatgacaatgtatgctttggcgaaagttggcatcacagcaaatgcatcaaattctggaggcatcaaatcagagtttgatgagaagatcatgcacagtctgagcaagctcagcttcacccctgatgccatcaacccaccttgcgctgatccgcacattctccaggctctgctttagtgccctcttaaacccgggcttagtgcgggtcgcgaagaactgggagatctctgcttccttctctttcgaggtgaacagtgtaacaatagatcttatgaaatccgatatgagggaacttcctgaaaatgcctccgagatacgatcccagttttccttcaaccaggaccatgcagtttcacgtgcctctattatgacacctccaagcacacgatatgcatcttgattgcgaacctcatctgtgaaaattaaattcaatgattcaagaacaatatccttatcctggcaagaagaaagtgtgcctacagataaggagacagagccctcaggaagtttttcctccccttcagctgatttcctgtagacctttagaagagcatcataaccagatctgtttgtgctactaacattatgcatcacagagaggtatgcagcctttctagtatctggagtaagaagggaagtgttgcgatcatcaaagaagatttggaaacgcctgaatccctcatttatagtcttatcatgcccaagctgaacaagggcaaccaaaagcattggtctgagcattgcattcaggtggctttcaccatctttagggtcccaacctaattttttagcaggcgggagaagaagcttgataaaaagttgcttgatgtcaccagccaggtcaggagtagcatcaattgatattttcgcaacacttgaagttacagaatttatgtgtgaaagaacactgtaatcagcctcgtcacggaacgcatacagcaagtggagcaacgatgacaatgtttgcttgcaggcaatagaaagggcatgtgcatcgtccacaatgccaatttcgtccattagagagagcttcttggcctgcaatgcatttcgaagtgcagctgtaagctcatcatcatatttaaccctataaaatcctgtttcatcaatgttcaacttaatccaaaagtttccacccttctgtcggctatcacattgcgaaacaatggcctttatgttatcatgtttatgtttcaacaataatcttttctgtttatcatgtgaacagcatcctaaagttatagggacaatccagatgccagcaccagaggttccatttaacaaaaattggtcctgttcaagttccaagtcgtgccctttaagcttcacgctgataacaggataaccttgttgcttcgtccacgtagtcatcaaatccttgacaggttcaccagatacctcttcaagaacagcccacaagtcctcggttttagcatttgagtaggcatacttttttatatatgaagttaatgctttctgaaaacgctctgcacctaggtaactttgtagcatacgaataacagaagcacccttgtcatagctaatggcatcgaaaatctcatctacctcactggcatggtgtatttcaacctcaataggatgggactcagcttgtgaatccaatttgagagcagaggttgtactatcaagaaactgtgtccagatattccattgagggaaaaaagaatctactgacaaatggctcatattctgtttgaaagatgctgatgaagactgctcatcaaaaagcaaagaaacttcccggtaagtgaccaatccatagttctccatggccccagcagcgaaatcaggaatagcaaccatgtccaacttagggagtggatatggagtatcaaagtagtctttgtagaaattcaatgacttcactccaatatctagtgcaaacttcccttgactactcttaccaacttgagtgtacacacggactttgttgccttccgatgttacaccttctacataatcaaacaaaccaacaactatggccaccaaataagttgacataagcggcgattcttcgtagtggatggtcttgataggaccagcaattgtctcacaagctactggcatgttggacaatgctactagctcagatggaacttcaagtgttaacttgaactttgccttgaatgcaggctcatcccagcaggggaagcaccgtcgagcatccacagcctcaaactgtgtcaccgccatgttttttgtctcccctttatactcatatttacttcggtaaaatcccctcatctgatcgttgagcgtgccgttgaagtccatggcgagcacgccctcgccgagcggcagctccccgtcgaactccagcaccaggatctcgtcgtcctcgaacagcgacacctccgtcggcgccaacccctggaagcggatggaggcgcggtcgacggcgaggtcggcggcgttgaggacgaggaagcgggtgggcgcggagacgtcgacgaccacggacgcgtcgccggtgaagacgcatgcgtcgaggtcgggccggaggcggagctcgtaccgccgcggcgccgcgaaccgcggcagcctcgcctgcccgcggaactggtcggccgagcccgccggagccggagccggcgccat

SEQ ID NO: 46617 - DNA, 327 bp, Oryza sativa
  Clone ID: PAT_MRT4530_49467C.1
gcacgagaacaaacgtgcatgccggcccagattaactgaagaaccatggcgtcggacctgtcaactgaatcgtgatacggatgaacacaagtccggtccatactgtatactgtacagttgcattaggtctctaacaacaccgagttagcttgatgtagccagctccctacgtagtgcgaaatcccgagttaaatttaagattggattaagtacacatctccttgtcaagttgttcaaacccgtctctttgcatacgcatttgcacttacatgtttgtatatgcagaatagcttgcaaacttataattagacctttttttttgaactg

SEQ ID NO: 46618 - DNA, 253 bp, Oryza sativa
  unsure (1)..(253): unsure at all n locations
  Clone ID: PAT_MRT4530_49468C.1
acgtgcagagactgaagctggagaatgcagtgctacatacacagatcgacgctgccaaactgagtgctatagagacagaacggccatgccagagcttgggatgtaaagccaccaaggaccgcagcttgctggagacgttgctccgtgcaagacgaaaacttcacgaggacactgctgactgcatgacatcgactacgcangtggacatgtggcttgctgagttcgacaaggcactaaggcctatggagatgac

SEQ ID NO: 46619 - DNA, 3404 bp, Oryza sativa
  Clone ID: PAT_MRT4530_49469C.1
ggggagaagaacacagcctaagttatcatggccaaggagaacaatcgcccgacaaatagttgagctcggtctgatacagaatgctgaaaggtaaaatcttattcactcggacacttcaaagctacagtagaattgtgcgacaactcttgaatcatatgcatggctcctgggcacaagctgtacacaacctatgaagagaaacggtaagcactatatatccctttgcctcgtatgcagcctatgcttcatgacttataaacagagagcaacaatgtgctgggatgctgctgctacgacaaatgcttcgcctaaagttggcacttcatagcagggaatgcagctcccgggggggagggatcacaccggatacagatcagggtttgtgaagaagctcatggacagtctgagcaagcttagcttcacccctgatgccttcgatccacctggcgttgatcagcaccctctcgaggctctgcttcagtgtcctctcgtacccgggcttagtgcgggtcgcgaagaactgggagatctctgcttccttctctttcgaggtgaacagtgtaacaatagatcttatgaaatccgatatgagggaacttcctgaaaatgcctccgagatacgatcccagttttccttcaaccaggaccatgcagtttcacgtgcctctattatgacacctccaagcacacgatatgcatcttgattgcgaacctcatctgtgaaaattaaattcaatgattcaagaacaatatccttatcctggcaagaagaaagtgtgcctacagataaggagacagagccctcaggaagtttttcctccccttcagctgatttcctgtagacctttagaagagcatcataaccagatctgtttgtgctactaacattatgcatcacagagaggtatgcagcctttctagtatctggagtaagaagggaagtgttgcgatcatcaaagaagatttggaaacgcctgaatccctcatttatagtcttatcatgcccaagctgaacaagggcaaccaaaagcattggtctgagcattgcattcaggtggctttcaccatctttagggtcccaacctaattttttagcaggcgggagaagaagcttgataaaaagttgcttgatgtcaccagccaggtcaggagtagcatcaattgatattttcgcaacacttgaagttacctgacaagccaaagtaaaagatatatacaaatcattgccaacgaataactgaatatcagaatttatgtgtgaaagaacactgtaatcagcctcgtcacggaacgcatacagcaagtggagcaacgttgactacgtttgctagcagtcaatagaaagggattgttcaccgtctacaatgctaatttcgtcattttgagagagcttctaaacttgcaatgcatctctaagcgaagctataagcaaatcatcacctttatgtctacaaaatcatgtttcaacaatgttctttttaatctaaaagtttccacccttctgtcggctatcacattgcgaaacaatggcctttatgttgttatatttatgtttcaataataatcttttctgtttatcatgtgaactgcatcctaaagtaatagggacaatccacatgccagcatcagaggttccatctaacaaaaattggtcctgttccaagaccaagccgcaagctctaagcttcaggcttagaataggataactttgttgcttcgtccacttattcatcaagtcaatgctaggttcaccagatacctcttcaagaacagcccacaagtcctcggttttagcatttgagtaggcatacttttttatatatgaagttaatgctttctgaaaacgctctgcacctaggtaactttgtagcatacgaataacagaagcacccttgtcatagctaatggcatcgaaaatctcatctacctcactggcatggtgtatttcaacctcaataggatgggactcagcttgtgaatccaatttgagagcagaggttgtactatcaagaaactgtgtccagatattccattgagggaaaaaagaatctactgacaaatggctcatattctgtttgaaagatgctgatgaagactgctcatcaaaaagcaaagaaacttcccggtaagtgaccaatccatagttctccatggccccagcagcgaaatcaggaatagcaaccatgtccaacttagggagtggatatggagtatcaaagtagtctttgtagaaattcaatgacttcactccaatatctagtgcaaacttcccttgactactcttaccaacttgagtgtacacacggactttgttgccttccgatgttacaccttctacataatcaaacaaaccaacaactatggccaccaaataagttgacataagcggcgattcttcgtagtggatggtcttgataggaccagcaattgtctcacaagctactggcatgttggacaatgctactagctcagatggaacttcaagtgttaacttgaactttgccttgaatgcaggctcatcccagcaggggaagcaccgtcgagcatccacagcctcaaactgtgtcaccgccatgttttttgtctcccctttatactcatatttacttcggtaaaatcccctcatctgatcgttgagcgtgccgttgaagtccatggcgagcacgccctcgccgagcggcagctccccgtcgaactccagcaccaggatctcgtcgtcctcgaacagcgacacctccgtcggcgccaacccctggaagcggatggaggcgcggtcgacggcgaggtcggcggcgttgaggacgaggaagcgggtgggcgcggagacgtcgacgaccacggacgcgtcgccggtgaagacgcatgcgtcgaggtcgggccggaggcggagctcgtaccgccgcggcgccgcgaaccgcggcagcctcgcctgcccgcggaactggtcggccgagcccgccggagccggagccggcgccatcaacaaaaaaaaaagggtcagcaattcatcatagcaaaatttatcattttgttgctgaattttgcatgtatggataatgttgagttatgtatgtgttggcccatgaggcccatatactactcatatgtacatgtatatagcagagttagagaaatgaaaaaagtagtgaagcttctagagaaaaattcccaaaacttcatggtatcagagccaatcggctggtggctggcgacgggcgacggctaaaccctagcctcgccggagcttgtcgaggcgtgcagagaggtgctgagggagctgcgctggcagagctgcgcgtgtacgcggcgcaggagcgtgtggagctccaggtgaggaaggaaacgctggtgctggagctcccggcgaggacgcagcggcgtcaacggcggcaggcagagccaac

SEQ ID NO: 46620 - DNA, 1143 bp, Oryza sativa
  Clone ID: PAT_MRT4530_4946C.1
aaagggttttataaaaagaaaaatcctaaaaagtcttctttcccccccttctttcttgggccggctcggcccagtccctccctctctctctctcttcccccgcggcccatcggcctcccccgcgcgcgcgccgctgacaggcgggcccgcccgccactctcgctgacgggtggggcccacctgtcatcgccttcctcccgccgcgcccgccgccgcgcccgtgccctagcgccgccgccgccgcggattccgccgcatcccgccatccccgcacgcattaaagagggggaaatcactccccgtgattccctctcccgtttccccctcttttccctctctctctccctcggattcgtccgatttgaatcccgcgagtttcgccggcttcttcaatggagccgagatctccgcggccgattcctccttctccggccgcgctttccccctctcggcgctataaaatcgtcccccgtgcttcgctcttccgtttccgccgctcgccgctcgctctcgccgtcggattcgtgctcgcgccgtcctcctctctctccaccgtcaccgccaagctccggttcgccgccgtcgtcgctccggacttcctcccgtctcggcgccacctccatcggcttcgccgcgtttccgtcgaccccgtccgcccctccgcttcgctcgccgatcgccggaacgccgtcgtcatcgccgtcccgaaccgcgccgccgccgtcctccgcttcggccgccgtttccgtcgtcgttgtagtcccggggtgagccgaagaccgtcctttcgcttccctctcctctccgctctctcgggcgccgctccgccgcgccggtggtcgacggcggtgaccatcggggcgcggtcgtgccgcctcccgtcggccgtgccggcgaggccgccttcgggcgcgccctcgcggctgccaagtgggcccggccgtcagccgcccgcgcccgcgggcgcggctgacgcgcgggacccacggcgccgaccgccgccagccgcgtgctcccggtccaccgtggaccgagaggctgacgcgtgggccccacttcccgtggacccggtccgcgcgccccctctcccggcttgttcaccctagagcaaacaaaaccccaactagtggacactctactcat

SEQ ID NO: 46621 - DNA, 1305 bp, Oryza sativa
  Clone ID: PAT_MRT4530_49470C.1
atgctccagagtctaatatccaggttgagtgaggaccagtttttattagatggatcctctgattctggcatgtggattgtccctattactttaggatgcaattcacatgatatgcagaaaagattcttactgaaacataaattcagcgacataaagggcatcaattcacagtacgatgaccaagaccgacagaatagtggaaacttctggattaagctgaatattgatgaaacaggattttatagagtcaaatatgatgatgaacttacaactgcacttcgaaatgcattgcagatgaagaagctctccctaatggacaaaatcggtagacacaaacacaacatggcacaattagtctcgattacaatttacagtgatttggtaacttctagtgtagctaaaatatcaattgatgctactcctgaattggctggtgaaatcaaacaactttttatcaagcttcttctccctactgctgaaaaattagggtgggaccctaagaacagtgaaagccacctggatgcaatgcttagaccagtgctcttggttggcctagttcagcttgggcatgataagactataagtgagggagttaggcgtttccaaatcttctttgatgatcgcaatacttcccttcctccagatactagaaaggctgcatacctctctgtgatgcataatgttagtagcacaaacagatctggctatgatgctcttctaaagatatatagggaatcaactgaagtggaggaaaggttaacaaagaatgatattttgggtttcttccctgaaggttttgtgtccctttttataggcatactatcttcttgccaggataaggatattgttcttgaatcgttgaattttattttcacagatgaggtgcgcaatcaagatgcatatcttgtccttcgaagtgttattattgacgcacgtgaaactgcatggtcctggttgaaggaaaactgggatcgtatcacgaagacatttgcagcaagcgcaatcttatcggattatgtcaaatctattgtcacattggtatcatacatctgcacttttctattccccaattccgtatatgttattctgatcgggccattgctgatccttgtttcttggcagttcacctctaaagagaaggaagcagagatctcccagttcttcgcaacccgcactaagcccgggtttaagagggcactaaagcagagcctggagaatgtgcggatcagcgcaaggtgggttgatggcatcaggggtgaagctgagcttgctcagactgtgcatgatcttctcatcaaactctga

SEQ ID NO: 46622 - DNA, 915 bp, Oryza sativa
  Clone ID: PAT_MRT4530_49471C.1
gcacgaggcactccctctcccactcctccccaagcggcggcggcggcggccgccaccgagcagcggcgcgacgagggcatcgttcgccatggcggccgcgccggggcgaggcggcggcgaggcgttccgtctgtcggcggatgcgggcgcgggcgcgctcaagctgcagaagggcgacatcaccctctggtccgtcgacggcgccaccgacgccatcgttaatgctgctaatgagcgaatgctaggaggtggaggtgtagatggagctatacatcgaactgctggacctgaactcgtagaggcatgccgtaaagttccagaggtcaaatctggagttcgctgccccactggagaagctaggattactccagcattcaagcttcctgtttcccgcgtgatacacactgttgggcccatatatgatatggacaagcaacctgaggtctccttaaataatgcctacacaaatagcttgaagctcgctaaacagaatggtattcaatacattgcattacctgcaatttcttgtggtgtttatcgttatcctccaaaggaagcatcgaagattgctgtttctactgcacaacgattttctaatgatattaaagaggtacactttgttctgttttctgatgagctctatgatatctggcgtgagactgccaaggaatttctgtcacaatttgagaaatgaattgtgaactgtgatgaggcttacttcctggtgtaagtctggtgccgaccgtgccgtagttgccgtcgttaatatgagcactagagccggttggccatgataaaacctgtatctgtatgacagtatgagttgcttagtggtgaatggatatgccctgaatggcatatttatcaaaaaaaaaaaaaaaaaaaaaaaaaaaaaaaaaaaaaaaaaaaaaaaaa

SEQ ID NO: 46623 - DNA, 1908 bp, Oryza sativa
  Clone ID: PAT_MRT4530_49472C.1
aaaaagggcctgccaaaataaaagtttaaaaccttctccttgaaaggggttcgaccccggaaaaaaattttcccaaaacccaaacaaaagggccctatggtttgattccctggggccaattctgctttaatggctctgaaacagatgtgccccgggaactgcataaatttcaagagtggtctatgaaaattggagaatgggaggaattgcacacatgaactgtcttgcccagagtggagatgctatcggacgcgccggccgggatgacaacaattagtgacggtttttcttttgtgacacatatagtgtaggtttacttccagcttcgtcgattaccagacggcaccggcgtcgcgcgagcgagcttgatcttgcgccttgtgcctgctagctgcttcggcggcggcggttatcttcttccgatctgtaacagccccgatcaagaaaggatccaacccacctaggaggactaacctgaacgtgctaatgagttcaaagctagtaacatcacctctgaaatccatggagcagggccatctagagcaacctctgcgcgatccgcaggcgccggcggagcagcatgacatggggttatctcccctgacgctcctcggcttcgccttcctgaccttcaactcgggaatggcagtgtacagatcagatagagacttggcaaccatcttcttcgtggtcttctcctacgttgacctcgtatcgctcttctacttcctccgattatttgagaagacgccgccggagtcgcctcgccgccaccacatcaagacgggcggtgtggctcctgacgacgatgctcaccgccgtgttttcatataaagtggcggccatcatgcctttcccggttcaggtgctggtttgggccatggccgcagcaactgtgcttggagggttctacgcattcttcctccactccgatgaaaaaaagcctattgagggataggcaaaatacttgatagggctttctggctgtttggcatttgtcagacgccctgtgtgtggtaacatctcgatcaaattggaggtcgaaattaaatatatccggtgagaagagatcacgagatcgatcgctacctatatatcacagatagaaatcagagtcctatcgatattttcgccgagcatatataagtagtgctgtcgatggcgagcccaattcgtgctttataaaaacagaacaaaaaaaaaaagaatatgagtttgtgtgcgtatcattttttctgggttaattgtattttgatcaatcagcatgtacctgtaaaatgaggtcgtgtagatcatgtgctaccgtactgtgtcctgtttttagtttttcctttttttcttcttccactgtttacatttctacttgtctgcgtctagtcactgtgtgctgttcacccagcacaaagtgagcaagcatgacactgtacccctcttttttttcattcttgaaccctaataagcaccggacacacatatttgcttgtaccacagtattgctagcaagatagatttgccaaatagccaatgtaccttgtgcacaccctttgtgtaaataaggaataattaactatttgccactcttacgagtggtgctaaattatttgctactagacccatatgtcatagacacatgagggcccacatgtcatagacagcgagttaaatgtccctgtaaataaagtctcatgtgtcacagtgtgtgcctattttcagaattggtaaatgctagcatggcctgaaatttttatatgagatagagccaatgggctccataatcttcccttgaaaaaaaaaataaaaaactggagctggagtgggaaatgtttcaaaaaaaattgagccaccaatctctctctctttggtttcctacgggccctggagcccccatatgcaaacattttttttatt

SEQ ID NO: 46624 - DNA, 310 bp, Oryza sativa
  unsure (1)..(310): unsure at all n locations
  Clone ID: PAT_MRT4530_49473C.1
ccgtcttccaaagctcgcggccttctcgctttcaatttctctctctcgcggacaggtgaattcaaggnatttnttggctggtttggttgtggattggattggattggntttctntgtgtggaggtgtgtgtaattagaagcttttncaactggaggaggaggaganatgggggcgggggtgtcgggcctgttcggattgggcggcgacgagggggagacgtcggcggcggttggtggtgccgcggcggcgggtctgggcnacctgccggagctgtgcgcggcggaggtgctgctccggctcgacgcgccg

SEQ ID NO: 46625 - DNA, 954 bp, Oryza sativa
  Clone ID: PAT_MRT4530_49474C.1
atggaggcggggaagagggagccaacttcgatgagggatggaggcggaggatttctgctaataggaagagaagaagggaaggaggaaggggagaagtgggaggagtgcctatgggggagcggggatcgccttggcgatcgatcgcccattaggccccccgtggtagagtcagatgtttacttccagcttcgtcgattaccagacggcaccggcgtcgcgcgagcgagcttgatcttgcgccttgtgcctgctagctgcttcggcggcggcggttatcttcttccggctaaatggacttggaagttttcctggccattctttactcagattgtccggattcattacattttgagtatctggcctgcaagtgctgtttatgaaaatgatcaccctattcggcattttcagatttatttaagatctgtaacagccccgatcaagaaaggatccaacccacctaggaggactaacctgaacgtgctaatgagttcaaagctagtaacatcacctctgaaatccatggagcagggccatctagagcaacctctgcgcgatccgcaggcgccggcggagcagcatgacatggggttatctcccctgacgctcctcggcttcgccttcctgaccttcaactcgggaatggcagtgtacagatcagatagagacttggcaaccatcttcttcgtggtcttctcctacgttgacctcgtatcgctcttctacttcctccgattatttgagaagacgccgccggagtcgcctcgccgccaccacatcaagacggcggtgtggctcctgacgacgatgctcaccgccgtgttttcatataaagtggcggccatcatgcctttcccggttcaggtgctggtttgggccatggccgcagcaactgtgcttggagggttctacgcattcttcctccactccgatgaaaaaaagcctattgagggatag

SEQ ID NO: 46626 - DNA, 1052 bp, Oryza sativa
  Clone ID: PAT_MRT4530_49475C.1
taaaacattttctttttattaaaacaaaacctttaatataatatcgatatattaagggcatattcgataagctgggaccgcaaatgcagctgccacagcccctgaaatattggagctagtccagccgaacagccctaagaagcaaaaagagtgtgtcgagagtcgaacacggtttgttgggacttgggagcacaatgacagccctacccactcaaacatatataaattagaagataactaatatttgtaccaaacaaagttactcgaatgagaaaactggaacagagctcaaccaatcaaacgaaagtgacaacaccccattcaacatgctggtacagcagctaggatcatactagtgacttgagcaaatgcacattccatctcctccctttgtaccttaatttcttctttagatgatttgcagtttaaattaccttgttctcggttttgtcgatatataggtcatctctcctgtggcagtctaattaaccctggtttgttgttcaattgtgcagggataggcaaaatacttgatagggctttctggctgtttggcatttgtcagacgccctgtgtgtggtaacatctcgatcaaattggaggtcgaaattaaatatatccggtgagaagagatcacgagatcgatcgctacctatatatcacagatagaaatcagagtcctatcgatattttcgccgagcatatataagtagtgctgtcgatggcgagcccaattcgtgctttataaaaacagaacaaaaaaaaaaagaatatgagtttgtgtgcgtatcattttttctgggttaattgtattttgatcaatcagcatgtacctgtaaaatgaggtcgtgtagatcatgtgctaccgtactgtgtcctgtttttagtttttcctttttttcttcttccactgtttacatttctacttgtctgcgtctagtcactgtgtgctgttcacccagcacaaagtgagcaagcatgacactgtacccctcttttttttcattcttgaaccctaataagcaccggacacacatatttgcttgtccccc

SEQ ID NO: 46627 - DNA, 679 bp, Oryza sativa
  unsure (1)..(679): unsure at all n locations
  Clone ID: PAT_MRT4530_49476C.1
gcacgagctcgtgccgattcggcacgagcgaccatgggatctacttgagggagaggcttctgataccgatcagcaatcctgaaattcttcagggtagcacatgctacattgagatggattataacgctagaagagaggttgcagtcttttatccccagggacgccctagtggaaaagcagaatcctcgacgaacactgctgctgcagaacgacgaagcagaaggattttggagtcagtcaagcgaagcttgcataccgatgacagaaccgctgcgtactacttatctgtcacagacggtgatccaagggcagccatgatggagtactctgaggacctaaggtgggagaggcaacaaacaggccactagatgtaaggtcaatgggaagataagggcatggcatttgccgctgcgtactacttatctgtcacagacggtgatccaagggcagccatgatggagtactctgaggacctaaggtgggagcggcaacaaacaggccactagatgtaatcatgtaaggtcaatgggaagataanggcatggcataatgatgcaggttattggaagatcactactacctgtttggccgcttgaacaatatatatgtgggttaccctctgtacatgtaataatgngaatttgngaacatatgtaatggatcatctttttttttctcg

SEQ ID NO: 46628 - DNA, 285 bp, Oryza sativa
  Clone ID: PAT_MRT4530_49477C.1
gcacgagggctatatctgccccgaatgaagatgaagaggaagagaaagaggaagaggaagaggatgatcttgtggacatcgaccgtcccaaggggaaaattgttgagctgctctcgccgtcgcaaggcgaggagcaacagctgcgggtgatctccatcgtgggttgccgcggcgtggggaagactgccctcgcaagagcagtctacagggattattctgcctccgaagaatttgactgtgttgcttgggttctggcatcgagatgcaacaacaaaagggcccttg

SEQ ID NO: 46629 - DNA, 2520 bp, Oryza sativa
  Clone ID: PAT_MRT4530_49478C.1
atgtactggttaccacctggtgatgcactaaataatggaatgaggctgcttgtagatgatcagtcctgcttggagatggtgaaaattgttggaactactggagctgtggacatttacactgaaatagttaaattggatatgggttgcagttctacattggtagaggctcattctgatgaagctgtatttgatctatttcgggataataatagcatgtttccagactctctagttattgcaaagggcggtacgaacacacaatgtgataatcccaatagcagtatcgcgaacatacaaactgaaggcttagattcagatagtggttctgatgccactggttttacagaggatgaagatgatgaagcagatgagataagaattaattataagcaattcaagaaaaaaatgaaaaggagagaagaaattccacttgacaccccagttgagttggatcttcctcaaagtgttgatgccaacaccataacacaggtaaatgacgagggagatggcattgcatactttgattcagaggatgatgcatcctatgatgatgatagtggggattctgcagagaggaggaagtgtcggtttccaatatttgataaccatgctgaattaccacaaaatgcagtcgacatgtgctttagaggaaagatgcaattgaaggatgcaataacaaggtatgcgttgaaaaagaagatcgtgacatataatggaaatcatagttgctgcccagatctaaaaaacaaaaggttgtctacaagtagaatttgtgataagtacgagagtgtaattaaggctaatccgtcatggaaagctagagaactgaaagagactgtacaagaagagatgggcgtggatgtctcaatgacaatggtcaagagggcgaagtcaagagtaataaagaaggtaatggacgcccatagtggtgagtactcaaggttgtttgactatgctcttgagctgatgcgaagtaaccctggaagtagtgtgcatgttgcccttgatcctgatgaaaatgagcatgtttttcagcgattttatgtttgtttagatgcttgtcgaaggggattcttggatggatgtcggagagttatcggatttgatggttgttttcttaaaggtgttgtcaaaggagagttattgtcagctgtaggaagggatgctaacaatcagatttatcctatagcatgggctgttgtggagtatgagaatgcaagttcatggaattggtttcttggtcatcttcagaaagatcttaatattccttatggtggtgatggttgggttttcctcacagaccaacaaaaggggcttctaagtgtcattgaacatctatttccaaaggctgagcatagaatgtgtgcaagacacatttatgctaattggagaaaaaggcaccgtcttcaagagtatcaaaagagattttggaagattgcaaggtcatcaaatgctgtgttgtttaaccattacaaaagtaagttagctaataaaacacctatgggatgggaggatttagagaagaccaatcctatacattggtgtagggcttggttcaagcttggatctaactgtgattctgttgaaaataacatatgcgagtcattcaacaattggattatagaagcacgattcaaacctatcataaccatgctagaggacatacggatgaaggtgactcgaaggattcaagagaataagaccaacagtgagagatggaccatgggaatttgtcctaatattctcaaaaaaataaacaagataagacatgcaacccaattttgtcatgttttatggaatggttcttctggatttgaagtcagggaaaagaagtggaggttcactgttgatctctcagccaatacatgctcctgtagatattggcaaatatctggaattccttgccaacatgcatgtgctgcctacttcaagatggcagaggagccaaacaaccacgtaaatatgtgcttctctatcgatcaatacagaaatacatatcaagatgtcctccagccagttgagcatgagtccgtgtggcctttatcaactaatcctagaccattgcctccgagggttaaaaagatgcctggtagcccaaagagagcgaggagaaaagaccctacggaagctgctggatcgagcactaaatcatcgaagagaggtggttctgtgaaatgcgggttttgccatgagaagggccataactctagggggtgcaaaaagaaaatggaacactcatcctcacattacccatcacatccagatcaagctgcaccttctggagaagccaatgattcctcggttgctcatagaaggggaaagaccttgctctctcaaagccaaggaagtgccgtgcaattggcaattggagccacacgatctaggcaatccaggggaaaacaacctgctatttcatctaatagcaagacgactaaaaagggaaaaatgcctgaaggttatggattgtactatagtgaaaggaccggttccacatttcttcagagatgtacactactttaa

SEQ ID NO: 46630 - DNA, 439 bp, Oryza sativa
  Clone ID: PAT_MRT4530_49479C.1
gaatatcagccattcttttttgttttgaatctctgtttatgtatgagttctgcatagtttacagattatgtgtttatattttccctaatagagatttaatgaatttttttagttctgcatgagttttgatatatgattttgcatataattttattgttctcgactaatatttctcaaatctgttgaaatatggaatgcaaatttcatatatcatcatgttgttcaacctaagaatacacataacaattgaattctaagataatatgatctgtgatgtttctataaaatctgtgaagatttctgtataaaatgtagacccataactcagaagatatttttttttggagtgatgaagctttgtgaattattttgatggagattcatatgaaaattcgaagctaaacactcaaatatttcaatctgtgaatactctgaattc

SEQ ID NO: 46631 - DNA, 3519 bp, Oryza sativa
  Clone ID: PAT_MRT4530_4947C.1
atggcgaagcgcggtggcgccgccggcgagcccatcccgctgtcgcggttcggcgcgctggtggcgcagctggagtccgtggtggcgtcggccaggcagaagccccccgacgcgctcctctgcttcgacctcctctccgagctctcctccgccctcgacgaggcccccaaggagaccatacagctttggcaaaggaaatgtgaggatgctctccaatccttgcttttccttggggctcgtcgccctgttcggcgattggcatcgtcagcaatggggaggataatcgagagaggtgatgcaatatcggtatactcaagagcgagtaccctccaagggtggttggtagatggaaaaagaacggatcccatggcctatgcaggtgtagcgcaatgtctgggagaaatttaccgcttatttggacacaagattactgcaggcttaattgagacatcaaatattgtagcaaaactcatgaagtaccatgaggactttgtgagacaagatgcactcctcttgcttgagaatgcattggaaggttctggtggtggtggtagtggtgcagcttatttggaggctttccgcattatcatgcgaggaggtgtgagtgataaatcattcattgtcagagtagcggctgctcgatgcttgaaggccttcgctaatatcggtgggcctgggttggggatggctgaaattgatacttctatgtcttgttgcgttaagggcttggaggataatgtgtcagcagttagagattcatttgcggaagcgcttggttccttgcttgctcttgcggttaacccagatgctcaggtaaagaaaggagtgaaaaagcaaagcacttctggaaagaaatttgatgatggtctacagaagcatttgattttaccatttgtcagagcaaatggagccaatgcaaagaaattacggattggtctggctttatcgtgggtgttctttttgcagctcacgtgttcacattctaagttagttcgcttctacacccacatgcaccactatagttacctcctttgggttctgtggtatcttcctgggaccatcactctgtgccttttcttatcttggtcccaactccttgcaacaccagttgagctaagctcagctgctcaggtgcattctagtcccacgccaggtggtgattatagtggttatcttgctatgattcatatgaaatatggtaccccagatagtgaacttcaaaactatgctgtacaagttacggaaattctccaagggaatgcttctcctgatccacatgcattggcatgtgttctatatgttctccgagttggtgttgcagaccagatgacagagccgacacaacgtgaatttttggtatttctgggaagaaagttggagtcttcaaattatacagccctgatgagagtggcaacattacgcattctgtcttacctgttaagaagcttgggtgaggttccatctgaattcaaggatattcttgacaatacagtagtcgcagcattatcccactcttcagctcacgtaataataatattcggggatactacgaaaattaggaggcatggtgggatcgggtatcattttagcttggttcgtgttgaggcagctttaacattacgtgctttagcagaggttgatcctacttgtgttggtggtttagtttcatatggtattacaaccttacatgccctcacagagactttatcatttgataagggtaaaattatgaatcttgagctcgattcgcttcatggacaagctagtgtattagctgctcttgttgcaatctcaccaaagttacttcttggttaccctgcaagactgcccaagtccgttcttgaagtgtccaaaaagatgcttaatggtttcagccgaaatccagtggctgctagtgcggagcgtgaagccggctggttgcttttggcgtctcttttagcatccatgccaaaagaggagctggaagaccaggtgtttgatgttcttttactatgggctggtccctttactggaaatcccgagtcataccttcgccatgtgcaggattgggcatcagaattgcgtgtcctgtctgttgcgattgaggcacttactgccttcataagaagttttgtctctccaattatgacaaatgccaacggtggaattctgcttaaccctgtgctggcctaccttggtggagctttatcccttatatcttcattgagctctaagaaattgccaaatgtgaactctgcactgaacctcttcactactagaacattgatggcatatcagtctctttccaatccaatggtttacaaatctgagcaccagcagatgcttcagctgtgctcaagcccattcagtgacccttctggatgggaagaaagctcatgcttgaagtttttgttggataagagagataattcgttgggtccatggatacctggaagggattcgtttgaggatgaactacgagcttttgatggtggcgttgatggatttctaccatgtgtctgggatgttgaaatgagcaactttcctcagccagaatcagttagcaaaatgctcgttaaccagatgcttctctgctacggttccatctttgcttgtcaggacaatactgtcaagataagactcctaaacaatcttgaccagtgcctaaagtccgggaagaagcaatcctggtttatgactgttgttacaaattcttgtgttgctctgttgtcagggctgaaggagtttctgactttacgtggtgctcaatcattgtcaactgatatactaagtatggttcaatcaacattcaaggggattctactggagagtgaaatttctacagctcaacgacgagcagcatgtgaaggtcttggtttgttagcaagaattgggaatgatgccttcaccgcgaggatggctcgttcccttcttggagagctaataacaccaattgatctgagctatacagcatcagttacactctcgttaggctgcatacatcgagctgcaggaggaatggcactatgtactcttgttactcctactttgtggtcgcttcatgctcttcttttaacaattgaagctgctgggttgtcttatgtctcccaagttcaggggacgcttttccttgctatggaaattcttttattggaagaaaatggatatgtggatcttaggcaggaaataggtcatcttatcaatgcaatagtagcagtaattggtcctgaacttgctcctgagataagttcctcaagtgaaacggctacgcttatagaatcagttagatttgctcagcagcttgttctttttgcccctcaagctgttcctgtgcattcccatgttcaaagtcttatcccaactctttactcaagacagccaagcttgagacatttggcagtgtcgacactacgccatctgattgaaagagatccgaagccagaagctgtgaaacccggcttctccagattctcagaagttgactaccaaccagctatttttcagaatcttaagctccctcaaactgcgttagaggagtag

SEQ ID NO: 46632 - DNA, 417 bp, Oryza sativa
  Clone ID: PAT_MRT4530_49480C.1
aacgtttttcaaccgctctaaaccaaaccatggtgcgccacagtgaccggctaggcgacgtcgcggtgttactcctgctcctgataaactcctgcgccaaactgggtccatcgtagccagaggaagatgagcaccgctgcattgagcagggtgtctgtctagcgtgaggagggggaaccacagcttgacggagcggggtacttaacgggcgtggagggggctgacagcgggaacaaccaggacgagaataagcaggcgtaccgtaaggacgacaacaccgtcaaccttcgacaccaaaaggggtctcgcaggtctgtacagcaacgcgatgcaggacgaaactaaataaggtgggcccagcctgggtaaacgacgcgaccgttaacttggactacggggaccaatgaatggaaggac

SEQ ID NO: 46633 - DNA, 467 bp, Oryza sativa
  Clone ID: PAT_MRT4530_49481C.1
ctgcaggaattcggacgaggttgcatgctaagaaaatatgggtcacatccaaacaattctgtgacatttataatcgaagaaaaacttgtctgtctgccaatttcagcaatctagccattctagctaacacttcacatttatgcatccacaattggtcaccttcttcaaatctcatatagcattccaacttgcaaggttttaccaggatttatctttagactggacatgttggatctgaagttcttttgcaagaacctgtaaaggttattaatacaaaaagcgcttcaaacagttgtgcctagttcccatctttatgatagtcctgccaagaacaaaggttgatccatttatccaaagctgaatccaacaccagaatctcatcatcattctcagctatttccttgagggatgcaataactgatgccacgtaatcgtcaccctccatattgtggttgtccatatagcca

SEQ ID NO: 46634 - DNA, 1887 bp, Oryza sativa
  Clone ID: PAT_MRT4530_49482C.1
atgaccatgtttcataaccgattaacaggttctcttcctcgggaattcgaaaatctcacgggcataccagacctttggcttgataataaccaattttcaggacacttgcctgcatatgtatgcatggggggcagactcaaaactttcatggttagtgtgaataccttcgatggccccattccgagaagcttaaagacatgtacaagtttggttagaattgccgtgcacaaaaaccagcttacgggagacatatctgaacattttggtgtgtatccacatctcaaaacggtcagcttggcatacaataggttctctgggcagatcacaccaaattgggttgctagcccccagcttgaggaaatgtattttcaaggaaacatgatcacaggtgtgttacctcctgctctctctaagttgtccaacctaggtgtgctcagacttgatcttaataatatcagtggtgagattccagcagaatttggaaatctgaaaagcctatataagctaaatttatcattcaatcagctctcaggatctttaccagcacagctaggaaagctaagcaatttagggtaccttgatgtatcaagaaacaatttgagtggaccaatacctgatgaactaggggactgcatcaggttagaatctttgaagattaacaataacaatatacatgggaatttgccaggcacaattggaaatttgaaaggcctgcaaatcatattggatgctagtaacaacaaactcgatggtttgttgccacaacaacttggaaccttgcagatgttagagattcttaatttgtctcacaaccagttcagaggaagtcttccatcatccatcgctagcatgttgagcttaacagttcttgatgtgtcctacaacaacttggaaggacctctccctgcaggacatctacttcaaaatgcatcaataagctggtttattcacaataaagttatagcatctggtcaccataagccaaagctactaagtttgctactgccaattgttcttgttgtgaacttcgatggcagactagcatttgaggatatcatcagggcaaccgaaaacttcaatgataagcacatcgttggaataggaggatctggcaaggtctacaaagcacgactccaagacgggaatgtagtcattgtcgagaagcttcatccagttgaagaagaaagcaatgtcaaactgtatggattctgcttccatccgaactacaactttcttgtctatgactacattcaacggggaagcctctatatgaccttaaaaaatgaggagctagcaaaagaactggattggtctaagagagttactcttgtaaaagatgtggctcaagctctatcttatttgcaccatgactgcagtccacccataatacatcgagatatcacaagtaacaacatcctacttgatacagctttcaaggcttatgtctcggattttggcacggcaaggattttgaagccggattcatcaaactggagtgcattagcggggacatatggctacatagctcctgaactgtccttcacatgtgtcgtgacagagaaatgtgatgtttatagctttggtgttgttgttctagaggtggtaatggggaagcatcctatggaattgttgcaaactcttttgtcatcagaacagcaacatacattggtcaaagaaatattggatgaacggcctacagcacccacaacagcagaagaggaaagcatagaaattctcatcaaggtggccatttcttgcctggaagcttctcctcatgcaaggccaacaatgatggaggcataccagactctcattcagcagcattcctctagctcatgccctatacgtttcaatgaagttacactagaacaactaagaaatacatag

SEQ ID NO: 46635 - DNA, 1278 bp, Oryza sativa
  Clone ID: PAT_MRT4530_49483C.1
gcacgaggctgacatctctcaccccccgtccctatccctttcgtcgtcgtcgtcgtcgtcgttcgtcccaatctccgcatccctccattccccccctcctcctcgatggctcgcctcctcgcgcaaaccctaaccctagcccgcccggctgcggcggcggcggcgcccctcctccctctccgcggcctcgccaccaaggtcgaggtcatcgagatcgacctcgccgaggacgacgactcctccgcctccacctcgggccccgcctcctcccccgcgtcggtggaggtggtcggggtcaggcgcctggaggaggcgatccacggcgtcatggtgcgccgcgcggcgcccgactggctccccttcgtccccgggggctcgttctgggttccccccatgcggcggccccacggggtcgcggacctcgtcggccggatcgcggcggcggcgtccggggccgacgcggaggtggtggccggagggctcgcgtacgagccggaggtgtacgcgcccatgacggaggaggaggcgctctccttctccaccgcgcggggctggccgtcggcctcctacttcgtcgaagggaaattcccacataccaagaagaagtcaaggaaacgtgcaacccgcactgatgaggaagaaagctgattggctaatgctccattgccaaggggaaggcttctacaagaaaaggttgttcagggttacacgtctctgctatgaccaatgtacatatggatgacggcaaggacccaagtgctaattaatcaccccaccccttgcactatgaagataatctgttgcaactgctatgattgggttgcaatctgtatatttcactcagaagctgtagtgttattgtatcgaccagcccttgtgccatagccttggttcacggtaataaaacatggagggagaagctggatgcttgtgtttgtgttctgcaacagccatagaaaatggaacactagctggaatccaacaaggactgtggatggctctttgtgccaaggaaaaaaaaagaatgtttgcaaagcgctgagataaaaacatctgcttccatctccagtcttgaatttgtttccatataaaactgcatgttgtaatgtcatatttgacttgttgagacctaaaaggtcaactgtatgtgcatttggtggacatggcctgcgaagcaaatttgattacattctaaatttatagctgggaatgcctcatctataagagagagctgctgtcaagtgagcatatgaatgtaaaaaaaaaaaaaaaaaaaaa

SEQ ID NO: 46636 - DNA, 393 bp, Oryza sativa
  Clone ID: PAT_MRT4530_49484C.1
gattaaacaaatgtttgcaacacaagggaaatacaagcctgatggaccaatggattgacagccacatagctgcctgaatgacagactgcaatcttatgagggggataaagctgggtgacagcctggcaaggtgtaaccaggtgcacagggatatgtgccacaggtgcaggacccccacgcagtgccacgccatagggataagggtgcaaaaatgggggtgactggtgtgctggctgaaaccaaggatgatgctgtggttgttgtgttgctgtgtgtgtgcattggacaaaattgtggatgattggtgtggtttgagtttgccctggcctgcatgttgtttatgtttgctttggagaaaccagtaacagtgggataaccacgggaaagtgaaaa

SEQ ID NO: 46637 - DNA, 411 bp, Oryza sativa
  Clone ID: PAT_MRT4530_49485C.1
ctgacacacactttcgttttgttaacactacggcctggtgcgcttctctgttggatgtttctcatgacacatattgggaagtgcacagcatgctggttgtaggtgccaaaacaatgggacaagcactggaagctgcaccaataagaattcagcttatttacactactctatcgaccggcctggcgtatggatccatcagtctgtgggtcagaggactagtaacatgtacaacaacatgatgcactggcatgtgatacttaactttcatgcatattgcagagtggagacaacgattactgactgctactaccgtgtggattacacactgcggaacttggtcgctgaagacactacctccgataatataaccaagatgatcatcttcaactacaaggcacttactcaatatgg

SEQ ID NO: 46638 - DNA, 531 bp, Oryza sativa
  Clone ID: PAT_MRT4530_49486C.1
atgggcgcctgggcagtgggcggcgtgtggcacggggcggcggctggcgggggcggggtaggcggcggccgtctagggcagggtccaagcaatgaagcctcgctaagactagctgccagctgcgacgacgggtcatcaccggcctgcctcaatgacacctggtgccggctggggaagtgcggcgccgacggcggcagcgaccctagcggctgcggcggcacggcgagaggtgacgccggcaccgactggggaagtgcggtgccgacggcggcagcggccctagcggctggcggtggcggtggcggcgacacggtgaaaggtgacgccggcgccggctggggaagtgcggcggcgacgcgctgtggaaggggatcgaggattcgaggttcgagcggaggcggagccaaagagagatgcgatgcggataagccgccgatgcgccgttttaggaaactaagttggcaccagatgagcccgatcgaggtacggatggagtacacgtcaagcagtgcgaagttgagcaagctgaat

SEQ ID NO: 46639 - DNA, 371 bp, Oryza sativa
  unsure (1)..(371): unsure at all n locations
  Clone ID: PAT_MRT4530_49487C.1
gcctgctgcaccgccgatgccggcgngnaatgggagcgnaancggagccgggggcccggggcagggctctcctccacccaagacggcgcaccccacggccttgccccctccatcgccagacgaatccatccccatcgatcaaaaatccaaacctcggagggggacagcagtngcgcggatctggagtggcacggccgccaccttgccacaatcgcgccanccgggcgaaggaggggaaggagtcgagagggaggaggatcaactcgcactcgaatttccagccgtccgatctcttcgagattagtgcttcttttatcaagctatttcggtttggatccggtttgttccacccttgttcgacggtgggtgat

SEQ ID NO: 46640 - DNA, 482 bp, Oryza sativa
  Clone ID: PAT_MRT4530_49488C.1
taatagctggtcatgtctgaaggttcctcagagtaatattttaacagcttaagttgtgtttctaaaatgtacaaatataggatcacactatttggtatagtcaggaaattttgggaagaaactttatcagtaagtaggccaggaatggggtcactgccttttgtgtgagaactcatcaacagcaagagccatgtgccaataccatccttaaatcacagatgcctttcgtagtagtcaaagatgtccttccaggcagcttaaactctcctaaatgaatcaagcagcaagaaccatgataatagtactgtgtggtagtgtatcactgaggccctgaccactgcctgagttgctgctgctgtcgtactactatgtagtagtagacatctgaagttttaaaaactccacgaaaacctttcaaagttactctgaaaagtgaaaagtttctcagggaaagttaccttttcaccaagtgcaaatgaact

SEQ ID NO: 46641 - DNA, 243 bp, Oryza sativa
  Clone ID: PAT_MRT4530_49489C.1
ttcttcaaacattggatgtatatcctgactatagcttatcttagtggtggttcacagtatgaacaccacaaaataaaatgagatgcggctatgatcaagagttaatgtaatgagactccagagcgaaagcctgagtaagctattaggacccatcataacaacaactttagatcctcacttgcgtggcacgagaagaggggacaccaagaactccgaagcccgaacagggaactctacgctatg

SEQ ID NO: 46642 - DNA, 869 bp, Oryza sativa
  Clone ID: PAT_MRT4530_4948C.1
tcttgctgtttcctcttaagttgaatgcttataataagatatatcacatgttaatacatcttctcaatttaacatacaagcaacgatgagacatcccctcaagagtttaaaatccaatctcatatataatatcgtgggggtggtacagtttcatgtagatatcttttcatggagtgctactgctagctaggggaacttggtcactgataataataactacagcaggtgatcatgcaagtgcaaaccaagataatactccctccgtttcatattataagactttctatcattgcccacattcatatagatgctaatgaatctagacatatatatgaatgtgggcaataatagatagtattataatatgaaacggaggaagtatatcttatgcatgtgcaccgccaacaaaccagctaattacactatacatacatgctatgctggctggatcttgctgtttcctcattctccagagaccccaagaagaggacggtacatcatatgggctatagcatcagatgtagttgatggagatcaggtacaaacatccgtgacaagcatccaacttaactaagagagagagatcaagagatgatgatgcagtcgtcgtccccgttaggctgggcagtatagtttagtaacagccgaagaaatactagtaactagcagagtgatggtatctcctctccgggccaggcagcaagatcaaaactactcaactcaactcaactcaatcgtccactccggccttgctcctcaggtgctccttgaactccatgatgtcaccttcccacctggtcaccgcctgcttttcgcacacccatattttctgcgccacttggttgatcagcctgaagtcatggctcacc

SEQ ID NO: 46643 - DNA, 1831 bp, Oryza sativa
  Clone ID: PAT_MRT4530_49490C.1
ccagtgcggtcctttccggcacaaagcacactcgtccgctgacagtgaccagagattctactccagcttgctattcatcttggagggtggctgttgatgtgggctccggcctcatcgccaacaatcctcgtggcgttcggtctcctgggcctcgtcctcgcgtggcaggccggcctccagctccaccgcctgtggtggcggccgcggcggctggagaaggcgctgcgggcgcggggcctccgcggctcgtcctaccgcttcctcaccggcgacctcgcggaggagagccggcggaggaaggaggcctgggcgaggccgctgccgctgcggtgccacgacatcgcgccgcgcatcgagccgttcctccacgacgccgtcgtcaggccggagcagcactacggcaagccgtgcatcacctggctcggcccgacgccggaggtgcacgtcaccgatcccgagctggccaaggtcgtcatgtccaacaagttcggccacttcgagaagatcaggttccaggcgctatcgaagctgctgccccagggcctctcctaccacgagggcgagaagtgggccaagcacaggaggatcctcaacccggctttccagctcgagaagctcaagctcatgctgccggtgttttctgcgtgctgcgaggagctgatcagcaggtggatgggggccattggttctgatggctcgtacgaggtggattgctggccggagctcaagagcctcaccggagatgtcatctcgcgcaccgcgttcggaagcagctatcttgaaggaagaaggatcttcgagctgcagggcgagctatttgagcgtgtaatgaaatccgtcgagaagattttcatcccgggttacatgtatttgcctactgagaacaaccggaagatgcatcaaattaataaagagatcgaatcgattctaaggagtatgattgggaaaagaatgcaagctatgaaagaaggtgaaagcacaaaagatgatttacttggcatattgcttgagtcaaacatgagacacacggaagagaatagtcaatcaagccaaggcttgacaatcaaggatatcatggaggaatgcaagttgttctactttgcaggagcggatacaacatcagtgcttctcacatggaccatattgctattaagcatgcaccccgagtggcaggatcgtgcaaggaaagagatcctaggactatttgggaagaacaaacctgagtacgatggcttgaacaacctcaaaattgtgacaatgatcctctatgaggttcttaggttgtacccaccgttcatcgagcttaagcggagaacatacaaggagatgaagataggaggcgtcacttaccctgctggtgtcatcattaatcttcccgtgctgttcatccaccatgatctgaaaatctggggaagtgacgtgcatgagttcaaaccagagaggttctctgaggggatctctaaggcatctaaggatccgggtgcgttcctcccgttcggttgggggccgcgaatctgcatcggccaaaacttcgcgctgcttgaggccaagatggcgttgtgtctgattcttcaacgcttggagtttgagcttgcgccaacgtatactcatgcgccgcatactatggtaactctgcatccgatgcacggtgcacagattaaagttagagctatatgatcatttcagattatagcgtgttttattagtacaactcttggttgtgagttgtgatatttgtacctttgtaataaaattgggataagggatatctatattattagtatactagcaaaaaaaaaaaaaaagggcggcgctcgcgatctagaactag

SEQ ID NO: 46644 - DNA, 1659 bp, Oryza sativa
  Clone ID: PAT_MRT4530_49491C.1
atgtgggctccggcctcatcgccaacaatcctcgcggcgttcggtctcgtcggcctcgtcctcgcgtggcaggccggcctccagctccaccgcctgtggtggcggccgcggcggctggagaaggcgctgcgggcgcggggcctccgcggctcgcgctaccgcttcctcaccggcgacctcgcggaggagggccggcggaggaaggaggcctgggcgaggccgctgccgctgcggtgccacgacatcgcgccgcgcgtcgagccgttcctccacggcgccgtcggcgtcggggcggcgcacggcaagccgcgcatcacctggttcggcccgacgccggaggtgcacgtcgccgatcccgagctggccagggtcgtcctgtccaacaagttcggccacttcgagaaggtcagtttcccggagctatcgaagctgatcccccaaggcctgtccgcccacgagggcgagaagtgggccaagcacaggaggatcctcaacccggttttccagctcgagaagctcaagtcaattttgtttctttatctgatcattgaaatgtcgtcggagaatgtgcagctcatgctgccggtgttttcagcatgctgcgaggagctgatcagcaggtggatggggtccattggttcggatggctcgtacgaggtggattgctggccggagttcaagagcctcactggagatgtcatctcgcgcaccgcgttcggaagcagctatcttgaaggaagaaggatcttcgagctgcagggcgagctatttgagcgtgtcatcaaatccatccagaagatgttcatcccgggttacatgtatttgcctactgagaacaaccggaagatgcatcaaatgaataaagagatcgaatcgattctgaggggtatgattgggaaaagaatgcaagctatgaaagaaggtgaaagcacaaaagatgatttacttggtatattgcttgagtcaaacacgagacacatggaagtgaatggtcaatcaaaccaaggcttgacaatcaaggatatcatggaggaatgcaagctattctactttgcaggagcggatacaacatcagtgcttctcacatggaccatgctgctattaagcatgcaccccgagtggcaggatcgtgcaagggaagagatcttaggactatttgggaagaataaaccagactatgatggcctgagccgcctcaaaattgtgacaatgatcctctacgaggttcttaggttgtacccaccattcatcgagcttactcgaaaaacatacaaggagatggagataggaggcatcacttaccctgctggtgtcatcattaacctccccgtgatgttcatccaccatgatccggaaatctggggaagtgatgtgcatgagttcaaaccagagaggttttccgaggggatctctaaggcgtctaaggatcctggtgcattccttccattcggttggggaccgcgaatctgcatcggccaaaacttcgcattgcttgaggccaagatggcgttgtgcctgattcttcaacgcttggaatttgagcttgcgacatcgtacactcatgtgccacatactataataagtctgcatccgatgcatggtgcacagattaaagttaagagctatatgaccatttcagattatagtgtgttttattag

SEQ ID NO: 46645 - DNA, 1029 bp, Oryza sativa
  Clone ID: PAT_MRT4530_49492C.1
gtcgaagtcattcgtgggtgcagcattcttgctgctgttggcttgaggatggccagtactcctggagtcagtgcaatcctttttgatgcattagcaaaggcaaatattaatgtacgagcaatagcccaaggttgcagtgaatacaatattactgttgtgttgaagcaagaagattgtgtgagggctttgagagctgttcattaaggttcttcctctccaaaaccactcttgccgttgggatcattggaccaggtttaattggtggaacacttcttgaccagctgaaagatcaggctgctgttctcaaggaaaatatgaatattgatctacgtgttattggaatatctggctcaagaacgatgcatttgagtgacataggggtagacttaaaccagtggaaagagcttctacgaaaagaagcagaaccagcagatcttgatagttttgttcgccatttgtctgaaaatcatgtatttccaaacaaagttttggtggactgcacagcagatacatacgtagcatgccactattatgattggttgaagaagggtatccatgtcatcacgccaaataagaaagcaaattctggtccgcttgatcggtatctgaaattaaggactctgcagcgtgcatcgtatactcattacttttatgaagcaactgttggtgctggccttccaatcattagcaccctacgaggtcttctagagacaggtgacaagatattgcgtattgagggcattttcagtgggactttgagttatattttcaacaattttgaaggtacacgaacttttagtaatgttgttgctgaagcaaaagaagctggatatacagagccagatccaagagatgatctatcaggaactgatgttgccagaaaggtagatactgcctccaggtcgcgaggcaccagtcccggcatcggttggtcgccgagaagatcctccatcgtacggtaccgtagctgctcgccgtcgtggtacgcgtcgatgcgctccccgtcgtgggagagcggagtagcgaact

SEQ ID NO: 46646 - DNA, 246 bp, Oryza sativa
  Clone ID: PAT_MRT4530_49493C.1
atggatctttcccaaaacaacttgtctggtgacatcccagtatattttgggacttttgaatctttatgcactctcaatctatccttaaataaccttgaggggccagtccctgaaggaggtgtgtttgcaaattcaagcgatgtgttcatccaaggaaataaagaggtgtgtgaagatgacacaatcgttgacaacgaattgaagatgaaccagattgccaccatgagaatccctgcactgcagtag

SEQ ID NO: 46647 - DNA, 751 bp, Oryza sativa
  Clone ID: PAT_MRT4530_49494C.1
cggacgcgtgggcggacgcgtgggcgccaacgatgcgagtcatgctactccatttccctgtacttgtcaccgatgagtaatttttaattttaaccataagtagttttaaaattatcatattattaagcgtacaacatactttcacaatataagtatttttaaaaaaatttatagacttgtagcttaaatatgagtggttaaatttaaatatgaaacaatatcctgtggtcattagtcatcacctacgtaagcggaactgtaaatgttgctcatatgatttggctacttgcagaagttgacggttttgacagagattggtgatggatattttcaactttaggacactaaagaatatcgttcgcatataccgtcaacaaggagtcgacaagattccaatcaattccgatgcaagctttatatatatttcaaactagaaaagacatatcaccatcgttccatcaatgtgggatatgtttatgtataggcctaggaatacctcatattaggaatttacctatgtgacctatattttttataagttgctggtttttttcttattggtttttcaatgaaatacatataaagcataacaacctcacaacataaaaaggaaagtggattctaatccctcgagatgacgtcccctcatgtatctttgttttcttcaaattcaattaaaaatagttatgaaaaattatttagagtatagtgatatttattggtccacaaaaatcaaagaaaaagtggccta

SEQ ID NO: 46648 - DNA, 266 bp, Oryza sativa
  Clone ID: PAT_MRT4530_49495C.1
ataagagacaaaaaataccctcttactgagagctacgagttggattggggtgatatacgagtcgtccccaatgctattagaaaatacaatggagaaggacacccacagggggaattaatacgaatccgcaagccagagagacaaacttgtgcgaccttcgaaacaggtctgagcgcgtgtctagatgggtgacggaaagagggcacacctaggaatagaaagactagggggaaactaccaaaggcatactaggactaaggaaaagt

SEQ ID NO: 46649 - DNA, 220 bp, Oryza sativa
  Clone ID: PAT_MRT4530_49496C.1
caactgcctgtttggcagatctttgttatattatagcatgcaaagctaaaagagactcctatctgtacagagcaaactgctgaaggagcatttctgcttcagagctgagcaattattttgttctgtttccagcataagaggagatactctgttgtacttggaatcatgaaaatgaatcatataaaagcatttttgaagatcaaaaaaaaaaaaaaaaaaa

SEQ ID NO: 46650 - DNA, 1230 bp, Oryza sativa
  Clone ID: PAT_MRT4530_49497C.1
atggagatgaagctgaccatcaagcgggtgcccaccgtggtttccaactaccaggaggatgctgccgccaccgccggcgaacgcccccgcgccggctgcgggagggattgcctcggggattgctgcttgcccgattccaagcttccgctgtatgctttcaaggcgagtccgaaaaagccgtcttcgcaggaggatgcttccaacgatgagttctttgtcaatctcctgctcggcctgtgggaagacaggatggcccgaggtttgttccgatatgatgtcactgcctgtgagaccaaggttatcccaggcaaccttgggtttgttgcacaactgaatgaaggacgccacctcaagaagcgccctactgaattccgcgtggaccgtgtgcttcaaccatttgatgctgccaagttcaacttcaccaaagttggccaggaggaggctacattcgcactggtaagcccaattgaatatggccatgttcttctcattccccgtgtactggaccgcctgcctcagaggattgaccaggagagcttcttgcttgcactgcacatggctgctgaagccgcaagcccatacttcaggcttggctataatagtttgggtgcctttgcaaccatcaaccacctccactttcaggcatactacttgacagtgcctttccctgttgagaaggcagctaccaagaggattttccttgctgagggcacaatgaatagtggagtaaaggtgtccaagctgatgaactaccctgtgaggggactggtttttgagggaggcaactcactgagcgatctggccaatgtggtttccagcgcttgtatctggctgcaggacaacaatgtgccttacaatgttcttatctctgactgcggcaaaaagatcttcctcttccctcagtgctatgccgagaagcaggctctgggagaagtgagccaggagctactggacacgcaggttaacccagctgtgtgggagatcagtggccacatcgtgctgaaacgaaggagtgattacgaggaggcatcagaagcttctgcgtggagactcctcgctgaggtttccctgtcggaggaacgcttcgaggaagtgaaggcctacatctttgatgccgctggtctggttcagtccgacgaggaggaagtcagcgaagacgaggacgccacctacacgcctgtctccattgcccctcctgctgtcgcggaaggctgcctcgtccttcagtga

SEQ ID NO: 46651 - DNA, 421 bp, Oryza sativa
  Clone ID: PAT_MRT4530_49498C.1
gccattccatgcaagtatgccatcgtgacttaaagctggagaacactctgctagatggaaggactggtcctcgcttgaagagatgtgactttggttactcgaagtcatcggttcttcattcacaaccaaaatcaacagttggaactccagcttatattgctccagaagttttgctcaagaaagaatacgatggaaaggtattatctatcccctttgtgctttaaaagttgccatcctgcatgcaaagatacactgataccagcagctgcccaacttctatgccttttgctcgacaatagaagctgccattgtgttgtaaaggtgttgatccatgtttcaatggcatgggtagtgtatggtcttgtgaagtaacccttttaatgcattagttagctcaatccctaataatttgtctttggat

SEQ ID NO: 46652 - DNA, 5321 bp, Oryza sativa
  Clone ID: PAT_MRT4530_49499C.1
atgttattttcctttgtttctcataggacttctggtgtaacgcaaaatgatctatgcaaaactttccgtatgaaaggaaacaacttccactttattgtaaagagccttcagtcgcagaagttaatcgttaggcagtcaactattataaaggttaaagatcatggacctgatgccgaagacgcttccgagaactaagagatcatcaatactcactcattgtatctctcgcgatatgctcaaaacctgaatgtgaaatgaccatctaggattgagggtctatggccagaactattcgctagtcatgaagcgggcaaaggagctggatgacaagatgacccgacttttggtgtaaattgcagacaagacctgtggaaccatggttatcccgggcaactgagggctagttgcacaaatgaatgaggaacgccagctcaagaaccgccctactgaattccgagtggaccgtgtgcttcaaccatttgatgctgccaagttgcaacttgcaccaaagttggccaggaggaggtgctcttacaatttgagaatggtggtggtgatgacagcttctttgtggagagctccccaatcagtgttgctgatcgtgctcctaatgttgttgcaatcaatgtaagcccaattgaatatggccatgttcttctcattccccgtgtactggaccgcctgcctcagaggattgaccaggagagcttcttgcttgcactgcacatggctgctgaagccgcaagcccatacttcaggcttggctataatagtttgggtgcctttgcaaccatcaaccacctccactttcaggcatactacttgacagtgcctttccctgttgagaaggcagctaccaagaggattttccttgctgagggcacaatgaatagtggagtaaaggtgtccaagctgatgaactaccctgtgaggggactggtttttgagggaggcaactcactgagcgatctggccaatgtggtttccagcgcttgtatctggctgcaggacaacaatgtgccttacaatgttcttatctctgactgcggcaaaaagatcttcctcttccctcagtgctatgccgagaagcaggctctgggagaagtgagccaggagctactggacacgcaggttaacccagctgtgtgggagatcagtggccacatcgtgctgaaacgaaggagtgattacgaggaggcatcagaagcttctgcgtggagactcctcgctgaggtttccctgtcggaggaacgcttcgaggaagtgaaggcctacatctttgatgccgctggtctggttcagtccgacgaggaggaagtcagcgaagacgaggacgccacctacacgcctgtctccattgcccctcctgctgtcgcggaaggctgcctcgtccttcagtgagacggtagaacaggttgtcggcctggtaaagcgctgtgccgccttcgtcttctcatcagtcttcttcagtcttcacccgctggtcgcctagcttcgtcatagttatggttgctggtcttttataaggatcaatgtaatcgaactgcctggagtcttgtgtctgaacctgcatgctacttgctcctcccttccctgctgctctgatattcagactctgcaaatattaagcagagaaactgtgaaactgtttgtattgtttgtgctgttgagcactggatctaatgtgatgaacattgttaataactacaaataatccctgaaaaaaaaaaatgtaaaaatatgttagtggtttgccaaattggtgtgacccatttgatgaacacaagcagctgcaggccacgcatcatcgccgtgaatctcccaccgcgctccggcgattgcattcgcggtctccaccgcctgcaggccgtccctgctcctgcccccgcgccagcgctcgtcgccgccgcggccgcggccgctcctctgcacgccctccaccgccgccttccgccgcggcgccctcagcgcgacaacaacgccaacgccggcgcgcgcagcactgccgtcgacgacggggaggaacaggatcgtctgcggcaaggtgagcaagggcagcgcggcgcccaacttcacgctgagggaccaggacgggagggcggtgtcgctgtccaagttcaaggggaggccggtggtggtgtacttctaccccgccgacgagagccccgggatgcaccaagcaggcctgcgccttccgcgactcctacgagaagttcaagaaggccggcgccgaggtcatcggcatcagcggcgacgacgccgcctcccacaaggagttcaagaagaagtacaagcctggctgttctgtaccagaggtttctcatcctcgttcatggagttcacttagagtaatgactactgaacaaagactggagttacaacagcgcattatgaatgccagtgagaatggaaaacttccttttagagattgtcgtataattgccagggagttgaatctctctgtacagcaggtgctctgtgtatcgtcctctcagaatagacagcttcatggacagcccaccgtccctgctgcaagaaaacggcgaaaagttaattcaggatcaacctctaaaaaaaggaaaaggtctgctgatgagattaccctgaaatttatcaaacggaatgttgaaaccattgaatccactgaaccgagaccagcacagtctatcccacatgaggaggtggatgaagatacgataagcagtccaaggatcagtcgatctaccatcttaagaggaagctgcatgagagagaaacgatttgtgtggacatacgattctgacagaaaattgctgatgatatacactagatcccgtgcaacacttggagcagtatctcatcgcgtagattggaactctctttctgatcttccagctccaccagctgcatgccgtagaaggatagcatacttgaggaaaaaaacaaacataagaccagctgtgagccgagtctgtgaccttttagggatacgatacgctaggtaccttgaaaaggaaaagagatggaaattgagaggattaccttccgaaatctcaaattctagtcatgacaactgtgtggatccagattctgagcaattcttttgggataatttcgaggatccagagataaagagtgcacttgatgaagtccttgaattcattcgagtagaaaaaatggagcagaccaagagagttgggtctaagaatgaaaggaacaatgatgataatgatgccaccaaggaagttccaaatgggcagaaacagccagttttaggtgcacgtgcaacctgtgcaagcactgcaattcaagaaagtggactccgtgaacatgcaaaatcctataggctgtcaaatgcaatccatgcaagtaaaaacatggacattcccttcagatctcatgaaaaggccattaaccataataaagatgatattgctaaaagagatgtatgcagatcattggcagttgcaaatgcattagagcttctgaagctggcttttctcagcacctcatcaggaccagaagtgcaagcttcgttagcagcaaccctccagctttattcagagactgaaatttttactgccttttcctttctcagagagaaaaatttcatggtaactggagatggaacaaagccatacactctttctgggaaattcttttttaatgcttcgaattcacccttcccatttggttcagggaaaaaagcttctgaattttctcaatgggtagggcagcaaaagaataccatggatgatggagtttgtttgtatccagatctacaatgtggggaaattgtccagctcttttctcttgttttgtctggagagtcgttcatttcaccctcattgccaagtgaaggagttggtgaggctgatgagcctaatagctctagtttgtttgttgatgataacagtgaattggatgagagtagtcacaaacgcaaggctgatatggttaaacttaaaagcagtaagactaagaaacacaaacctttgcccaagatagaaagcgacttttgctatcgccgagagaaaggtttccctggtcttcaagtggctttgaatcaagagagaattaaaacaagtaatcttacacaagagttacatgataaagaatgccttatttttacttcagcctgggaaatggggagcaaggatgttgattcacaggtagaaagccacaatatgtcatcattgtatctaaacaactccagttcatgtcggcgtttactgtcagaatctcatttggagaactcttacagtgggtggccttgggatgctataaaaacatatgctgaacagtcaccatcattatgttgtaacaaaaatgaaccagacatattgtcttctgacctgttcagaaatgcattttgtgttgttcataaagctggcgaacaaggagttaatttgagagagatgtcacaggcactggatcctctaggcatccagtttgtcgatctgattgttcatactctcaagagatttcagctggtcattaaggtcaatgcatatgatggtgtgcagattgttgactctatacataagtcaaaatatcatataactacacttgcagattcaagtcattgcagttgtttgcgagcttctgcttttgagatggccgagactggagatacagaaaatctactgagagagaagcatgcaatgtctagtgatgtgcaagggagtgtaaaaatgcttggtgacgggcacactgtgacggttcttaatgtccaaagcaagtcaagctctcctcagatacgctatcaaagtcctgtaggtcagaaaaggtcgtttactccagcacaagacaacaggggcagtgattgttgtcatgcttgcgaaaggcatatatatcacccaatattgccatggataaatggtgatggaagcatgaataacactgtctacgaaggtctaagtcgtcgtattattggatataccatgcaatatccaggagtagtggaggaggatatcatccatcggatggatgtgttgaacccgcagacctgccggaccttgttggaaaagctgatgtttgataaacacctttatgctcgggtgtttgatgaacgtgccccttcggcacctacccttttgcagagtattttgaagcaagatcgctgtaaagaaccatccaagtgtaacaagcgttactttgctaacccaatgagtacatttctgctatagacagatgcgctaggctctctagtgttagttgatttgtgcatatcgtcactctcaaacgatttatattacagactagttgtacactttgtgattcgttattaccggactgtttatgctgttggtaatcagatttaaaaaaaaaaaaaaaaaaaa

SEQ ID NO: 46653 - DNA, 359 bp, Oryza sativa
  Clone ID: PAT_MRT4530_4949C.1
tttgtggttttttttttttttttttttttttttttttttttttttttttttttttttttttttttaaaaaacggaaccacccccccattccggaagggctgctcaaacctgggcctggaagcccaaccccaagcctcgggggaaaaaaaggttttggttacccaaaggccccgggggcccagggggtttgttggcccccggggtttggaaaccaaagggggggggcccaatttttttccaaccccatttcccagggggtttggttttagccccccccctaaattttggggccggcccccctccgcaattgcaggacgaaagagtacaactactgtacaacttggcacgtttgcgttgga

SEQ ID NO: 46654 - DNA, 1731 bp, Oryza sativa
  Clone ID: PAT_MRT4530_494C.1
ccgggctgcagggtgcggccccgggccgtactgtatagcagagcagcagcctccgggcagacgagagccaaaggctttgctcttggcggctagggttttgtgtgccaaaccctaatccccttccttgcatcaatctcatggcggcgatttcgtcggggatggtggcttgaaaggtctgtgtgttcttgtttgggattgaggaatagagaggagctaagtggtgtggcggcgcggagaaatggggtccaagaaccagttcgatctcctcgtcgacgtcgacaacgatgacccctcccacctcatcgccgccgccgagaagaaggctgcggcggcggccgcgtcgcccaagctcgcctcatcgccggcgcccgctccggccaagggtcccactaagcccgcgccacccgcgcaagccgtaagggaagcgaggaactacggtgctccacgcgatggggctggccgtggtggcccagggcgtggaagaggcggcggccgaggaggcaggggcggtccgaggcgagatttcggtgagggtgatgccaacggctttgagggtggctatggtggtggtggtgggtttggtgatggtggattggctcgcggtgaagacggtgaggggagacaggcagagaggggccgtgggccacgccagccctaccgtggaggtggtcgccgcggtggctatagtgatgggcagagtggagacgactatggacgtccgcgcagggcgtatgagcgccacagcggcactggccgtggctatgagttgaagcgtgaggggtctggccgcggcaattggggaactgtcaccgatgaaggccttgcacaggaagttgcggaggctgttaacactgaggaggctcctgcaactgcagaggatgagaagaaacctgaagatgtgccacagtctgaggtcgacaaggacaaggagagtccagagaatgaagaagaagaaaaagaacctgaggataaggagatgactttggaggaatatgagaaagtgctggaggagaagcggaaagctttgcttgcactgaaggctgaggagaggaaagttgaagtcgacaaggagttgcaggccatgcaacagctctctgtcaaaaaggctaatgaggaagtgtttatcaagctgggctctgacaaggacttgaaaaagaaagaaaaggatgaaaaggatgaacgtaccaagaagtccctgagcatcaatgaattcttgaagccggctgaaggagagaggtactacaaccctggccgtggtcgtggccgtggcaggggtcgtggtgatcgtgggggtttctatggtggttacaatggcaacggtggtcgcagacaggctgccgctccggtgatcgaagatcaggcccagttcccctcgctaggtgggaaatgaaacgaacgctcggatctagcggctcggttgtcttgttggttcacctgaaaactgtgtcgtcgtcgagttgagtactgtgttgttatgtcgcccctcccagataggagtgttgtgtttatcgcctgtctgtatccccgtgcatatccgaggtgcacccatccatcaccattgctgtgtttgtcagacatagtagctcatgtgctgcttctattttccgacaggagtggacagtgtatgccatgtttctgatgagtagtcgtgtgtgcgttggttcagagattttgctcagctgagaatggatcccatggtttattaaagaagataatctgaaacctgtcccc

SEQ ID NO: 46655 - DNA, 1996 bp, Oryza sativa
  Clone ID: PAT_MRT4530_49500C.1
caaaaaacggctcggaaaaaaccacccccccccccccccacacacacagctgtgacaccgcccgccgcgagagcacacgacgccgcccgcgacgcgacgcgacgccgcccacgacgcgcgcgctcgctcgatcgctcgccggcgtcgagccatgcggggtggcggcggcggcagttcgaagggtacaagcggcgggtcgccgagaggaggtcctcctcctccgccgccgccgccgatcgtcacgacggcgacggcgacggcggcgcggtggaggtggtggcggtggggaaggggaggaggtacgacgcgtacgtgcggaggagggacgagaagctgaggcaggggtggcgcgcgcggatggagcgcaaggaggccgagatgaaggcgctctgggcgcgcctcgacgtcgaccgccgccgcgacggcgacctccgcctctcccgccacgccaagaagcagctcggccacgaaggcgaccctctcgcgtcccaggacgacgcccaggaccaccacgccatcgccggccggcgccgcggcgagcccgaggctgtcgtcatccaaccccgacgcgcgacggcgagcgccgccgcagccggagccaccgtccacgccacggaaggagaacagggtgccgtccgccgcggcggcgtcgacggcggcggccacggcgacgccgcggctgagggcgctgtcacggagcaggagctcgctcaaggagtcggcgtcctccgtcagggacagcccgaggcgggcgccgccgccgccgcggcgtagccacgacggcgacgccggggacaggccgaagcagcagccggagccgagctccgatcagtcgttctactcgaacgtggactcctccttctcccacaggtcggagctcgagctcgccgcctccgccaccgactcgccgctgcacggctcgccgtcgagcaccggcccctccaccgagcagctgctcgaagccgacgccgcaatgctgaggaagaaacgggaggaggaggaggaagaagaagaagacgaggcggccgccggcgagatcaatagccttctgatcccgagcaccacgacgagcagcagcagcagcgttgcttgtccggtcaccgtgcagtcgccgatggaggcggtggcggggttcaagaggttcctgaccttcggcaagaagaacgccgccgccgcctccacccccactccattcccccccatccctcactcctctcaaagtcccaagtggtagtgagatgtcctataaaaccaagagctcactatcagcagcaaggggcagcaaggcgtgccacgtaagcacaaaacccccccttctcctacctcatcctgatatccccaaaccaccaaccaaacacacacacccaaacccgacgaacagccgcagctgcaggccacgcatcctcgccgtgaatctcccaccgcgctccggcgatggcattcgcggtctccaccgcctgcaggccgtccctgctcctgcccccgcgccagcgctcgtcgccgccgcggccgcggccgctcctctgcacgccctccaccgccgccttccgccgcggcgccctcagcgcgacaacaacgccaacgccggcgcgcgcagcactgccgtcgacgacggggaggaacaggatcgtctgcggcaaggtgacgacgacgaacaattacccctcctcctgtcgcagtcgcaggagcacgtgagcaagggcagcgcggcgcccaacttcacgctgagggaccaggacgggagggcggtgtcgctgtccaagttcaaggggaggccggtggtggtgtacttctaccccgccgacgagacccccggatgcaccaagcaggcctgcgccttccgcgactcctacgagaagttcaagaaggccggcgccgaggtcatcgggagtggggtgtgccggctgacctgttcgggacgctgccgggaaggcagacgtacgtgctcgacaagaacggcgtcgtccagtacatctacaacaaccagttccagccc

SEQ ID NO: 46656 - DNA, 1398 bp, Oryza sativa
  Clone ID: PAT_MRT4530_49501C.1
gggccacgcctcacgcttacataaagacatctgctgacctgaccctgaccccgttagagaggaaggaattgagatttaatcatggagatgaagctgaccatcaagcgggtgcccaccgtggtttccaactaccaggaggatgctgccgccaccgccggcgaacgcccccgcgccggctgcgggagggattgcctcggggattgctgcttgcccgattccaagcttccgctgtatgctttcaaggcgagtccgaaaaagccgtcttcgcaggaggatgcttccaacgatgagttctttgtcaatctcctgctcggcctgtgggaagacaggatggcccgaggtttgttccgatatgatgtcactgcctgtgagaccaaggttatcccaggcaaccttgggtttgttgcacaactgaatgaaggacgccacctcaagaagcgccctactgaattccgcgtggaccgtgtgcttcaaccatttgatgctgccaagttcaacttcaccaaagttggccaggaggaggtgctcttccaatttgagaatggtggtggtgatgacagcttctttgtggagagctccccaatcagtgttgctgatcgtgctcctaatgttgttgcaatcaatgtaagcccaattgaatatggccatgttcttctcattccccgtgtactggaccgcctgcctcagaggattgaccaggagagcttcttgcttgcactgcacatggctgctgaagccgcaagcccatacttcaggcttggctataatagtttgggtgcctttgcaaccatcaaccacctccactttcaggcatactacttgacagtgcctttccctgttgagaaggcagctaccaagaggattttccttgctgagggcacaatgaatagtggagtaaaggtgtccaagctgatgaactaccctgtgaggggactggtttttgagggaggcaactcactgagcgatctggccaatgtggtttccagcgcttgtatctggctgcaggacaacaatgtgccttacaatgttcttatctctgactgcggcaaaaagatcttcctcttccctcagtgctatgccgagaagcaggctctgggagaagtgagccaggagctactggacacgcaggttaacccagctgtgtgggagatcagtggccacatcgtgctgaaacgaaggagtgattacgaggaggcatcagaagcttctgcgtggagactcctcgctgaggtttccctgtcggaggaacgcttcgaggaagtgaaggcctacatctttgatgccgctggtctggttcagtccgacgaggaggaagtcagcgaagacgaggacgccacctacacgcctgtctccattgcccctcctgctgtcgcggaaggctgcctcgtccttcagtga

SEQ ID NO: 46657 - DNA, 522 bp, Oryza sativa
  Clone ID: PAT_MRT4530_49502C.1
tgcaggaattcggcacgaggctaggacgataggatcgtgaagtctttctttttttctccaggaatttatttcgattgggataatgaagtctttaatggcttatgggcctctacaacgtcgtaaagaagtagagacagaaggttatgaattcagaccaaaattcaaatttagaactttttggatggtaactggatgtacagggcaaaatatatatatatttttggtcgggtatctggatttcactgggtgctggtaattctagacaaaccagtatctcgaaccctgatcttgacagagagccacatagatagtacaatagttgtataaagtggtctatcaagtaacatcagcacatgatgtttgtgatccaaagttgctagatatttcattagtttctcttactcccacttgctaatttctgcatgaatcagttcctattataccgaagagttctttttagttgtcatttagttcccaattaatttgatttttacaaaattttgtagcttgtgggcacgatga

SEQ ID NO: 46658 - DNA, 554 bp, Oryza sativa
  Clone ID: PAT_MRT4530_49503C.1
ggccgctcctctggacgccctccaccgccgccttccgccgcggcgccctcagcgcgacaacaacgccaacgccggcgcgcgcagcactgccgtcgacgacggggaggaacaggatcgtctgcggcaaggtgacgacgacgaacaattacccctcctcctgtcgcagtcgcaggagcacgatgatgcacgccgccgcgtggctgctgctgcagcagctgagcccagcagcagcgcgcgtggcgcgggcggttgatgacgattcgtcggtgcaggtgagcaagggcagcgcggcgcccaactttacgctgagggaccaggacgggagggcggtgtcgctgtccaagttcaaggggaggccggtggtggtgtacttttaccccgccgacgagacccccggatgcaccaagcaggcctgcgccttccgcgactcctacgagaagttcaagaaggccggcgccgaggtcatcggcatcagcggcgacgacgccgtcttcaaaaggagttcaagaagaagtacaagctgccgttcacgctgctgagcgacgaggggaaca

SEQ ID NO: 46659 - DNA, 1110 bp, Oryza sativa
  unsure (1)..(1110): unsure at all n locations
  Clone ID: PAT_MRT4530_49504C.1
ccccccctttttaaaacccccccccggaaattttttttgggggccccaaaaaaaaaattttctcttcccccccccgggcagtaacttttgttttttttatggggcccccccctnnntttttttttttttttttttttttttttttttttttntttttnttttttttttttttttttttttttttttttttttttttttttttttttttttttttttttttttttttttttttttttttttttttttttttttttttttcaaagaagatcctaatactttctttccaacaagatttacatacagaagccactgagaattggttgacaagggcaaacgttcaaggttcaagtaaagagtagtccccgccaaaaaagaaagaagaaaagaaagagtaaagagtagtcacgggctcacggcaatagcaagccagttgagaaatcagatgggacatcagacaaaaagttatcagaaccagcactagtgctgcatatattaaccaatgaatcgactccaaatttgaaggattacaacccatatgatacaattgatgcaaaatagcaataaatcgccactaaaaatgaagaataacaacccatatgatataattgatacaaaaaagccaggcaaagtggttatatacagagagtatatatctactatatacacggtacacgcttccatcaatccattttaccggcgaaagcccagcggccagtgagcggcgtcaggcaggggcgaagcggtccatgagcatgcacacggtggcctcggagtcggagaggaggatgctgctgtccctcgtcctcgtcgtgatctcctgcacaacaccatcaccaaccttactcttgcagctctccccttcgctctgagctcgctggccgaccccggcgtcggccgccggtgccgccccccggcccatcttggcgaactcccccagccaaactccaaccaggcccgccattgattaatgattagtctgttcctctctgcctctccgagctagctgagtgaattcactagcttcgcacacacactccaaagaaaagctcagttgagtagtagtacttgactggtttccggtggctaaccgcgcggcgttggggctcntac

SEQ ID NO: 46660 - DNA, 247 bp, Oryza sativa
  Clone ID: PAT_MRT4530_49505C.1
atgaagttaagcatgaaacgacccccgtacaaccgtacttctcgaatggacttctctttcccgggagcgccagaactcctctcactgctagaaacatggacgcctagagtgcatgaggatttaagttcatggagcaggtactgccaatgcgaggttatcgaaaagctttgccggggatcctctagagtcgacctgcaggcatgcaagcttcaaagttatttaagctatagagtttttatatccttaa

SEQ ID NO: 46661 - DNA, 457 bp, Oryza sativa
  unsure (1)..(457): unsure at all n locations
  Clone ID: PAT_MRT4530_49506C.1
cgtgtagtaaatggaaactggtggtggtgggtctacccttatctgctgctataatgtgcctatggaggatcaccaattcatgcctatctgctgcttcagtatgttcacccaattataggcaattgaccatacgtgctagttgcgagcttcagacagacaggatacagctacaggagtcgattcttacaagaagatagtaggcggcataatctttttgaaacaatgccctagcattgtgctttttctgcctttaggagactcaggatgtagaacgagcgtagcttgtagattgtcctcgaggaagtaataaggattttgttgaccccccatgatgcagatgcaaaggtggctgtaaatgtatgtcttcctcgcctgattttgaccacattctgatcgactcaacatttagcattttaccccccctaccagtaatnttgaaaaaaaaaaaaaaaaaaaa

SEQ ID NO: 46662 - DNA, 330 bp, Oryza sativa
  Clone ID: PAT_MRT4530_49507C.1
atgaccacgacacggcagcttgccgacccgtcaatgcaagctgaggacacacgcacgaacctcaacttggcgcagctgcagtgctcttcatgtttcagttcaggttcactggaattacacatacagatacagtgcccctgcctcttgactcttgtgcagtgccaagaggcggcaagctggctgcttgttggccagtcggatatatcgatcaaccgatcgaccggcaactgcaatttaacgcagtggaaagctctgccggcgaaagggaggaggcggcggctagtggcaggcagggtcgacgtgctgcgtacgtacgggcgccacccctga

SEQ ID NO: 46663 - DNA, 297 bp, Oryza sativa
  Clone ID: PAT_MRT4530_49508C.1
atggcgatcactgcatttggaggtcagtcgatatccagccgcctcatctatcgacgagacaagacgacgatcgatttgcgacggcagtttggctggcgatgccttcctccgtcaagcagcactggcccctcctctgctagccacgccgccgccgattcctccgccccgctcggccgctccttccgtctcgctgctaccgcgcgcgcgtgcccaaccgcctgtgaagcgggtccaaggtacgcaatgctaactgtgtcccctccctttgtccgccgcgatgccgccttcctccgctaa

SEQ ID NO: 46664 - DNA, 1410 bp, Oryza sativa
  Clone ID: PAT_MRT4530_49509C.1
tcaatcttctttggatcttcggtgatccgattccttctttccttctgccagcattccagggatcatcttttgattcccaccttctggaattccacatactttttccttgggccgatgggtgatccggatcccaccgagtttatcaacgctgaaacggagaggatccccttcaagcagaccaaaccagacttagctcaatggaaatcgacctttaggtcttggccgtccaagttgaaagggtacaagtcatggtacaagaggatggtggctgctaagcgatctaattgggagaaagtaggaatagcgcaatgcctggctttatctatagcagacataaaaaaggatgagcccctactttccgctgtcggctgcttttggtctgatacattgaatgcttttatcttgaggcagggacctatgactcccactttgcttgatgtgaagatgctaacaggcctggacatcctttcgtccactaatccttttgacttggacattaaatgctcttatcaactgaacacaaagaagaagaacaattgttggtcaggcttcatcgtcgaccatcggaagactggtctagtttcggatgaggaacatgctgcctttctttccctatggcttgagaggtttgttttctatgggtctacttgtgcaccgactgcgaacttccttcacttcgctgaagccctggtgagaaaggaaaaaattcctcttggccgatacctcctaggggcaacttatcagatgttacatgtttcctcagccggtatacttctaaataaaccggtcagttatgggggcccttggtggttcattcagctgtggttgacaattcacaccaacaccgtggccaacagaccttccctgcttgaatcggccgatctgtccaacatgttctcctttgacgttaaagaatttttaaatgagggtgagggaaatagccccgagggagctcagataaccgatatccaggatcgaattccagatgatttatccaacaagatagcctcggccgccttcctggagcaatatgagaagcaatgtcatcgggccacaaagaggatagccgatcctcacgaagcccaggctttggatgccacgatcgacacttgccagaagcaaataattgaagacaaagcaatcttagatcaactcgctattgccctatcgccgatggagcacgaacttgccactttgcaggtgaaagaggcagcactggtcgaagagctgcagcaatgccgagccgatatattgtctgtagaaggaaagatcaagaacttgccacatgccaccgaggagcaaaggtctaaactgaaagcctccctcaaacacttggctaatctagtcaagtcctccaaagagatcccagggaccacagagcaagatcaggaggatttagacgagatagac

SEQ ID NO: 46665 - DNA, 180 bp, Oryza sativa
  Clone ID: PAT_MRT4530_4950C.1
ttcctttatttttttttttgggaggggccgaggaaccgtcgccactccgacgatcccgtaccatccgccgccgccgccgagatttctcgagataagccatgggtcaagcactcggttggtacagtagatcatcgacagccatcagagtcttggagttgatgagtctggctgatgcacttt

SEQ ID NO: 46666 - DNA, 266 bp, Oryza sativa
  Clone ID: PAT_MRT4530_49510C.1
tttctttccactccacacccaggcacccagggcgagtgcgacttgacaaacacatggctcccaccgtggagtctgtagaggtggaggaggagcatcaggcagtggggctgggggaccgcgacttcttcggtcatctctctcctttcgccatttcccggaagagcactggagatgaccatgtggcgataaagattctgggtcgtggaaactgtcactctggcctgcactgcaataagaatgattggaagcactgcatttacccactt

SEQ ID NO: 46667 - DNA, 993 bp, Oryza sativa
  Clone ID: PAT_MRT4530_49511C.1
atgaagaaaccgctagaatgcaaattccaagtctcagccgatattggcgattttacactttatcagtttaagcatgtcacctttgacagttggtggtcggattggtcaaaacacctcttctctgctccatcattctattatcttaccaagattgataaccgcatcaagatatcaaaaccactggcaccgaaacgcagcctgagtgatcggccaattttctatgcccaggtgaaagcgtcatcgttgatagacccatcggccccatcggcacaagaaccgtccccatcggctcaagctgctccgtctgtccaagccgttaccgaagaaattacatccacctcttctaaggctaaggatctgtccaacatgttctcctttgacgttaaagaatttttaaatgagggtgagggaaatagccccgagggagctcagataaccgatgaagttagggccctattggtggaaatcgccgatcggctcaatgcctctttggacacccttgagatccaggatcgaattccagatgatttatccaacaagatagcctcggccgccttcctggagcaatatgagaagcaatgtcatcgggccacaaagaggatagccgatcctcacgaagcccaggctttggatgccacgatcgacacttgccagaagcaaataattgaagacaaagcaatcttagatcaactcgctattgccctatcgccgatggagcacgaacttgccactttgcaggtgaaagaggcagcactggtcgaagagctgcagcaatgccgagccgatatattgtctgtagaaggaaagatcaagaacttgccacatgccaccgaggagcaaaggtctaaactgaaagcctccctcaaacacttggctaatctagtcaagtcctccaaagagatcccagggaccacagagcaagatcaggaggatttagacgagatagaccaaattcgcctgcgtgtgattaacgcaattgttgacggttgttga

SEQ ID NO: 46668 - DNA, 987 bp, Oryza sativa
  Clone ID: PAT_MRT4530_49512C.1
atgggtgatccggatcccaccgagtttatcaacgctgaaacggagaggatccccttcaagcagaccaaaccagacttagctcaatggaaatcgacctttaggtcttggccgtccaagttgaaagggtacaagtcatggtacaagaggatggtggctgctaagcgatctaattgggagaaagtaggaatagcgcaatgcctggctttatctatagcagacataaaaaaggatgagcccctactttccgctgtcggctgcttttggtctgatacattgaatgcttttatcttgaggcagggacctatgactcccactttgcttgatgtgaagatgctaacaggcctggacatcctttcgtccactaatccttttgacttggacattaaatgctcttatcaactgaacacaaagaagaagaacaattgttggtcaggcttcatcgtcgaccatcggaagactggtctagtttcggatgaggaacatgctgcctttctttccctatggcttgagaggtttgttttctatgggtctacttgtgcaccgactgcgaacttccttcacttcgctgaagccctggtgagaaaggaaaaaattcctcttggccgatacctcctaggggcaacttatcagatgttacatgtttcctcagccggtatacttctaaataaaccggtcagttatgggggcccttggtggttcattcagctgtggttgacaattcacaccaacaccgtggccaacagaccttccctgcttgaatcggccttccccaaatatgactctaatgaagatcaatcagaatcccggtcgtgcaagtcttatagggaagcagcttcagtttaccatggtgtcaagccatccgttgaaggtttcaagacatggttcgacatattttacaacaacaatgctactgatgttctctttgcctatgatgcctacaccgagttcaatctcccaatggatctagatctgagccagaaatgctaa

SEQ ID NO: 46669 - DNA, 246 bp, Oryza sativa
  Clone ID: PAT_MRT4530_49513C.1
atgccccgaaaacccaaggtttcctccgcaaggttcgtccacggaggggccatgcacgcagctgcgaggaagcttcctacttcctactccggacgactcaggtgtaacctggcgcggagccaggctgcgaccgtgacgttgcatgctccttcagcttcacgaattatctccattaatctctaccagaaattcaacaacgttaaatgtaaactgccaactttgcctcgaccacgatccagcaagtag

SEQ ID NO: 46670 - DNA, 1992 bp, Oryza sativa
  Clone ID: PAT_MRT4530_49514C.1
atgacctccgagtacgagggttatcggggtatgaagtcgctgccgacttcatcggtgatgatcagcggccctacgacggcaagcaacgtccccatccctctttgtgagaaggggaaggctgatcgcgaggctacgatcatcgtgagtgtatttgagaactcctttacttctgcttttctggatcgtactgagacttcatgcgtgcaggctctccctctgactgacgtcatcgggccgctcgtggaccaccaggcagcggcctcattgaaagagggcattgccaaggaggcatctgacattgctgctgctgctgctgctacaatgagtggcagcaacattccgaagagagggaggaagttctcctctgtgcttgggaatcgtcggaaggcgcctaccccattgcctgccttcatggaaatcacggaaatccttcataggacggcgcgggcgaaagcggtgcaagacgggtctggaggaaactccagcgcgtctcctgcagcggcttcgacagatgtcgtggtcgtgcccaggagccgtgaggcgacgcccagcggccctgccggcagccttgtgcctacttgcggcccgcccgctgacgtcctcacctggggggagttccaaatcgagatggagcgcatcctccaggcagatgctcacggcatagggcgcgagattgaggaggtgaaggcggcggcggcggcgtcgtcggcgaacgaacgcgctgacaagctgacgcgtgacctggcggaggtccgcgaggacctccagaagatgagggagctggtggccggcaacgagcggcagcggcaggggctcgagcaccacatgtcagagctcgagaacaacctatcggagatccgtggctcgctgcgggttacatacaccggcctgtaccagctcgccgggcagtgcggtgttacgaccaccatcccggtgaatcccaatgagttctcgctgatgtcttcgctcgcggaactggccacggcgatggaggagatcggcaacgtcatctccggcggcggctcgggagcgcaagctcgccgcgacggcgaaggggcggacgaggacggcgacgcgacggcgaccacgatggcgaccttcccgagcgacggcgacggctggagcgacggcgaagcacggctggagcggcggcgacgacggcggcacgaggagatcccctccaagcatgcggccaggatcggggaggagacgtccaacgggatctacaccgaggtgtgccacgacctcacgtgcgtaaggttggtgcaccctgaactcgacctccagaggatcttagatcagggggctgctaactacgcgccctccttagatgtcgacgtcgaggatgtccagcagcgcgggcagcctgagtcgccggtagtcgtttcggcacttgcgctcgagccatatgtgctgcaggactacgtagatcagaacttgtccatggaagcgagcatggcgacgacttccttagacctcgagagtgcgttggccgaccgagatcgtcggatccaatattggaggacaaagttcgaggtggctgaactcgagaggactatggtagaagttaagaaggaccgagccgtagaagcactccgaggtcgcgaggtgtggttcaactcgtacctcaggagctattgtacggccatggccggagtctgcagggaactccgagtacctcgcgggcaccccgaggagtcagcggctggatacatctcgtggctgaatggggcctgtgctcagcttgaaggcatcggcaagcgtatcgatgaggcccttaagcaggagtgtcgtcgatcgagccaatatgctggagggcacgtgttggcctgtatccagtatcaccacccgcagctgcacctcgagttcctccacgaagggttttctccttctcggaggactcccgcagagatagataatctggcgaagtcgattgcgccgcttgcagagaaggtcttccagtccatggactggcgttggccttcctggtag

SEQ ID NO: 46671 - DNA, 963 bp, Oryza sativa
  Clone ID: PAT_MRT4530_49515C.1
atggccgcatcccgttattaccttaatctggattttgacgtttccgatatgaagcctctgcccgactactgcttttccgaggcctgggaggtgtgggaagcccatgctgatcaatcggattatgaaagggaacaggctgttttgaggttctatgaagaaaaggagaaggagataaaagctgcttattctgaagccctaagtgacgaggatgatgaggagaaagatggagaaatatgtcagcttctgggttacgaagaggaacatggacaagtctctgcagggatggaagatataccagaaaaccatgtcaaaaaaggctgcacttacgcgagcccagagtacctggcggagctaactcagaaaattctattggaaataaatgtaaatgaagaccttggcaatgtgctatgtcatgaaatgaagcatgctcgtaatgaaggaggacaagtatttgaaggtgagctggaacacaagaaggcaagaatggcagaaagctcacagaacaaaggagaagatgaagagacccttctgccaaaaaagttcatgttgctatccgttgagaatgggagtgggttctgttggggtggaaaagctaattcgtacatacgaggtagtggcccacatttctatttgaaaggggaaaaagtctactttgactcccttaaaaagcctttgatcctggtcaacactgctgtcttagttggggtaatgggaaataaagggcgggggcttcttggcgggtttcttccacgtccagtgttccccatctcgttgcttcggcaggaggtgtggctgcggcggcttcgtcgacggcgaggagggtgtaaccgtgtaagagcagggatagtgagctcgccgagtgagggctcgtcggcatctgcttcgcacatcctgtatcgggtaggcccattcgactacgagctggcagtggcgtgcaagtccaggaccaaggctgcgaggtag

SEQ ID NO: 46672 - DNA, 1923 bp, Oryza sativa
  Clone ID: PAT_MRT4530_49516C.1
atggatctcgacaagtccacttccaccagcgcgtccctgaagaagctgcaggaggacggtgctctccctggtcgcgggaccatggagagagaaccaggaggtattgaacccgaacctgtcctaggcctcatggttgcggttgaggattatattctttgcggttttcttcccccgccctccgagtttcttcttctcgtcttgaatttctacggcctttccttgctccatctgaaccccaattccatcgccttccttagtattttctcctatctttgtgaggcctacattggggtagagctgtttttttatctcttccgcttctactatgagttgtgctggatggaacctaaaaaggtgtccggatgtgtcggtttccgacttcgggatggcctgaagtcgcgatacatccccttccagtgcccctcttctcgtagcaaatggcgagcgaggtggttctatcttcagatagaaaatttggatccagtctttgttgttcttgaggagcaaccagacaagatcctggaatggaccgccaagcccgccttaactccctcccttcagtctttcaccgatatcatcgatgaccttcgagtacgagggttcttgggatatgaagtcgctgccgatttcattggtttaaacagcgaaaccgtggagcgccgcgttggtcaggtgatgatcagcggccttacgacggtgagcaacgtccccgtccccctttgcgagaaggggaaggccgatcgcgaggctgcgatcaacgctcttcctctgaccgacgtcatcgggccgctcgcggaccaccagtcggcggcggcgtcgttaaaggagggcgtcgccaagatcaaatcaactggcacgctagcatacccaaaggcaagttttggacctgcactggagttaagcagatctcccaggcctcgtgtttttcacatcaacaccaaggaggcatccgacattgctaccgctgctgccgcgacgagtggcagcaacgttccgaagagagggaggaagttctcctccgtgctcgggactcgtcggaaggcgcctaccccatcgcttgactttatgaaaatcacggaaatccttcacagggcggcgcgggcgaaggcggcgcaagatgggtctggagcggtctttagtgtgtctcctgcagcagcctcgacagatgtcgtggtcgtgcctagggaccgggaggcgacgcccagcggctctgccggtggccttgtgcccgctcggggcccgcccgctgacgtcctcacctggggggagctccaagctgagatggagcgcatccttcaggccggcgctcgcggcataggatgcgagattgaggtggccaaggcggcggcggcgtcgtcggcaaatgaacgtgccgacaaactagcgcgtgacctagcgaaggtccgcgaggacctccagaaaatgagggagctggtggccggaaacgagagagatgtcgatgtcgaggatgtccagcagcgtgggcagcctgagttgccggtggtcgttccggcacttgcgcttgagccatatgtgccacaggatgacgctgatcaagacctgtccgtagaaatgggcacggcgacgacttccttagacctcgagagtgcgttggccgaccgagatcgtcgtatccaatattggaggacgaagttcgaggtggtcgaactcgagaggactatggtggaagtcaagaaggaccaagccgtggaagcactccaaggtcgcgaggtgtggttcaactcgtacctcaggagctgttgtacggccatggccggagtctgtagggagctccgagtacctcacgggaatcccgaggagttggcggccgcatacatctcgtggttgaatggagcctgtgctcagcttgaaggcatcggcaggcatatcgatcgagccgatatgctggagggcacatgctag

SEQ ID NO: 46673 - DNA, 1674 bp, Oryza sativa
  Clone ID: PAT_MRT4530_49517C.1
atggagaaaataacagatgaaggaatagaagggaagtaccacagtagaaggaaagtaccacagtactggaaaccacagactacaaagagaatagcagaacttgatgataccgacgagaccgtagttgagttggctcgactagatcaccctggcgacttggttcctaaagactccgacttcgtaggctatggtggttgtgttggcgatgtcggagtcgttgtcattctcgactggtcgatctcgcctccaagctttcctcgtcttctccgctcccgcaaaaagaaaaccctagcttggtcatcttggtcccttctccggcgatctccggcggcaacggatctcgacaagtccacttccaccagttcgtccctgaagaagctgcaggaagacggcgctctccttggtcgtgggactatggagagagaaccaggaggtactgaacccaaacccgtcctaggccgcatggttgcggttgaggactatattctttatggttttcttcctccaccttccgagtttcttctcctcgtcttgaatttctacggtctttctttgctccacctgaaccccaattctatcgccttcctcagtattttctcctatctttgtgaggcctacattggggtagagccctttcttgatctcttccgtttctactatgagttgcgctggatggaacctaaaaaggtgtccggatgtgtcggtttcaggcttcgggatggcatgaagtcgcgatacatccccttccagtgcccctcttctcgtagcaaatggcgggggaggtggttctatcttcagatagagaattcggatccagtcttcattgttcctgaggagcaaccagataagattcccgaatggaccaccaaacccgccctaaccccctcccttcagtctttcatcgatgtcattgatgacctccgagtacgaggattgttggggtatgaagtcactgccgacttcatcggtttaaacagcgaaaccgtgaagcgccgcgttggtcaggtgatgattagcggcactactacggcgagtaaagtccccgtccccctttgcgagaagggaaaggtcgatcgcgaggctgcgatcaacgtccttcctctgactgacgtcatcgggccgctcgtggaccaccaggtggtggcttcgttgaaagagggcgtcgcccaggaggcgtccgacgttcctgctgctgccacgaccagtggcggcaacattccgaagagggggaggaagttttcctccgtgcttggtaatcgtcggaaggcgcccaccacatcgcctgtcttcatggcaatcacggaaatccttcacagggcggcgcgggcgaaggcggtgcaagacgggtctggagggaactccaacctcgagagtgcgttggccgaccgagatcgtcggatccaatattggaggacgaaattcgaggtggccgaactcgagaggactatggtggaggtgaagaaggaccgagccgtagaagcgctccggggtcgcgaggtgtggttcaactcgtacctcaggagctgttgtacggccatggccggagtctgcagggaactccgagtaccttgcggggaccctgaggagtcggcggctggatacatctcgtggctgaatggggcttgtgctcagcttgaaggcgtcggcaagcgtatcgatgaggccctgaagtag

SEQ ID NO: 46674 - DNA, 483 bp, Oryza sativa
  Clone ID: PAT_MRT4530_49518C.1
atggactggaagactttctctgcaagcggcgccatcgacttcgccagaccatctatctctgcgagagtcctccgagaaagctccattcaaccacgagatgtatgcggccgccaactcctcgggattcccgtgaggtactcggagctccctacagactccggccatggccgtacaacagctcctgaggtacgagttgaaccacacctcgcgaccttggagtgcttccacggcttggtccttcttgacttccaccatagtcctctcgagttcgaccacctcgaacttcgtcctccaatattggatacgacgatctcggtcggccaacgcactctcgaggtcttgatcagcgtcatcctgtggcacatatggctcaagcgcaagtgccggaacgaccaccggcaactcaggctgcccacgctgctggacatcctcgacatcgacatctctacaacgacaacaaagtactcggaatcaacatgctaa

SEQ ID NO: 46675 - DNA, 377 bp, Oryza sativa
  unsure (1)..(377): unsure at all n locations
  Clone ID: PAT_MRT4530_49519C.1
aataatggataaatgcataaattaaaccaggttttatttttacaacggattaatacaaaagtacatcaattttttttanagaaatattataaaaacaataaacccaccccccctacctcaaaaaaggttaccagtctttattgggattatttgaccccttttttttatcaaaattagtacataccgccctcttataaaaccctattaaagccccccctggatgcccccttcaaaaaaaaccttttatacataaaaaatggggaaattaacccagttttacttttgtataaaatgcccctcaaaaaaaagggcaattttttatttggggcccaaattaaaaaaattttttgtgtcccaaaccaaaaaccatttcccgg

SEQ ID NO: 46676 - DNA, 450 bp, Oryza sativa
  Clone ID: PAT_MRT4530_4951C.1
atgtaccagatcatatcatctcctcgtctcccccgactcttcatctcctcgacttatcatctcctcgttgttgccttgctgccgcccaagcaggccgccagtgtgacgtgcgactgcgaggaaggcgacggcaggactccgacgggacttgcgatggacgggcgagtcagcggaggtggtcgggagattggtgccgtagcaggtagcggtgagccgtcggcggcggcgtttcttcgggaggtggtgggcgctgcggaggacgccgacggtgggcagaagcgcctcctcggctgtggcggaggttgccctagaggcagcaacagcctaagtgtcggtgcaaggatctcggtgaggaggaggcggatcagacgaaggcagatcccgtcggcggcggaggcctgggtgtttgagaggcagaggtggatttcgacatcggtggcagccctgtag

SEQ ID NO: 46677 - DNA, 2470 bp, Oryza sativa
  Clone ID: PAT_MRT4530_49520C.1
gggagatacccgtagaccggatatagagggtattgggatacgctgatatcgacgagaccgtagtcgagttggttcgactagatcacccggcgacttggctcctgtaggctccgacttcgtaggctgtggtggatgtgttgactgtgagattcgatgccttaggtcctctcggggggtcccttttataccgcaggtcaattggttttaagtagaactcagagacatcggacctcacacgatacagtaacgacccagctctgtccgagtaggactccttccatccgtggactccgtgatgaatttccttatccgtaaccctaacagtgatctcgacaagtccacttccaccagcgcgtccatgaagaagctgcaggaggacggcgctctcccttgtcgcgggaccatggagagagaaccaggaggtattgaacccgaacctgtcctgggccgcatggttgcggttgaggactatattctttgtggttttcttcctccgccctccgagtttcttcttctcgtcttgaatatctatggtctttctttgctccacctgaaccccaattccatcgcctttctcagtattttctcccatctttgtgaggcctacattggggtagagccctttcttgatctctttcgcttctactatgagttgcgctggatggaacctaaaaagatagaaaattcggatctagtctttgttgttcctgaggagcaaccagataagatttccgaatgggccgccaaacctgccctaaccccttcccttcagtctttcatcgatgtcatcgatgacctccgagtacgagggttatcggggtatgaagtcgctgccgacttcatcggtaggtggattcagccgctctaggcccgagcccacctagcctttgactattctgggccggaggacgcgacctgggtttctcctcggggtttaaacagcaaaaccgtggagcaccgcgtcggttaggtgatgatcagcggccctacgacggcaagcaacgtccccatccctctttgtgagaaggggaaggctgatcgcgaggctacgatcatcgtgagtgtatttgagaactcctttacttctgcttttctggatcgtactgagacttcatgcgtgcaggctctccctctgactgacgtcatcgggccgctcgtggaccaccaggcagcggcctcattgaaagagggcattgccaaggaggcatctgacattgctgctgctgctgctgctacaatgagtggcagcaacattccgaagagagggaggaagttctcctctgtgcttgggaatcgtcggaaggcgcctaccccattgcctgccttcatggaaatcacggaaatccttcataggacggcgcgggcgaaagcggtgcaagacgggtctggaggaaactccagcgcgtctcctgcagcggcttcgacagatgtcgtggtcgtgcccaggagccgtgaggcgacgcccagcggccctgccggcagccttgtgcctacttgcggcccgcccgctgacgtcctcacctggggggagttccaaatcgagatggagcgcatcctccaggcagatgctcacggcatagggcgcgagattgaggaggtgaaggcggcggcggcggcgtcgtcggcgaacgaacgcgctgacaagctgacgcgtgacctggcggaggtccgcgaggacctccagaagatgagggagctggtggccggcaacgagcggcagcggcaggggctcgagcaccacatgtcagagctcgagaacaacctatcggagatccgtggctcgctgcgggttacatacaccggcctgtaccagctcgccgggcagtgcggtgttacgaccaccatcccggtgaatcccaatgagttctcgctgatgtcttcgctcgcggaactggccacggcgatggaggagatcccctccaagcatgcggccaggatcggggaggagacgtccaacgggatctacaccgaggtgtgccacgacctcacgtgcgtaaggttggtgcaccctgaactcgacctccagaggatcttagatcagggggctgctaactacgcgcgtaagggcgtgatggaagaacatgttgattttgagtactttgttgtcgtcgtagagatgtcgacgtcgaggatgtccagcagcgcggacctcgagagtgcgttggccgaccgagatcgtcggatccaatattggaggacaaagttcgaggtggctgaactcgagaggactatggtagaagttaagaaggaccgagccgtagaagcactccgaggtcgcgaggtgtggttcaactcgtacctcaggagctattgtacggccatggccggagtctgcagggaactccgagtacctcgcgggcaccccgaggagtcagcggctggatacatctcgtggctgaatggggcctgtgctcagcttgaaggcatcggcaagcgtatcgatgaggcccttaagcaggagtgtcgtcga

SEQ ID NO: 46678 - DNA, 378 bp, Oryza sativa
  Clone ID: PAT_MRT4530_49521C.1
atgcccccctacatatcggctcgatcgacgacactcctacttcagggcctcatcgatacgcttgccgacgccttcaagctgagcacaagccccattcagccacgagatgtatccagccgccgactcctcagggtccccgcaaggtactcggagttccctgcagactccggccatggccgtacaacagctcctgaggtacgagttgaaccacacctcgcgaccccggagcgcttctacggctcggtccttcttcacctccaccatagtcctctcgagttcggccacctcgaatttcgtcctccaatattggatccgacgatctcggtcggccaacgcactctcgagctcaagcgcaagtgccggaatgactaccagtga

SEQ ID NO: 46679 - DNA, 807 bp, Oryza sativa
  Clone ID: PAT_MRT4530_49522C.1
tcataagtcattttcagtgaatctatacttgtctttatactcaatccaacttctgtcaaactcatcagcatctatattatcataaaggaatttcttgaagtatgcaagcttttgccaacgaaggtgacgtttcatattctcctcaatgtgccaactacacaatctattatcagtattgggcataaccttcataattgccttcgccgttgatgcatccccgtcagtgatcaatgactttcgatgtttttggtgcattgcctccaaaagagtttgccacagccaaacatatgaagaaattgtctcatttgacaaaataccacacccaaaaataattgtgttgcaatgatggttagcttcaacaaaaggtacaaatggaatattgtaccagttcacacaacatatactgtcaaatattaccatgtcaccgaatgcttcatagacaagctgtgattgactgtttgtcaaaataaattccttagacgccccttttttgtttatgctatatctaaagaagacctgggtcttcttattgcgtaacaagagactcccgctatccctgtaatttcttcctcttgactccaccacagtcgtcttgccaagtgaaattggatccttcctagctgtcacatcatagacttcccgaagaccatgttcacctccatctaccgttttaaatttgacttgatcgtgtccctgcatcctatccggactcctgagctcccttttggattgcaacaccaacacatgcttgatttgatccgcacgcttctccctgagcgccggtccttctgtagcagttgccgtcat

SEQ ID NO: 46680 - DNA, 255 bp, Oryza sativa
  Clone ID: PAT_MRT4530_49523C.1
atgagggatcgatatcgttttcagtccagcctagttgcccagctacatcgatcgattgatcagctgctgccgatggatggacgcatggacacatctatatatctctgtcagtgtcaccgggcggctacagcaagcattagctatagctgcaggcatttcccgggtttaatccgatcaattcgctgcactttcacagtggagtattcgattgatccgggtgtgtttgatttggactgcgagcccccgaccatgaca

SEQ ID NO: 46681 - DNA, 1248 bp, Oryza sativa
  Clone ID: PAT_MRT4530_49524C.1
atgtcgcggtaccaggacaacccgcaagccgcggcggagccgccgccggacggcccgggctccgggatcctcgtggtggaggacgaggcggccgtcgagcgggcgacgcggtggtgggggttgtggctggacaggcaggtgtacggcctccccttcccgcagagccggaagctcaaggtggagtacgccaccgcgaggatggacggcggcggccgcgccggcacgacccataggacccacacccacacggatcgcgacgacgtcgtgttcgtgcccgtcgtcggccagccgctgtcgtccggccgctactacgccgtccgggccacggggaggcacgccgggaaggtgtcggcgtgctcgagggaggaggacgtggtgacgtgctgcggcctctggtccttcgcgaacgacgcgtcgccgaggccgttcgtccgcggcgacgtctaccagcaggtggaggtggtgcagctgtcgcgccggggcggattcagggcggtggccgtcgcgccggacggcgtcccgccgggctacctgaggaggaaggggtggaaggtccacacctcggcgtccacgagctgcaacctcactgacacggcgcacgggacggactggccgctccgccgccggatgcctgacctcgaaagcttcgacgtcggcgtaggaggctcgacgcccgtcgtcgtcggcaggtggtactgcccgttcatgttcatcaaggacggcggcgagcagtggctcaaggaccaggtcaagcggtgcatgttctacaagatgacgctggagcagagctgggaggagatctacagctgcgacaacacccaccggggcagcatcagcagcaggctggacgaggtcgaggttagcgtgacggtgcgccggtcgacggcgctgctgggcggcgccggcgcggtgcaaggaggcgcaccgcaggtgttcgacggggtgatgtggttcctgccggcggcgagcccggctgcggcggcaggaggaggaggagggctggggctggacatggtggtgtgggagaagatggagtgggagctggagaagggagggtgggttgccggcaatggcgacgacgtggagaggatcaagagggtggagaggcatgacgggctgggcggccactgggacaagtttgggtgttacctactggttgagaggttcgtgctcacgaggatggatggcagcgttgcgttgacgtacgaattcaggcacactgacaagattacaaccaagtgggagtga

SEQ ID NO: 46682 - DNA, 1805 bp, Oryza sativa
  Clone ID: PAT_MRT4530_49525C.1
cctctgctgagtcctggactcctccctcgccacctccccaaattagcagaagccgcgcaccacgcgcacgcgcacgtccgcgccgaggaggagctggcctcgcgcgctcttcgaggagagaccgcgggggaaaccctagaggctgcgccgccgctcgccgccggccggccgcggcgggtggtggggcagggcctgacgatttcttgttcaacaagcagtaagatctgaggttttgggggtgggattagggttgttgccggggtttgtttggtgttgcggcggcgccgcggagggggttcatggcggggtcgaagtttgggtcgttcaagtcggagaaggggagctcggcgggggcggcggcgggggccggagcggcggcgcagaggagggacccatacgaggtgcttggggtggggcgtaatgccaccgagcaggagatcaagagcgccttccgccgcatggccctcaagtaccatccagacaagaatgcagacgaccctgttgcctcggacaagtttcaagaagccacattctcttacaacatactgtcacatcccgataatgggacgcagtatgattactaaggaatcgaggccattgaagcagatagtcaagaactggagatggaccaattaagtctgaagaatataaatccaagagcaactgcctggtggagcccagaagtggtgatgatgaacacagcaaggtaaaagaaaccttaagaacaacttcgaagggagtaattgttcaacatccatttcaaagtagacaagagaatcccctggtgaggaaaatattactcggaagacattactcccatggaattgaaagcaaaggaattgctcctggagttaatatcttgttcttagtcaaccactccatgggaataaatggtcaggaatctcggtttggcattaagaaagagaccctcgcaaattatattttctgacgtgatgtagcattgtgtttcctgataagttaggagcctctgcagtttctgaaatgatgttagattttacataaagtgttcatagagacaacgatgcgtggcggtaaaggtactcgcagaaccatctaagctgactaaagttgagtcagagtatagagaggtcttagcgaagttcaccgagatgaccagcagatacgctcaagaaatgcagacgatcgacgagcttctcaaggaaaggaatgcaattcatgcatcctacaccaacaacacaactctgcaacggagttccagtagcaacaaagggaaaacatccctctaaagagtccaaaagtgatgatgaccaaactgtgaaaaaggaaaagaaatcgaagagcaagtccatggagggatccagaagtgatgatgatggtcctagaaaggaaaagaaacctaaggaacgacttcgaaggaagaaatggttcaacatccatttgaaagtagacaagagaagaccctgctgaggaaggtattccctgcaagttactactcccaggaaatggaacccaagggagttgctccgagaagaaatatctttttctttgtcgtccactccatgggatcaaataggcaggaatctcagtttgacattcggaaagacaccctcgcaaattattttttctcctgtgacgtaacattttgtttcctgaaaagtcaggagcctcggcagtttcagaaatgatgtaaaatattacatgtagtgttcttttggggatcttactggcgctgtatccgttcacccggaaccaagatggttaatgatgtgtgtatacagcttcaagaaactgtcttatgttgtaaaaaaaaaaaaacacaaaac

SEQ ID NO: 46683 - DNA, 172 bp, Oryza sativa
  unsure (1)..(172): unsure at all n locations
  Clone ID: PAT_MRT4530_49526C.1
tccaagggcacctgcaccactatgcccctanaatggtacacgtcatgagatctatggtgaccaancgtacgtgaccacttggtgaaaagcaccactaggagtgatatttggaaggccattactcactgtaagctgtttggtggcctcactgactgtattggatgatnccact

SEQ ID NO: 46684 - DNA, 560 bp, Oryza sativa
  Clone ID: PAT_MRT4530_49527C.1
cgttctttttttttttttttttttttttttttttttttttttttttttttggttttttttttttttttttttttttttttttttttttttttttttttttagcttatttttttgctcttgattttttttagataaggtttttattcaacatttccatgactccttttattttatataaaaaaaaaaaaacattttgttttttttgttcaccgaaagatcttatttattttctagaagggggcctttggttttttttttttccccaaaccaagttttgttaaaataatccaatacacctgtggttcccgggttttgggaaccgcgttttagggggagccattgttttcctgtacttgtggaattgaatctctctcactgcaaccaacttgaccttccaccggtggaataaacttaccctttctggttcaacagtccttttggccagcatagagtgccaagaacacaggcaccattgcagcagctagatgctttagagtatgtccgcttacaatttgatgggtcttttttttttttaataatggggggggcttttttttttt

SEQ ID NO: 46685 - DNA, 548 bp, Oryza sativa
  Clone ID: PAT_MRT4530_49528C.1
gtggctaggaatgtatctgcatgtggactctatttttcagattgtactctctagcaacactgatcttgtatctttaacctttcttctgtcatttctagtgtagatttatgtcatgctttccgtacaagttatggttgtttgttactagaagcttagccttttaagtacattgcaaggttttttttatgtaaaatactgcaaggtattattccaaccaagtccattctgtcatttacttagtgtttacgcatcatagttttctttcctaatcactgttccccacagtgatctgtatgttaatgaatattattatatatcacacaaatgtttctcaaaatccaataagacccatctacattttgcatttgagttataaaatttgattatctggagacagaggtttactttccagttctaaatacactttcactgtaatcttgtgagagcaacagctttctgtagatgtgtagctttggacatgtgtttggttctttatttcatttttagtggaatttggctattgttaagattattccattagttggatc

SEQ ID NO: 46686 - DNA, 930 bp, Oryza sativa
  Clone ID: PAT_MRT4530_49529C.1
atgcaccgccacatctcccacgccgcccgtgatctctccccaggaaccatatcacatgttccccatgttgctgatggagtgggaacctccggtcctacttctctgacataccatgtccttgaaaatatctgcacattgaagttcagtttaggttttatatttcaactaatacaatgtagatatttgaagaggaaaaataaccgtactccgcaagatcatccaggaataggtgaggtcattactatgtatgctttcttcaagccatcttggaccccgaacaccacagtgacatgtgatcaagaataccaggcattggcttacccctggtctgccaaggagactccggcctatagctctatgatgctcccaaacgtgaaggattacaaaggacggacatggctgttaccacttgccgcctacctctacaacccatggagcacacaacaaacaaagcccgctgtccggtccgattttaataactatcctccgcattcctccaaccatcattggatggaggtttcctaccttgagccttgcaccaccgactttaggacaacgatatctgtcgccacgtggaagctgagcgcaaggggagccaagctgcttctaccgaaccctggtcgagcccctcacgtcgccttttgcctgggacactgcctggtgggttctcatgatggtgcatggtggttggcttcaaatatgttgattttactttggtttgtgggccttccaatccgtgtactcgcatctgattggccagacatgtcaggtggttttcatccaaaattcacatgcatacaaatattcaccaagacttgcggaaatggaattgaaggtcgaatttggtacttaagaaccgtcaacatagtattaggatgcgtcccatctgctcagatttgtattactatgatgcatctaatgcagtactaa

SEQ ID NO: 46687 - DNA, 504 bp, Oryza sativa
  Clone ID: PAT_MRT4530_4952C.1
atgccacgttccgctagtaagcccacctcatctgtcatcatccaatcagaactagccaaccagacgcgagctaaaggatccgcttccacttcactggattcctatgcctccgccacctacagggctgccaccgatgtcgaaatccacctctgcctctcaaacacccaggcctccgccgccgacgggatctgccttcgtctgatccgcctcctcctcaccgagatccttgcaccgacacttaggctgttgctgcctctagggcaacctccgccacagccgaggaggcgcttctgcctacgaaccacctccgtcggatccgccttctccatgcagagggctggttgtcgatgtcctccgctgccgcagttctctgtcgcacccaccgtcggcgtcctccgcagcgcccaccacctcccgaagaaacgccgccgccgacggctcaccgctacctgctacggcaccaatctcccgaccacctccgctaccgcccgcgccaggcgctag

SEQ ID NO: 46688 - DNA, 743 bp, Oryza sativa
  Clone ID: PAT_MRT4530_49530C.1
atgtgcctcccgttcctctgcggcggtgacgaccccgtgaaaaatagcgaggtacggccgccggcgaggcacccgagagaaggtccaaacgacggcgacggcggccacaagccatcaccacctccgcatgccggcggcgccgtcaacggcaacgggggagctgctccgcctgctccggcgacgtcgccggacaccgaggtccgggcgcccacctatggcgataaacagatcagtcctccgaaggaaggcgcagctgggaagccgcctatggtggtcccggcggcaaatcatccgcaagctcccaccggcgaggaggctaagaaggctcacggcggcggcggcgccgtcggtcgccgcaatggaatttcgtccacggtactcacggcgccgccgccagtgggacccatggctgctccagcgacgacagtgaaggatgctcctcctgctgctgctgctgctgccgccaacgacgtccatggcgatgctgatgagcaacaccctggctatggtgatcacggcgaggtcgacgaccgcaagcctcgacgcagatcatggttgtgaggtgagcaatggcacgcgactacatattggctgtgctgtgaattgtgatcctcgttcttcatgcatacgccgctctcggcgctgctggctggtgatcaacgatgcatatatacatatgtggtatatttttacaggtttcccccccaataaagagacattagttgctaaaaaaaaaaaaaaaa

SEQ ID NO: 46689 - DNA, 168 bp, Oryza sativa
  Clone ID: PAT_MRT4530_49531C.1
atggttccatgtcttcaacaaaaaccagaagccggcttcatctccattgtcgagctctgccacggccagaatccggcggaggcgaggctgcaggacatgatcaacaagcgtgttcgacaaagaccagaagacgactttatctccgtgctatgcttcatcacatcatag

SEQ ID NO: 46690 - DNA, 669 bp, Oryza sativa
  Clone ID: PAT_MRT4530_49532C.1
atggacatctcgaggccaaatgaaggctacacgggctgcggctcggtagtcgagatgtcatggcacagggccggatgggtaaaggggttatgtcacatcctttacgacgggttccacggccgtggaatgctgagtaaagatgtgtcttgtggccacctcgagcaacaccatcccggcctccagggggccggtttgaccgtgcatgtgccgtcggtcagactggccttatgctccggtcagaccgccgttgtggcgccggtcagaccggccaaggcacgccggtcagaccgccacaatgtggccggtctgactgcccctggtcatgccgagcccagtgaaagggggcaaagctatggctctccctccaaatccatgggaggaacaacggcgacggttgtgcaagaagtgaagggccgcgtgcgacgacaggaaaatagcctatggagatggttccctagcggcaactcgagatctacatgggtgaggaggtttcagaggagtttgccggtgtggagcgcctggcgcggggaggaagctagtgacatcaacgagatggcacaccagaggcggtgcaaggagggggctgccggccggcgctacggcgatgggcgcagaggtggaagcgccccgtggcagccgtcggcgagcttcttagctgcgacggattag

SEQ ID NO: 46691 - DNA, 340 bp, Oryza sativa
  Clone ID: PAT_MRT4530_49533C.1
aactagttctagatcggaatggtagccatcctgctcgtgctgcattcgctagccacgccgtccgctgaggccagaggcgcattgcgcagggggagaaggtagagtgacatagatgttctatgcgactagatgtgccgtttgcttaggacgaaagtacaagccaacggggaacgaaaataaccttacacctctacgaacaccaaacatttgatgtaaaacttacaacatgcaaatcaagaaaaacacttgaaacacttgaaggattgtcaatcgtgaaccaacaaggaaggcttgacgcttaaactcaactaaaaatggaacaaaaaaggactgaaaaacg

SEQ ID NO: 46692 - DNA, 676 bp, Oryza sativa
  unsure (1)..(676): unsure at all n locations
  Clone ID: PAT_MRT4530_49534C.1
ggagcggcgatggcggcggcgcttcggtggatgtcggcggcgcgacgtacccgtgtgtggcgggctgatgccacgcatggctccggcggagctgaagccgacgacgcgcagcgggtcgacaccgaggcgagccccagtctggtgcggcccactcaggcaggcgagccccgatccggtgagttatgcccccaaggtttttagggtttgtactgatttggggttttgatttaggatttgcaaaaattagggttcttgatttgtggaaactaaaaattagggtttcaaatttggggaattttaatttttgggagaatacgtgaaaaggatttggttggcactctgttctattgacggaatcaaattggcacccgttttttctcaacaaaacccacctagtagatcaattgaagaaagaaacggtgaaatagatgtgactaccaaaagaaaaaaactgattaccgggtctatttggtctggatggtgggcctggctttgtagattaggaaattgttgtgattattgccgaacaatcctcacatgtaatncggattcaattttttttccacccgagtttggttctttctttttttttgaatcggacatattcgattttttttgggtggngggtgatggaaattncgactgggattttgggggaggcggagggggacgaaaa

SEQ ID NO: 46693 - DNA, 1217 bp, Oryza sativa
  unsure (1)..(1217): unsure at all n locations
  Clone ID: PAT_MRT4530_49535C.1
aaaacatgggagagacaacatgtagtaccattatataacaataacaaaacaagtggcatcaccatccgttcgaccatttgagtgaaggtgatggtctgattactcagtgcacgctctacaattgaaggtagacaattcttcttgaggcctcttatttgcgccagatcacatgggcataaccccaaatgtcacgatcgcaactttattacactcttccatggtgatgtaattaggtaaagtgagagaaaatgaaaaaaaaacaaaacaaacaggggagatgattcgccggttagttgaccccgtagatccacttctcttcgttgctggtgtaagagaccagctccctgggctcaaaccagagaccaatctcagcctttgcagtctctgggccatcgcttccatggatgatgttcctgccaacaacaacagcaaggtcacccctgatggttcctggttcagacttctgtgggtctgtagcaccaatcagttttctcccgtacttgataacaccctctccttcccaaaccatggcaagcacagggccagagctaaggaagtcacacaatccattgaagaaaggtctgtctttcaaatcatgatagtgcttctgagcaaattctttggatggaaccaccagcttgatggcaacaagcttgaatccttttctttcaaatcgggacagtatctcagaaatcaggcccctttggacgccgtcaggcttgatggcgataaaggtgcgctccatctctgcagcatgcgcctcctgatcctgtagcatgtaaacagcggcggggatggcagcgagccatccggcggcggcggcggaggagttgtggtggtaggagtaggcgtaagctgtggggagggtcttcctccccaggttggtgagggtggccagcgccgcgttcctcccctcggctaggagggaggtgcgcggggaggaggcggcggcggtggcggagaggagagacttggcggccttgcacgccgactggcagagcttgctcatggtggcttggctagggttccgctgctgctgctgggttgcggcgtcgatcgatgtgatttgattggattggattggattgtacccccaccccactagccctccagtcttgtactagtatgtactatgatatggtagtagtggcctcgccggcgtcgtcggtgccgctttgatccggaggacctcttctccttctcagtgntgngcagac

SEQ ID NO: 46694 - DNA, 3663 bp, Oryza sativa
  Clone ID: PAT_MRT4530_49536C.1
atgtgaggctggaaggagaacgcctcccctctccccctccaccccggcggctcctactccctcctcccccgcaaacgccctccctcatccccgccccctccgcagcccccgtgcccgccgccgcgccgcccgctcaccgacgtatccgtcaactcccgtcgacagcggcaatccggagggggaggacgctgcttcggcttcaacagcccacatcaaaagtagctcagtcacagaagcaggatccttcagaacgcgaaaggaggaaaaaacaaactcttcctgactgaaaacgatgcacctatcgatgggctttgaccgtgctcgtggtgttatcatagcgaccgtcgctgctgcattccctcagtctcttcagtacgccagaacggcgaaccaagctgcaaaccggccattctctttgggggagtcttgctatgccaaaaagacatgaactgcaatggaacagtaaatcatacatctcacgcatgactctaatcgccggcttctaaaacctacatgatttttcaggtagattctttctgggcatcttaatgtgcagggggagtgagctgtgagaagaatgccttagcagcgggtgatgattccaagtgattagcctgaaggaaagacatcagttgaaaggccgatggaggtacggtatgaaaattcacctttcctaaaaattgatctgcaatgtctagctaaatagccacagggggtggagagttgttaggtgtcaagtggctaaaggaacttaggatgttttgtttgcttgggcggcagtttgaggatgcattctggaacatcagtgacattactgaggaggtgcaccatacaggctcttctgccaagtgccaggaggatatggacggaaaaaatagcgatggtccttcagttccctcagtaatttgccatgaagagcgggaaggagagcttgtcgatgcattcttggaggatcttgatgctatccatcagggtgatgctaccaagggccaggaggagccacaggaaacggaactagaaattgaggaaaatgaagggtgtgttccaaagaagtactacgaatatttgcagtccctgaatgacaggcagagggaagctgcatgtagtgatgtgactattccactaatgatagttgctggtccaggaagtggaaaggaatttccaccatcaaacattcttgctatgacattcacaactgctgctgcttctgaaatgcgggatcgaattgggacagtggtggggaaggcagttgccaaggagattgtaataagcacatttcactcattctgcttgcagctttgcaggacccatgctgaaaagctaggccgcacatctgaattcataatctatggaaatgggcagcagaggagggctgttattgaggcagagcgtctattggaaagtgacaaaaataatggtctaggagatgcaaataagaattgcgatggagatattaaaaattctttcaaggacaaagctaagaaatggcagaagtttgttacacaggcaaaagcttctggtaggactcccgaggagtatgaaaagaagggggatttgacaggagcttcaattcttcggcactacaatgaaatattaaggtcttgtaatgctcttgattaccatgattttattaattcatcgataacccttctcacaaagtttcctgaagtatacgacgagtgccgaaatacatggcaggcaatagtagttgatgagtttcaggatacaagtgctatgcaatattatcttttaaagacactagcatcccacaaccgcataactattgttggtgacgaagatcagtccatcttcagtttcaatggtgctgatgtctctggctttgattcatttcgtagagattttccaaatcacaaagaggtcagattgagcaagaactatcgctctacacgggcaattgttgaagcagcaacagctttaattcacaacaacactaaacggcaaagccacaaacttgctgagaccgacaatccctctgggaataagatcattgttaaggagtgccacagtgaagattcacaatgtgcatttgttattgacaagattattgaaaccacatctagttcagttgaaggatgtcattttggcaaaattgctgtcctatatcgcagacagatcactggcaaagcattccaggcgtcattccgcaacagaaaaattccttttaatattcatggtgtggctttctacaggaaaaaggttatcaaagcaattatggccatacttaaaactacattaccaggctgtgatgatgatgccccatggcatcaagccttcaaggccattcttcctggtgacaaggaagaaaaaaagaagattatacatcatattgaaaagatttcattggctagaaagtgtagcttcatatcggctgctactgacatcttcagtgcaaaggtctctggtaccttcaaaagggcccagattactcaaggaagaaaggttttatcagccttggatagcctatcaaaacttgttgaaaggttgtatttaatgagctttgccttcatgtatgatctgttagaagtagatttagaaacgcgccatttttttttcttatggtgcaagtgctgcactattcactgttctctggttcacttcaagaaatacctacttgaaaagcgtgcgattgttgatgctgatgggggtaaattattaaatgaagataatgacatcagatcagtccttcagtttttaatggatgatgtgtctgacttcttatcaacacatttttctagttcagtggatacaagcaagactgaggagaaaggctgtgcttctacacttaaagcctttattgattatatctctttgagagaaactgaaaacttcagatcacgaaaggaggaaaataaaaactctatcacattaacaactatccaccagatgtatattcccttctatgattcgcagtcaaaaggtttagagtgggatgttgtgtttatcgtgcaggagtattttcttgcttttgttcacttcagtccttttgctcaggcaaatgattcagaaattcctttgttgcatgagtacaatggcactgtgaaagaagctggaagcacactggagctgctgcaaccttcacgcttcctcagggagattcctgctcaccttcttgaggtacagggtgagggaactgtgagaagaactcctgaacagccggtgaacattccatttgatcaacctgaaggagatacatcagttgaaaggcctatggtggtacggaatgaaacttcacctttcccagaaatggatcagccatgtcttgctaatgatttcttgaagaggtttgaaattgaggatagagcaataatttcacatatatttcatcaatgggcgaagaaacaggcatttcaaaatccaaaaaggctgcttgataagattggttttgttattgatgaacgtttacgaggtaaaggatacaagcgcaaggatgtattgtgcaagctgaaatcattcttaagtggtgatgaagcgtttggttatgcacaatatgaacatttccaaaagcagaggatagagaactccatgggttcctcagaacctacacctaagcagatatcgtacctccggaacctggggtgcaccatcacacccacgtctcgcctgcacgcgtcgcatcttatcgagaagtacaaatctctatga

SEQ ID NO: 46695 - DNA, 1896 bp, Oryza sativa
  Clone ID: PAT_MRT4530_49537C.1
atggcgtggtggtggtggtggtcggaggcggtggtggtgggcggagggacgggcggcgggagcagcggcacggtggtgtccatctgcgtgttcacggcggtgctgtgcgtgtgcctcgtcgccggccacctcctcgaggagaacaagtgggtcaacgagtccatcaccgccctcctcatcggttgtgttgtaggtgctatcatatttctgttgagtgaaggcaagaactcgcgaatcctgaggttcgacgagcagctcttcttcatctatgtacttcctcccataatcttcaatgcaggcttccaggtcaagaagaagcagttctttcacaattttctcaccataatgtcctttgggatattcggcgtgttcatctcagttgcgatagtttcaacaggttgctactggctcttcccaaaagttggttttggggaccttggcgcggtagattatctagatctaatcttatttacaactacagctttgggagcaatattttcctcaacagatactgtctgcacattgcaggtcatcagccaggatgagacacctagattgtacagtttggtgtttggggaaggagtggtcaatgatgcaacctcagttgtgcttttcaacgctataaagaatctggatatcactcagctcaaaggcggggttgcgctaaaagtcatttcagattttctctacctgttcttcactagcactatgcttggagttacaattgggctatcaactgcttatgctctcaaagctctgtattttggtaggcactccactgatagggaagtagctttgatggctctcatggcttatttgtcatatatgctggcagagtttcttgatctgagtgggattttgatggtgttcttttgtggaattgttatgtcccattacgcatggcataatgtgacggaaagctcaagaatcacaaccaggcacatatttgcaacgctgtcatttatcgccgagacattcatctttctttatgttggaatggatgcacttgacattgataagtggaaaacatcagagacaagctttaaaacatcactcggtatctttggaatcatcatatcgctcgttttattgggaagagctgcattcgttttccctctatccattatgtcaaattacatgagtgggagttctgaaaaagcgccaatcacattcaatcaccagttcaccttttcaggtgtaactttggatccagttcatgcaaccatcatcaccagtacaatcattgtagtatttttcaccactctggtgtttggcttcttgacaaggccactcataagtgccatactcccgcatcaacaccggcaatcaacgacaccggggaccggaggaggaggccgtagcacgggcagcaactccccgaaggacgacttcatcatgccgttcctctcgcctgatgaagaggcgtcagggagcggcagtgggttcctccaggccaagaggagcatctccatgctcctggagaggccagtccacacggtgcacatctactggaggaagttcgacgacaggttcatgaggcccatcttcggtggaccgatggagcgcgatcgcggtgactcgagatgccgggagagtatttgcggtgatggactgggagtcggcttggggataagacgacgtccgtggtggtcagagatcatgcgggatactaaggccagagttcaatacacgtggttggtgaagattccatatggcatacgatggagggaatcttcaccggagaaaaagccgacgaggacatccatggcagaagcaaccaagacgaaggagccggacgccgacgaccccttcgagctgtacaaaaagggattaacccaacaacgggagatacccgagaagtctaaacctaagcttactagtgaaggaaggaactag

SEQ ID NO: 46696 - DNA, 330 bp, Oryza sativa
  Clone ID: PAT_MRT4530_49538C.1
atgccgagatgcggatgcgatgggaagaggagaggaaaacccgtggacccatatccacgggattatcacgcgggccgcacgttcccggggggctcgcagaagatgggccgcgggatgcccaaagccgaagcaggccgcagcgtcagcccatacccagcacgcgcggtcccaataatgcgggcggggatgcagagccagcacgcgcgggcggaagacgacgacgactgggctgagcagccgccgtgccgtcacggcagctcatatcgcaggcggcgatgcaagacttgcacgcgcgcgctggccggcagccggcagcggactgtgggctag

SEQ ID NO: 46697 - DNA, 760 bp, Oryza sativa
  Clone ID: PAT_MRT4530_49539C.1
cagagattgtctcacaggtcttatcagtagaatctcttaggtatatatgctcactggagctattgaagaactgaacatgaacaaaacacccattcttcctgcacttgatcttccacctccagtggcaatgtgccaactatttctgctcgatcagtaacagttaccgcgatcgcgctccatcggtccaccgaagatgggcctcatgaacctgtcgtcgaacttcctccagtagatgtgcaccgtgtggactggcctctccaggagcatggagatgctcctcttggcctggaggaacccactgccgctccctgacgcctcttcatcaggcgagaggaacggcatgatgaagtcgtccttcggggagttgctgcccgtgctacggcctcctcctccggtccccggtgtcgttgattgccggtgttgatgcgggagtatggcacttatgagtggccttgtcaagaagccaaacaccagagtggtgaaaaatactacaatgattgtactggtgatgatggttgcatgaactggatccaaagttacacctgaaaaggtgaactgattatatgctagtgcgatcgaaacagctcctctcatgaggcccgcccaccaaatcccccccccgtgattgaatgtgattggcgctttttcaagaactcccactcatgtaatttgacataatggatagagggaaaacgaatgcagctcttcccaataaaacgagcgatatgatgattccaaagataccgagtgatgtttaaag

SEQ ID NO: 46698 - DNA, 1753 bp, Oryza sativa
  Clone ID: PAT_MRT4530_4953C.1
cccacgcgtccgctcgtctccacgaacgaacgaaacacgccttcttccccaacgaccaaaccaaagtttgggtgaagaaaaaaaaatatcgccgcgtttttatcccccacgagacgagtcgagacgaccaaaagcctaactaatcgggggcaagacgaggaggagagcggattctcgtcggcttcggcgaccggaagaggagaggagaccgaccccgcgccgtgttccgccgccgccgccgccgccgacgacgacgacggcaagtaggaatttgattctcctggggaattaacttgttaggagaaaaggaatttgggatgggcgaccatgtggtggtgaatgtggaaggcttgggaaacgatggaggggctgtggagaagccatctgaggccgtgaacagctcagtggtggctgctgcgtcgctttctacgactgttgatacggtcgaggagggcggtggagaggaggagccgctcatccaggcggcggagtgccgtatatgccaggaggaggatagcatcaagaacctcgagaagccttgtgcttgcagtggcagcctcaagtatgcgtgtgcaacgctggtaagggacacaatataagcatggatacacagctccacctcgtgttgaaccagacgataccatcatagatatcggtggtgattgggcacgtgacccaagaattattgctgtagcggctgcacaacgtcgtcttcttgaaactgagtatgatgaatatgctggtactgatgctagtggtgctgcattctgccgttctgctgcacttatactaatggccttgttgctattgaggcatgctttgtctatctcagacaatgaaggagatgatgatgcttctaccatgttctcgctctttctacttcgagctgctggatttctgctgccatgctatatcatggcttggatattcagtattttgcatcgccggcgacaaagacaggaagcggctgcaattgctgcagcagaggtggcattcatcctgcaatcagcccaaggccatgcccttcagttcaccatcgctccagactcccccgccactccacagcatgagccacagcagcagcagccgcagccgcagccgcagcaatagctagttacttcagtagggtcgctcaactactgactcgcacatgcagaagaagaggatacctcagctagtggccgctttgttgtttcctgttgcaactggcccagggacgctaagaacctggcctcgccttgtgtggccgggtagaaaccttgtaaaacgccagagattcatttgttgcaagcgaccgcagcttaagccccgctacccttcgatttgtctctgtgtaactcaagcattgatttattgtaaatttgtcgtctgttggagtccatttttttagttcctttgccaagtgttttactgccatgtacagtattattacatgggagcttttatctttcaaagaattaatctgagtgagtgtgaaactgttaggctacgtttgctgagaggttaagcccctgtttgggatgcttctggcttctgcccccccgaccgaatctagcttctcagcccaaagtggatctctctcccgaacaagataatcaggttacatgacctaaaggcgggtttggggaactcagatcctgcatttggcagctagtatggtcattatgttgctgttgtgctaaattaggacgcatcagttgttacttggtgctcgtttaacttattccataattttgaaatgttttcatcggtt

SEQ ID NO: 46699 - DNA, 390 bp, Oryza sativa
  Clone ID: PAT_MRT4530_49540C.1
ctatggcagtggtagccctataggggcagcagcagcccgggacggcgggggcctgagcgccggtgcaaggttctctgcaaggcggaggtggatcttggcggcggcggcgaccctagggacgatggaggcttgggagtctaggcggatgaagatatcctcgacgacggaggtcctcaggatgtagcgcgcgtcgatgtagaggaagtagttgaccgcaccagctcgaccttctccttctcgtgcgttctcctcgccgtactcccacggtgatggaatacctccgccggtcacacccctcacaaatatatagaatccatgactcgggcctccaaggcccgtaggactcctattcggatccctatccgaattaagctcatattggatctccat

SEQ ID NO: 46700 - DNA, 443 bp, Oryza sativa
  Clone ID: PAT_MRT4530_49541C.1
ctttgagatgagccttattatagtctgtagattcgattagagatattctctttatggttatggataataaaacattgatttctagtgataaattcaagaaagcgaggaatgattttttaaaatcaccatcggatttgaatgctcagtatcgttatgcattggctatggtttattcaaaagatagaactcatattgaggaaggtttgaaattgcttaaagatttgtctggtaatgctaattttcctgagatttgtaattgtttatatcatatttgctatggatattttcgagttgagaaatatcacgatgttaagctttatgctgaaaaactttacaaagaatcacctaatttattgatacctgataaggattccatggctgttatcatgcacaaaactcaagcattggtactattatcggatgaatttttacagaaaccccat

SEQ ID NO: 46701 - DNA, 362 bp, Oryza sativa
  Clone ID: PAT_MRT4530_49542C.1
ctaaatttgctgaactcttgaacccagcctcatcccgtcaggacctcatcttcgatgcaattcctatggggtccagcagcaagaaagtggcgtcgattaatccctaagagcgagggatcggagtggattgagaaaaaataattcaacaccacaataaaaatgaaataaattatctctaaatctgctgtcaaatgacaattgcatcacatcaaagaacgggaaacttggatggatgttttgacttagtaaaatttttaggatccctcattacatggatctagtataagctgttaccctctagggtttattgtttatagggtatattatatgaatgcctttatgatggtgacatttacaagggt

SEQ ID NO: 46702 - DNA, 195 bp, Oryza sativa
  Clone ID: PAT_MRT4530_49543C.1
atgccggagcgtttgcgttcgcccggccgcccgctcatccctttgctcgcgttgcgccactcctgtcctgcacgatgggccgcccatgtcttcgagccggacagcacgcctgactgctggtgcagccgtgggcaggccatgccgggcgggccttatggccatctatattatagcccatggaagctctgggtttag

SEQ ID NO: 46703 - DNA, 335 bp, Oryza sativa
  Clone ID: PAT_MRT4530_49544C.1
ctacgaaagttgttttccttaaaatgtagtagtaggcttttaagtcgggagacacttccatctcaacgtcatcactacacaatataccttctagctagcgtactcagtcagtacaacagcctctaccacaggccagcaaccgagaacatagttcaacaaacaaagttgatcaaacttagtacagatatataaggatagcagaatcaagactcaggggggctggatctggaagatatatcacaccatacatcggttaagactacgttcgtaccatctatcccaaaacacagaccgagaacattccggattgcggacatagtagctcccagtcaaca

SEQ ID NO: 46704 - DNA, 691 bp, Oryza sativa
  Clone ID: PAT_MRT4530_49545C.1
agaacaactctattttggaaagaccaatggatgccacaacatctggaatatacctacccagttctgttctcttttgccataaacaaagagtgcgcagttgaatcacaatttagtcacaatacttggcagctacaactccatcccaacctctcctaccaggcagaaacagagttacaagcactattacaaaacctacaaactataagcccctctccagagacagcagacacaagagaactcctgtatcccaagcctttgatctcaacggcaaatgcttatagactgctgactttttcatggatccctttggaatccggctgattacatatggatctacacaattcctcagaactgcaaggtattcctgtggctagcttttagagacagattaaataccaaagccaatatggtcaacaaaaaatggagtaatgatccccactgcccaatctgcctggccctggaatcagcggaccgcattatcctaagatgcagaaatgcaaacaacctttggaaaagactaggacttatgcattcggccaacagatctgaaacaatctctgacttcatccaagcagtcattgacaggacccaatcaacaaaaaggttagaaccaatctggtttgcagcatgtgcttacacgctgtggaaatcgcgaaacaacatggtcttcgaaagacacatggaccatatt

SEQ ID NO: 46705 - DNA, 400 bp, Oryza sativa
  unsure (1)..(400): unsure at all n locations
  Clone ID: PAT_MRT4530_49546C.1
ctctgctgcctcttcagttcagatggagctggacactgatcctaccaagctgaaggccaagcccatcatcaaaccaaaagtagaaccctgcgacgacgatgacgagttgccgccgccgccgccgccggcttcaggatccggcgaggattgggaggccaccacccctctcgccgccggaaccccttcttcaccgccctcatcgccaagtctcatctccaccccaagttccagatgtggattccacctcggttccagcatcggctggcggacggaaggcngcacggcggcggtgctccaatccggcggcaagtcgttgggcgagaactaattcggccacctcaagatgaagancttggacgcgggattgtcgaagttcncggttgaaaaccggctccttgtt

SEQ ID NO: 46706 - DNA, 839 bp, Oryza sativa
  Clone ID: PAT_MRT4530_49547C.1
cccatgcttccgcccacgcgtccgcgcactgcaagcttagcttggtgaggatcgatcgatcggagaagatcatcagattgataattaaagtaagaaaggtcgaggatgcaggcggtgaaggagaaggtgaaggacaaggtgagcgcggtgaaggcgaaggggaaggtgagcaaggccaaggccgacgagaagaaggaggtggcgacggcgaggtcccacgccgagagggagctggcgcacgagcgcgctaaggccagggtcgccgccgccaagatggagctgcaccaggacaaggccctccaccgcgaggaggccatccagcacaggctccataagcatggcgccggaaccaccgccggcgttcgtccgaccgccgcggcgccggcgccgcacctcccacctgctagctactactagtagctagtatgcacgcatgtctctctgtgctgctaattatcgtaacagtttccactaatcaatctacttacaataaataataagccagccagtgtgcatgtaatctgtactgtgtgccagacaagatatcagtgatatatctatcgaggttgttaattagtcggaataatgatctctttagagtactggcaggaagttttataatggtcaaggggaagtgatcgatgattcgacttgagtggatatactgttactgttgctactgtatctgaatacagcgtgtatggaacttcttttgtgtttgtaatgttgcagccttcgcaggttcttctagacagttccctttgcaaccagtccatgcgtgtgtgctcaaccatgtgaatcgctttatatacatagaccgtatttgaggttttactttc

SEQ ID NO: 46707 - DNA, 529 bp, Oryza sativa
  Clone ID: PAT_MRT4530_49548C.1
ccggccgggtcacaactgatatcctcgaaaaaacattatcttccctacatcctcagccgtggtctttttgctgatattgcttcttgctcctactgtcgcgaaccatgggcgcttacaatggtgtcatacagggcggaatatactgccaaggatgtgctgcctgcccaaggtcatgtataaccaatatgaaagacgagtgcacctttgattgagactgagaaacaagaagtcgtcatggaatgcgaatagtgaagtcagaaaacgttttccagacattgtcaaacatggcgatcaagacctccttctggcagagtactgaaaccactctgaatacggcaagtgcagctggtcctgctgctgttacgacaacggtaaaatctgaagctgaactagaggttgctctacccaccaccactgagggataagcaacagtcatccctgctgctgctgctcctactgctcatgctgctcctgaagcagctccaagcactgctgatgctagatgaacacacataatgtttgccttgac

SEQ ID NO: 46708 - DNA, 663 bp, Oryza sativa
  Clone ID: PAT_MRT4530_49549C.1
atggggacggagcggaagcgcatggtgagcctcttcgacgtggtcgatgagagctccgtctctaccaagctcggccacgccggcaccaccaacagcaccgccaccgccgcggccaacccgtccatcaattggtggacggggaggccctactcggcaaggggatttttttctcttctagatggaataccaccacagtacattgacccccaaatccatcgattcgccgtggtcagtacaggggagcggtgctccgatctgcattttcatccgcaacagcgctttatctggtctgactctattcattttgttgtcaattggttggtttcgccatcgtttactctacaacagatgatttccatggccattgtttcatccacaggaaaattcatggacggtttacaatgtaaatttaatgttgggtggtgtcttatcttgaccaaaatttctcatcacgttcagttacataagagtcaggccttaaaggatatggcagctattaactgtataatattttgtcccaaatggttcagttctagagcacttaaagatggctattgcagatgtattgatgtgaccttcaatctccatgcagagtatcatatcatgacacacaaggatctttcgttgggtgctgtgtacaattattgttaccgaggcctttga

SEQ ID NO: 46709 - DNA, 786 bp, Oryza sativa
  Clone ID: PAT_MRT4530_4954C.1
atgaatccttccatcccccggcgtcgagccaaggacgccgccctccggcgagaggcggagcggtatgtgagcaccgctaaggatctcttgtcaggccaaatcacaaagggcaaaatcgagcgctgctggcacttactcatcaaggcccttggcctcgacccatgcgccccgagcgggcaggccctcttggtcgccgccgtcgccctccgcaccacccatcaccaccggtaccgcctcccgtccggggcccccgacccctacctcgtcttcggcctcaaccccgccgtcccaaccgcccgtgaccccgccgtcatcgaatcttactatcgccaagcctccgacctgctcaaccgctctctctgctctcacccccttgacccctgctatcccgccttctcccatgccgcccgcctcgtagccgatgcgtgggccgtcctgtcggatgctgaccgcaaagcatccctcgactccagattcgaaaagccgccgccgccgccgcctcagccatcggcgccgccaactgcacagcctggccgcggcacctctgctgctacgactattccaacccgtgcggcccggaaatatgccaccacaaattgcttggattggaaatacgccaccgcaaattcctacctcaagcgtaccgcgatcacggacgacgtcggccaccaggtggatgaggtcgagggaggcctggcggcgctgagcaacgatgtccagcgtgaggaggccacggggcacaggatggagcacgcatgggctagcgagaccgcgaggtcgtcttag

SEQ ID NO: 46710 - DNA, 861 bp, Oryza sativa
  Clone ID: PAT_MRT4530_49550C.1
atggtgagcatgccgccttcgctgccgccgctgccgctgccgccgcagctgagcctcgccgacctcaaggccctctccgtgctcggccgcggcgccaggggcgtcgtcttccacgtcgtgcccgccggcggcgccgccgcggcggtgtcggcgacggcggacgaggatcccatggcgctcaaggccatctcccgcgccgcggcgaggcacaagtgcgcggaggtcgccggcggtccgggcggcgacgggcaccggaggatctggttcgagcgggacgtgctgctcgcgctccgccacccgctgctcccctccctccgcggcgtcgtggccacggacagcgtcgtcgggttcgccatcgaccggtgcgccggcggcgacctgaacgcgctgcggcgccgccaggccgggagggtgttctccgtcgccgcgatacggttctacgccgcggagctggtgctcgcgctcgagcacctccacggcctcggcgtcgtgtaccgcgacctcaagccggagaacgtcctcatccaggactccggccacatcatgctcgtcgacttcgacctctccaccacgctcccgccgccgccacctcctccgccgcccgacacggctccgccgccacaaaccgcgcgctcccgcggcgggcggcgcgacagcacgaaggccgccgcggccgtcttcgggtgcttctcctcgcgccgcgccgcggcgtcacggccgtcgccgtcgtcgtcctcgtcgtcccggtccccgccgtccacgtccaggacggcctcgtcctcctcgtcgtccacgcgctgctcgtcggcggcggcgaagtcgaactcgttcgtggggacggaggactacgtggcgccgtag

SEQ ID NO: 46711 - DNA, 2874 bp, Oryza sativa
  Clone ID: PAT_MRT4530_49551C.1
ttttttttttttttttttttataaaaaattcctaaccatactgatattgtttatgcaaaaaaaaattgatatcgttttcatcacatcgatgtacagccaatgagccaaactattgcaaataaacacgagtaaatttcaataagaaaaaaaaactcaagaaatatctacgaatatggtactgataccacctcacttctcaatttcagtccaatcacgacattcacagatcggcgaagatcaaacgcacacagttacaccaatcgaaattaaaccatgtttcacttcttagcacctcatttttgctgtttcctaaactcatctgtacattccacctctaaacaaacctgatatcaaacgcaacatcaatcatctggtaaagagaaggcgaaattcgcgggcctgacaggagagctttttcacttgttacactaggacagctttgttaatgatacgttaaatgtcttatttgatacaaaagatgcactactacaatgcaagactttgacaaacaccagtctcaaatcttttcaacccttccatattctttttcctatcctcatcatctgtacatcgtctacacagcttcagtacaacatcaatccgacgtggcgaaggggaggggtagaagtagtagcagcaagaacattttcacctcttacacaaactgtcactttcttttttttgtctgattttcaagacatcctctccaaccacctcaaaccgcgcaacacaacgaacaccatccagagaatttggcttagccatcaatttgacctcattggttgatgcaagaatgattttatcttaggctttcgggatcgatcgcgaagaaactccgtgcaaaattgtgttaacaaagtcaacaatcctagaatccttcattgcatttgtggagttcttcatcaaggccgtcttcaaattttgcaaagtaataagatcgctcttgtttgggcctatcaattcaaactgttctcttaggtaatagatttgatctgttgtcaatgtcttggcaagggccctcaatgcagctctccgtaaagaagatgaacttatgtaagccctcataagcctataaattatcatgtccaaaggaagcttcacttcttcagtaccacgaatccatggatgacagagggcttgtgcagcagtcatcctcttgcggtaatctttattgagcagcctccttacaaagtcttttgcttcagcagagagggttggccatggggcttcctcaaaactagggtctgctttcagcacagctcggaatattcctgactcagtacgtgcccagaaaggacggctgccacaaagcaaaatatacactattactccaatgctccacatatctgcctcagtgccataagatcgatggagcacttcaggagcaacataatatgcacttccgacaatgtcattaagcctctcatctggctttacaaagtcagacaaaccgaagtctatgaccttcatggcagagttctcatcctttgaggagaaaaggaaattctctggtttcagatcccgatgaacaacaccctggagatggcaaaatgaagcaacacttaggatttggcgcatcacaacctttgcatcttcctcagaatattttccacctctagccaaaatcctgtccagcagttcacctcctttgcataactccataactatatatacattttcttcatcctcataagcatcataaaactgcactaagttgctgtgccctgccacagaactcaatattctgacttctctcctgacatcttcaatggcaatagcagtagtcttcttggccttggggatgaccttgacggcgacgtcgtcgcccttgagctcgcccttcttgcaggtggcggcgcaggtgtagccgaagtggccgcggccaacctcgcggccgagctcgtacttggcggcgaagtgcctggagaagccgaagcccttgtccagcgccacgccgggctcgccggactccgggatggacgcctcgttcggcttcaccgagccgtggcactgcgccaggagcgcgcggatgtgcttcgccggcgacggcggcgggaacggccgcttgaacccgccgcgcgcgggcgtcgacgccacgctcgagttcgccggcgagcccttgtagctcgacgccgggagcggatctacgaatatggacctgataccacctcacttctcaatttcagtccaatcacgacattcacccgccgaaggcgcaggcgacgctggcttcgccggcgccgaaattaaaccatgtttcactttcttagcacctcactcctcctccaccgttggctccagcaccgccgccgacttgccatggcagagacccatggagcccggatctaagaaccccccacaaaatccgagaaattccaagcaaaatcaccaggaaaatcaaggctggtcaaagaggcaagagttcatcacgtcgccccctcgaattccccaccaaaaaatccttccccctccccttcccacttccaccaaggaaggggggggaccggaaatcaagaaacggggggcggaaaaatgtcccggattccaaatcaagacaagaaacggagctggaacgaacaatccaccagctgctcctcgcacaggaggaggagaggataccaccaataaaaacaaactcaaaaacaaaccaaaaacaaatccgccactcgcccgctcccttcctcgcacaggcaatctctggatggatggatcaaccacccagacgaagaagaaacaagacggcgaggagtgtgtgtgtgtgtgaatcggaggaaggagagagagaggaggaggaggaggctgcctggcccgcacgctggctactgcgttgggaaggtcaacctgaagagggctgatggccaagtcaagtccgat

SEQ ID NO: 46712 - DNA, 524 bp, Oryza sativa
  unsure (1)..(524): unsure at all n locations
  Clone ID: PAT_MRT4530_49552C.1
agatgggtngaaaccgcccaccctggatgaaacatcgcccgacaaccccaaccaacgttgcagctcccccggggatgttncaacaagggagggacaaccccccgtgtcccccatcatccgtcacccgggcaacgaacttctccaccgctgntncgccgcccgctcatccgttgacggggcgntntgggagaaanttctacttgggggctccccaccccgccgaacgaaccggtgttcgggcgttctggcaaaggggttntctttcccgccacccgaacaacgntcccccgacgaangaacatccgtccacagaatcggtcgnacaggctttccccaggcccaaatcccatccgaatttctttccgggcggctccttccgttgccccgtgntttaccnaacnaaaaaaaaggtggcgccnaagttggggttgttctgggaacaccngggttgttgggaaaaaacattttgggcaaaaaagggctgggttgaaacctcccaaaggggaaggggccccccccgggaa

SEQ ID NO: 46713 - DNA, 563 bp, Oryza sativa
  Clone ID: PAT_MRT4530_49553C.1
attgtctcctccaggatgagctctcatgacataaatactgctcacacaagatttcagtcagcagctgagctccatgacttgtctctgaggcctgagctcagttctgactgccgagctgagacctcaggtcttcttcttcctccaatctctcacacgaaagaagaaagtttttaggaagctaggagcagcacacagtccttctctccctctcttcttgctatacagtgtgtattcaagagtgcttctgttcctgaaaattaaacaaattgataataattttcaaggaagtatgaaactaatagcttttgggttgttattattggggtatatacaatattttgctacacctgattccgaagtcatagcattgtatgaaataaggacaatgctcaatgacagtcgcggcgtactgaatggctggaataataatcaagttagtccctgctattttccttcaatcagttgtaatcaagatcaaaatgtcatttcaataaccaggagctcatcactactatctggattcttgtcacccagctttggaaagctactatttttacaacagc

SEQ ID NO: 46714 - DNA, 544 bp, Oryza sativa
  Clone ID: PAT_MRT4530_49554C.1
catgacttgtctctaaggcctgagctcagtctgggagacctcaggtcgtcttcttgctccaatctctcgtacgaaagaagaaagtttttaggaagctaggagcagcacacagtccttctccctctcttcttgctatttagtgcagacctcaaatccaaagtgcctttattttccatcaagaaagcaaacacagtgtattcaagagtgcttctgttcctgaaaattaaacaaattgataataattttcaaggaagtatgaaactaatagcttttgggctgttattactggggtatatacaatattttgctacacctgattccgaagtcatagcattgtatgaaataaggacaatgctcaatgacagtcgcggcgtactgaatggctggaataataatcaagttagtccctgctattttccttccatcagttgtaatcaagatcaaaaggtcatttcaataactttgagctcatcaggattatctggattcttgcacccagcattggaaagctactatatttacaacagctattattgaatgataa

SEQ ID NO: 46715 - DNA, 291 bp, Oryza sativa
  Clone ID: PAT_MRT4530_49555C.1
gtcgatgtgcaagacggagcaggagaaggcggcggcgatgaacgagacgttcgcggcggtggcgaacctggaggcggcgttcaaggagtgctccaaggggaagcccttcttcggcggcgacgccgtcgtgtacgtgaacgtcacgctcagcgccgagatcgtgtttgcgcgatcatggaagcctggcacgggatgcggctactcgatgctagccgatacccggtccttgacccgtgattggaccgattcgccgcgctgtacgctgccaaggcgaggttgtcggacaccggt

SEQ ID NO: 46716 - DNA, 254 bp, Oryza sativa
  Clone ID: PAT_MRT4530_49556C.1
ttgctgcggagttagagtctcggacgcagcgacggcctctacctgcagactcgcgacttggggctgctgaggaagaagattctttcgagttgtgagtttcgacgccatgccctagccggagcaacaagcaagtcagacaggcaagtttaattttcttcttttcttcttctaaacttactattgttccttttgctcctttcaaatgtcaggcaatgaggatagacagaggattagatagatggaagatcataact

SEQ ID NO: 46717 - DNA, 387 bp, Oryza sativa
  Clone ID: PAT_MRT4530_49557C.1
atggcaattaaggaccggttcataggaaaccctgggagacttaccgtgcttaccacaagcgggagtggccgtgcgtcgccgtcgctccagtcgtcgccgtcgctcgggaaggctgccgtcgtggtcgccgtcgcgtcgccgtcctcgtccaccccttcgccgtcgctgaagaccgccggagcaccgtcgccgtcgtcaagccgaagagtgccgccgcttcttcctcgacgccgtcgccgtccgttgatcttccgccgccgttttggtcaccgagctgaagatcttcctagtgggaggtgtcttaccgaagttggtttcgtcgctggcatcaaggattgcctgtggagtggagtcgccccgctgcagaagtcaagtttccaagtctag

SEQ ID NO: 46718 - DNA, 417 bp, Oryza sativa
  Clone ID: PAT_MRT4530_49558C.1
atgggagcgcggcgaaggcggcgaccacgtcttgggggcgcgttagctgttggcgccaaccgcgtgcggcgacggtggtgggagggcatctgcgccggccggcgaggcgggcggcgggtgccgtggtgcggaggcaaccggccggcggtcgtcgtcatcgacgacggatctagcgctgtttctgatctcgccgggcacgaactcgaggaggaagactaccctgttgtcgactacgggatggtttcatggttgccatatcgacaacagttagataagctaccccaaatattgtactgtggagagatagagatgaacgtcgctgtctcgccgtcggccggggccggccgttgcgtcgccggcggtggccgagccggccgccacgtgcgcccccggcaagccggccggcaggccacctga

SEQ ID NO: 46719 - DNA, 395 bp, Oryza sativa
  Clone ID: PAT_MRT4530_49559C.1
tcggtgcgtgcaggggacggctacctgacaacgcgcccagggcgtgggccgcgctccacaagctctccgtctgctgcccggggctcctccacgccggcgtcctcctcgagccctccgatgacgggacaggcggtggcgcagccttcgcctgcacgccgccgtcgcggctccagccctcggccgccgccaccaccgatgcgtccaaagggggaagagaaaagagagagaagggggagagagagaggaggaagggaaggagaaaggatgacatgcggcgggccatagcggcgatgaatccgacggcagcagccaacgagatgagcagccatcaccatcgttaccgccacgaagcacgtcgcagagcgacggtggaggcagcggcaacgcgacagtag

SEQ ID NO: 46720 - DNA, 1203 bp, Oryza sativa
  Clone ID: PAT_MRT4530_4955C.1
ggtccggaattctagtgccgaatttgacgtccgcaacaaagacaagtcgatcatggagaagacatcaaagttcttcttcccattgtagttctcctcctgctcgttcgttgtcaccacagctgcacagtatatatatacatatctgagaagcaacgatgtggaggggatccttttccatgttccagctttttgttcattttcttagataacggaaattgcctacaccatctgctgcctctttatgtttggcacatacctaataagttttgatactgaagaaatataaagagacgacataattagtttgggagaaacctatgaactttgctgaataaacaatagaacaaccaatagttccattctgtcatgtcatcctatatgtatagcactttatgaaattcagtttgcgagttattattctaaatatgatctggttaagtccgaaatcacatatatttagaaccaactacctaatttgaccccttcctttcgattgaaatttttggtgggacaatccatatattcatgtgtatagatcataataccagattttgttttctttcgtctaccaaaaattgaaaggatttttggcctaatattttttggcttctaactttttgcgtcagtgtcacatacattccaacatcattaaatttcaattttgtgacttccgctagtggtagaaatactataacacatattcagttgacatggtgtattattaggacgacttatctggtctggtatatatggatgaaaaaccatgatttcatgttttagccatgttaatattttgttgtttgagatggtaccagctgcacaggcaagggagtgcgagacgccaaccaacgagttcaaggggatctgcatgatggtggccaactgcgccaacgtgtgcctgactgagggcttctccggaggcaagtgcagcggcttccggcgccgctgcatgtgtaccaaggattgctagtcaagtggttaatccaaataactgcgcaaaattgcaacctatctatcttgcatgcttcaatgaataaaccttctctctaatagagccagaaggttttcattcatctcggctacaatactacctgtaacaattttctgtttcaggtaatcttttctttctattttttgtggtttgagtattaattgtattgttttttcttttgttgaagataattaaccccaattcgattcctt

SEQ ID NO: 46721 - DNA, 500 bp, Oryza sativa
  Clone ID: PAT_MRT4530_49560C.1
gaaggggcaaaccccaaaaagaaaaaaaaaaggggcccccaaaaaggggagaaaaaatgggggcccaaggggaccgccccaagggccaaaatttggccccccccggacgggaaaaaaaatccccaacccgggaaaaaacccaaccaacccacccttttgggcccacccggggggggaaaaacccccacccccccgcaaaatggcaaaccatatggggggccaccccccctggaagggaaaaaaaccccccacccccttaaaatgggcccaacccccgggaggggcccccccggaccgggcccccaaaaaggggaaaggggggtaaaacccccggggccccacccctttgggttggggggggcccccattttggggcccaccccaaaaaagggttttttgggggggcttaaaaaaccggcaaaaaaaaccgccgccaccagaagggggggggtaaagggttcccggggttccaaaaaaccggttaaaaagggaaacacccc

SEQ ID NO: 46722 - DNA, 216 bp, Oryza sativa
  unsure (1)..(216): unsure at all n locations
  Clone ID: PAT_MRT4530_49561C.1
atggagggcacgggagagagcggtggaaaaagaaaaaaggtggaggggagtgcgggcatgctttataggggctcgggagagacggatgtggccgaggcgctcccgatttcgtcggcgacgtgggaggttgaaggcncggcgcacgcacgggcgtggccgatgtggaccgaagaaggcggggtgcggcgnatggcnnacgtgggcgagtggccgtag

SEQ ID NO: 46723 - DNA, 343 bp, Oryza sativa
  Clone ID: PAT_MRT4530_49562C.1
gtcaaaacatttcattattcaggagcggccgtgatcactatctcagggcatgcaacacaacaacggtgggatcctactagctatgaggcaggccagctaatcctagtactggccggcggcaaagatgctgcactgctggggctaaacccggcacatcgacggcagttgtgccgagtactgactcgccctggtcagcctaacgcgggggatccccggctgctgctgctgctcgacgtagtagccctactccgacgacacctagccggagaacccttgctccgacgacgacccctggccgacggaagactttgacgacgactacgaccagtcttgctccaggggc

SEQ ID NO: 46724 - DNA, 189 bp, Oryza sativa
  Clone ID: PAT_MRT4530_49563C.1
cgtgctttgtgccgtgctcatggacctagtgcccgggaccatggactcgtccgttccgccataggccgcatcacgccgctctccatacgcgccggtaggcctggctgggcgtcacaggccggtcccctctcggtcaggcgaaactccgccttctaagccggttctctatacactgttttttatcgtttt

SEQ ID NO: 46725 - DNA, 723 bp, Oryza sativa
  Clone ID: PAT_MRT4530_49564C.1
cccccacaaaatctaaacctttaatagcatggatcatttccacaggacatacaatcgtattcttttaacggatccaacaacagtacaacacctgttaaaactgctccagcaaaacggtatgctagcaagcctgtcaaacattttcagatacaatcatcaaaacgccaatgtggcgagagtcagggtgggaggagggacgctgatttccagaatggtggaaaccggcttactccgcaaaagggagatacacgcggtggaagttgttcatggtcagcttcctccggcaggtagggcacttcttctgagcctggattgaggccttgatacactgcttgcaaaaaatgtgaccgcagatggtcgatgacggttcgaccagctcgttcatgcagacagggcaattgaaagttggttccttcggaacggccttctcgggttcagggagtgcattgctaggtgtgtcaattatatgtatcacagggctggtgctgatgttggaggatctctgatgaccatgcctaggatacctgcccagagtcagagatagtagtatatccacatgctcatcaactgcatcccctgcttgtccaggggtagtttcagaatcatcttctatggtcacaacaggttctgtccttggagcctgctgcctcacttgagggaacgagcttgcagaataaatcacaacatcatcattgatatcatccacgataatgggacaactac

SEQ ID NO: 46726 - DNA, 228 bp, Oryza sativa
  Clone ID: PAT_MRT4530_49565C.1
atgccaaggttcgtgcatcggcttctctccttcaactccggcgggctccccttcttctccggcgccggcgacaccccaactctgacggagggatggccgtgggcgacggaggaccgatggtgggcggtggactccggcgggcggcaaggcggcggcggcaccgccgaagccacggggatgaaggagggcggtcggccggcgtcagcggtgggggcaaagcaagcatga

SEQ ID NO: 46727 - DNA, 373 bp, Oryza sativa
  Clone ID: PAT_MRT4530_49566C.1
tggtctaccatatggcgagaaggcccccagggtggcggagtcgaaggatcaggatttactccgccctcgacgacctggtggtcgggcgccgaatcaccaccgacacctacgcccatcgacgacggcgagaggtgggtgggggagcgagcgtggccgctaggggactcggaggggcggaagcggctgagatagatcgcggaatgagcaggttcggcggaaccagatccagcggctacggtggtgggaagaggctcgagtacaggcggacgcatggacggaggcccaagggggcgcacaaggccaccagtcgagaggctccactggctcggggacagcggggccaggtggtatcaactactggaaacccttgccc

SEQ ID NO: 46728 - DNA, 546 bp, Oryza sativa
  Clone ID: PAT_MRT4530_49567C.1
atggtttcccctcaatcaattcggccggagaaggaaagaggcggccggattggaaggaaacagcggcggcggcgcgagctagggtttcggcggcgatggcgcgaggaggacgaagccctgcgagtatatggtacccataatatccacacccaacattataattttgtcggcgcatcttcgcactacacaccattgcatgctaatggttattcaacactgcttgctcatgatggttcttctgtgccgcttgcgaaacccacttcatccgcacttactgggaacaatgaccatgtcactgttgatagtgatgatgacaatggtgccgttcggaccagattgaagctaaattggatccaagaggaggatgttagactgatgagtgtttggttgaacaattcaatggacccaattaatgggaatgataagaaggctgaaaaatattggggagatggagaagagatggagaagcccaaagcaagccaaggagcgttggcacaaactcaacactcggaaggatgtattccaaggctgttggtggaaggctaa

SEQ ID NO: 46729 - DNA, 1191 bp, Oryza sativa
  Clone ID: PAT_MRT4530_49568C.1
ggagaaggctatggcgtggatctggatgctcatggcggcgggggccgtgctcctgtgggcggtttctctggggcgggtgctctcctcctcctcgccggcgtgtctgcctgccaactccaccttcctctcccctcctcgcggcgacaggatgagccggaatgtcctcctcgttctcgcccaccccgacgacgaatccatgttttttgctccgactattcttttcctcaagtcaaaaggtcacagcattcatatcttgtgcttgtctcaaggcaatgctgatggccttggaaatatccgcaaagaggaactctaccttgcctgtgtcactcttaagattccagctgagcaagttaaagtcttggaccactcagaactgcaggatggatttcataaaaattgggatcatggactaatagcagaacttaccctggcacaatcccagttatggaatatcgacacgattgttgccttcgattcccgaggagtatcaggccatccaaatcattgcgatgttcatcatggaatctgcaagcttctgcgtgacaacgggcaaggacacattgaagcatgggagcttgtaagcttgaacatttttcgcaagtacagtggtccagttgacatttggctatcttccaccctctcctcaagctcaaaacaaccaacttatactcttgttaataatagcccttccagaagctttgaggcaatggcttcacacaaaagccagtgggtttggttcaggagattgtttgtcctattctcaagctacacatacataaatgtgctccaaaaaatttgaagtttgttgtcgtgccaaagcaagcaccttccggctcagattgtcaaatgcctgtacatgcagagtgccagagtgtaagcgggaagcttctctgaagaaagacaacaatgttgacattggatcaggaattcgaaagatactgaaatgtgatgatgaaatgcaacagtttaggaacctttgtgattatatgccctttatacttgtgttgtaggccatcgattgtgttcatagagttagattggacctctgtatcctcagctagtttctcttgcttgaagagttattgccgttgttggacgatcaatctatattgcagtgttacacaaggtaactgatgaactgatattactatgctgtcgctcaagctgtattcaagccagacaattttgtct

SEQ ID NO: 46730 - DNA, 597 bp, Oryza sativa
  Clone ID: PAT_MRT4530_49569C.1
atgccggaggaggagacggcgacgtcggctgactcaccggtgaggaacagtagccgcccggaggagaggtactggatgccaacgaggaggaagaggaggccggcgcggcggcggcggtctccggacgaaaccgagggcaggccggggtggaggtcgatgccgcagtaccagggaaggggcggttggagatggtgcagtggtggcaacgccactggacgctggcaggaatgtgtctccggtggtctccgtgcaaaacggaggacacaccggggaagaggaggcagctgcgtggccgaagatggcgacagcacggccggtcggcgcacgggcgaggagggagaggcggctagaggtggccggcggcacgggagagagaggaggacggcggggaggtggctagggacctttagaagactcgagaagaggcaaaaacgagagaacacaaggaggggattccattttataggtgaggggagggagccgggcataggagagggcggaacggcgacgggaaacacggccggtggccatggaaggtggccggggatggcgcggccgttccgggcgattgagggcgccattcaaggtggaaattag

SEQ ID NO: 46731 - DNA, 2730 bp, Oryza sativa
  Clone ID: PAT_MRT4530_4956C.1
atgcggtcggcgaggtctttcttcgcgtgcgcggaggccggcgggaggatctacgtggcgggcgggcacgacaaccacaagaacgcgctcaagacggcggaggcgtacgacgtcgtggcggatgcgtgggacccgctcccggacatgtcggaggagcgggacgcgtgcaacgggatggcggccgtcgccgccgactcgtcgctcgacgtgagcgggtcccgcacggggagggaggtcggctcagcgcgcgacgccgcgtgggtggaccgggcggcgccggcttggcgccgccttcaccgcgcccgggccgcttgccccggcctcctgggctcggccccgcccgttgtctggtgcatcgagggcgccgccgtgatggagtggctcggctcgcgcggcgggtggcgcgaggtcggcccctcccccccgggcctcaaggccggcaccgcccgcgccgtctgcgtcggcggcggcgagcgcgtcgtcgtcaccggcgccatcgaggactccgacggcgggtccggccgccacgccctctgggtgttcgacgtaaagaccaagaactggaccgtggttcgcccacctccagagttcgccggattcgccttctccgtcgccgccgtccgcatctgatccgatccgatccgccattgacgacgaaccccgccaagatccaagatctcgatctggatccagctgctccgcctcaaggagatctctactacacacaaccaaatactactctactctactagaacagtagtatgtgcacaagaaaagaatcacaaggagaagagaaggagaggaagctagtggtgagtttgtgaagctcctctcctctctctatctctccccaatctgttgttgttgtgaggatgatgatgatgatgagtgtggtgtttttgtccaagaaaaccatggaggaatcaaggggatgatcttggatcccctcctccatcctccatcgttcaaccatggttatggttatgagtagcaataatccaatccattgtacatattatgaccatccgtttgaggcgcgggtggcagacttccatgctgcactcaactttgcagcagttatggaagcgccggtgatcttcttctgccgcaacaatggctgggcaatcagcaccccaactagtgaacagttcagaagtgatggagctgttatccgtggtcaagcttatggaatgcgcagtatcagagtagatggaaatgatgctcttgctgtgtacagtgcagttcacacagccagggaaatggctatcaaggaaggaaggccaattttagttgaggcactgacttaccgggtcggccatcactcgacatccgatgattcaaccaaatacaggccggtcgatgagatcgagcactggcgaacagcgcgagatccgatttccaggtacagaaaatgggttcaggggaatggctggttggtgtgatgaaagatgaatctgaactcaggaacaatgtgaggcaagagcttctgaaagccattcaggtggcagaaagaatgccgaaaccgccgctcgctgaactattcaccgatgtttatgatgaagttccttccaacctaagagagcaagagcgattgctgagggatacaatcaagaagcaccctgcagactacccagctgatgtgcatatttagttgtattgggtgaccagaggtttccatattgtagtaactattgataatttaggttcatagcattgataaataataacaacaataattcaggcaataaaatgctgatccaacagttataaatcaaatacaaaaaaaatattgttgctatgaatcataaagataaaataaggaaaagggaggcagatgccaatacactatggatcgaaccgtctgaattatttcacggtgtcatcgcctattgctacacagctccctcatgctgttggagctgcgtactccttgaagatggacaagaaagatgcatgtgccatcacgtattttggcgatggcggcacaagtgagggagacttccatgctgcactcaactttgcagcagttatggaagcgccggtgatcttcttctgccgcaacaatggctgggcaatcagcaccccaactagtgaacagttcagaagtgatctgtacaacaacttgaattctactgctattgcaggtgatggagctgttatccgtggtcaagcttatggaatgcgcagtatcagagtagatggaaatgatgctcttgctgtgtacagtgcagttcacacagccagggaaatggctatcaaggaaggaaggccaattttagttgaggcactgacttaccgggtcggccatcactcgacatccgatgattcaaccaaatacaggccggtcgatgagatcgagcactggcgaacagcgcgagatccgatttccaggtacagaaaatgggttcaggggaatggctggtggtgtgatgaagaggaatctgaactcaggaataatgtgaagcaagagcttctgaaagccattcaggtagcagaaagaatgccaaaaccgccactcgctgaacttttcactgatgtttatgatgaagttccttccaacctaagagagcaagagcgattgctgagggatacaatcaagaagcaccctgcagactacccagctgatgtgcatatttagttgtattgggtgaccagaggtttccatattgtagtaactattgatgatttaggttcatagcattgataaataataacaacaataattcaggc

SEQ ID NO: 46732 - DNA, 953 bp, Oryza sativa
  Clone ID: PAT_MRT4530_49570C.1
tcacgccatgagcgctgtcacaccgtattcgtcgccggaagtcgtcgacgtcgaggggacgaggagcccaccggcgagcggtggcgccacgggggaggaaggcggcgagctgggcgtcggcgagaactcgaggagaccgacgagaggccagtccaccaccgcgcagccacacaggcacggggaagagtggcgcgcgcggccgccggagaaggctatggcgtggatctggatgctcatggcggcgggggccgtgctcctgtgggcggtttctctggggcgggtgctctcctcctcctcgccggcgtgtctgcctgccaactccaccttcctctcccctcctcgcggcgacaggatgagccggaatgtcctcctcgttctcgcccaccccgacgacgaatccatgttttttgctccgactattcttttcctcaagtcaaaaggtcacagcattcatatcttgtgcttgtctcaaggcaatgctgatggccttggaaatatccgcaaagaggaactctaccttgcctgtgtcactcttaagattccagctgagcaagttaaagtcttggaccactcagaactgcaggtgctttattatgagctcatttttgccgacctgcttgatggatttcataaaaattgggatcatggactaatagcagaacttaccctggcacaatcccagttatggaatatcgacacgtgcggtgttgctgcaaacagattgttgccttcgattcccgaggagtatcaggccatccaaatcattgcgatgttcatcatggaatctgcaagcttctgcgtgacaacgggcaaggacacattgaagcatgggagcttgtaattaccctggcacaatcccagttatggaatatcgacacgattgttaccttcgattcccgaggagtatcaggccatccaaatcattgcgatgttcatcatggaatctgcaagct

SEQ ID NO: 46733 - DNA, 1046 bp, Oryza sativa
  Clone ID: PAT_MRT4530_49571C.1
gcggtgccaagttcaaagttcccctgctcggcccaaagatcattgagagttgtaggcgattggtacctcgaggcgcgagccgcacatccccgcctcttcccgccgccgtccgccgcgcgcacgccgccgccgccatggggaggagacctgcaaggtgctatcgccagatcaagaacaagccgtaccccaagtcaaggtactgccgtggtgtccctgaccccaagatcaggatctacgatgtcgggatgaagaagaagggtgtggatgagttctcccactgtgtgcatctcgtctcttgggagaaggagaatgtcaccagtgaggctcttgaggctgcgcgtatcgcgtgcaacaagtacatgaccaagtctgcaggaaaggatgccttccacctcagggttcgggttcacccgttccatgtgctccgtatcaacaagatgctttcgtgtgccggggcagataggctccagactggaatgaggggtgcttttgggaagccacagggaacctgtgctagggtggatattggccaggtcctcctttctgtgcggtgcaagcccaacaatgctgtccatgccagcgaagccctccgtcgtgccaagttcaagttccctggtcgccaaaagatcattgagagtagaaagtggggtttcaccaagttcagccgcgatgaatacgtcaggcttaagagcgagggtagaatcatgcctgatggtgtcaatgctaagctacttggttgccatggtcgcctctctgctcgtgcccccgggaaggccttcctctcagccgcttagatatatctatccttatcatctgtgggaaacgaaatatcggacctttttgtttgtttgtagactcgatcatatatcactttgttgaaccctgaatcaccaagtgtctggtgctatattgcctggtctgaagctatcttgtgttgaacatctttatctgaaatatatatcagatgactttcgtgtcgctaaaaaaaaaaaaaaaaaaaaaaaaaaaaaaacataatcttaatcgagggggggcccgtacccatt

SEQ ID NO: 46734 - DNA, 635 bp, Oryza sativa
  unsure (1)..(635): unsure at all n locations
  Clone ID: PAT_MRT4530_49572C.1
ccaacgaatccctcccccataccaaactccgccgccgccgccgccgcccgccgccgccgagaccgacccgaccacgatgggcctatgggacgcgctctaccgcgtggtgatgcgccgcaacgcggtctacgtcaccttcgtcgtcgccggagccttcgccggcgagcgggcggtggactacggggtgcacaaggtctgggagatgaacaacatcgggaaaaggtacgaagatatatcagtgctggggcaaaggccggccgagtagaacaatgaaagcccagcactcatcatcttgcttgctttacgtgaaagtagacactcttttaagctctaatgtcttgtcattttcttcggcacaataagcaatgtaaaacccctatctccgtttctgagagttagcactcgattcatttactcgaacatgatttgtgaattttgagatgcatggtcaaaacctttcctgtagccatgtgatggtgcgctctggaatcagttgaaaactatacaaactcctcggaatgaaagttattttgaggttttgtttctgtaaaaaaaaaaaaaaaaaaaaataaaaaantgaaaaaaaaaaaattaatttanttttaaaaatatacaatttttttaaattanttaat

SEQ ID NO: 46735 - DNA, 1380 bp, Oryza sativa
  Clone ID: PAT_MRT4530_49573C.1
atgtggatccggtcggagagcacggtgtacgaggcgcggctgggcggcgagcgcgtcgcggccaagaagcccgtgctgtccacctccgacgacctcgacaagttccactaccagctgcagctgctctgtgaactggatcacccagggttggcgagactggtcgcagcacatgcacgtcctccgaattacttgatgttctttgatttctttgaacctccaaaccttgcggacaagatacatgttgaggagtggaacccttctgtgcagcaagtggtcaccattgccactgatctaggtcccaatttattgcaatcaagtttccttttactctttgagagattgaatcgtgtcatgtcaaaggctctccaatacctaaacatccttggcatagtacacagagatataaagcctgcaaacattttgatagataaggacttccatccacatttagcagattttggcttagccatgtaccagaaggacatcaagcatgtttcagttgaaaactggagatcatctggcaagcctactggtggtttccataaaaagaacatggttgggacattaatatacatggcaccagaaattttgagaaaggacatacatacagagaaatcagatgtatatagctttgcaatatctatcaatgagctacttacgggtgtggtgccttatacagacctacgagcagaagcacaggcacacaccgttcttgaaatgacttacaccgaacaacaacttacagcagcaattgtttctcaaggattgcgcccagctcttgcccttcctgagtctggtgctccacctagcctcttgtcacttatccagcgatgctgggactctgatcctcaacagagaccatcatttaaagatataactgaagagttaaaaataattgaaaagcatatagctgtaaattcttgctcactagcatctcctgcaaacaagagtcaaaatggcaacacagaagttcaccactatcaagaagcattgagctgcccaactgatgcccttacagaagcatttgtaaggactgacatagcatttcgagaggaattaattcttcaccagaagtcaaaaaggataacccagaaaaattggcatcctggttgcacggcagtgacagcactgatagtgagaaacaagctttttgtagcgaatgctggtgattgccgggcaattctgaaccgtgctggtgaaccatttcctatgaccagggatcatgttgctagttgtccaaaggaaagagaacggattgtaaaggaaggaactgaagtcaaatggcaaatagatacatggcgtgttggtgcagctgctcttcaggtgctagcttttgctctttatggcatgtgctcgcatgagtatcattcactatggtag

SEQ ID NO: 46736 - DNA, 206 bp, Oryza sativa
  unsure (1)..(206): unsure at all n locations
  Clone ID: PAT_MRT4530_49574C.1
cggcaagttagcgccgcgcaccgagaacaaacgccccggatgcgcaccacccccaaccacgccgctgcngcccccgacatccgtccagtgatctcacacgccctcaccgacgctcaaccccaccggccagccacgaacacaccaacccccgcgggacgccaccgaccggagcaacgatgccggacancaccagcacaaccangcac

SEQ ID NO: 46737 - DNA, 2326 bp, Oryza sativa
  Clone ID: PAT_MRT4530_49575C.1
atgggggtggaggtgccgccggaggagtccaaccggtgcgtgcgcgggtgctgccggagcgccgccatcccgctccacctcccgccctcctccttctccctcctctcccccatcgccaaagggtcggagagcacggtgtacgaggcgcggctgggcggcgagcgcgtcgcggccaagaagcccgtgctgtccacctccgacgacctcgacaagttccactaccagctgcagctgctctgtgaactggatcacccagggttggcgagactggtcgcagcacatgcacgtcctccgaattacttgatgttctttgatttctttgaacctccaaaccttgcggacaagatacatgttgaggagtggaacccttctgtgcagcaagtggtcaccattgccactgatctaggtcccaatttattgcaatcaagtttccttttactctttgagagattgaatcgtgtcatgtcaaaggctctccaatacctaaacatccttggcatagtacacagagatataaagcctgcaaacattttgatagataaggacttccatccacatttagcagattttggcttagccatgtaccagaaggacatcaagcatgtttcagttgaaaactggagatcatctggcaagcctactggtggtttccataaaaagaacatggttgggacattaatatacatggcaccagaaattttgagaaaggacatacatacagagaaatcagatgtatatagctttgcaatatctatcaatgagctacttacgggtgtggtgccttatacagacctacgagcagaagcacaggcacacaccgttcttgaaatgacttacaccgaacaacaacttacagcagcaattgtttctcaaggattgcgcccagctcttgcccttcctgagtctggtgctccacctagcctcttgtcacttatccagcgatgctgggactctgatcctcaacagagaccatcatttaaagatataactgaagagttaaaaataattgaaaagcatatagctgtaaattcttgctcactagcatctcctgcaaacaagagtcaaaatggcaacacagaagttcaccactatcaagaagcattgagctggttgaaccaaggggagttgtttgcaaaaggaaacaaattggacagtacagttgaccattggtctgatattttcgatcagtcctctaagtactgtccaacattaagttggggatcttttgcaacatgtggtcgaagagaaacaatggaagatacccattttatgcttccccacatgagcgaagaaaaggatctgcatgcatttggcatttttgatggtcacagaggttcagcagctgctgagttctcagttcgagcagtccctggttttctcaaacagtttaattccaatacaagcccaactgatgcccttacagaagcatttgtaaggactgacatagcatttcgagaggaattaattcttcaccagaagtcaaaaaggataacccagaaaaattggcatcctggttgcacggcagtgacagcactgatagtgagaaacaagctttttgtagcgaatgctggtgattgccgggcaattctgaaccgtgctggtgaaccatttcctatgaccagggatcatgttgctagttgtccaaaggaaagagaacggattgtaaaggaaggaactgaagtcaaatggcaaatagatacatggcgtgttggtgcagctgctcttcaggtcacacggtccattggcgatgatgatcttaagccagcagtcacagcacaacctgaggttatagaaaccattttatcacctgatgatgagttcctggtgatggcaagtgatggattgtgggacgtgatgagcaacgaggatgtcctgtccatcatcaaggacacagtaaaagagcctggaatgtgctccaagcggctggccacggaggcggcagcgcgtggcagcaaggacaacatcactgtcatcgttgtgttccttcgccccgtctccactgctgagcgaatatactaaccacaaagccttgttggtaacttcatcatttgtcagaatttttagatactattatcaccactgtaaaggaaagaagccaccgattcgttcttgtacacaaattggatttgctgattaccctgtctagggcagaaagatgattaatctttctgataggagatatagcattctttcattggtcaatgtttatgcaactctgattcatctcatttgtgcaccttccaggccaaaagaacaaaacatatttattcaatacttatctcaataaaattttgtggaattgtcgatggtccaaaaaaaaaaaaaa

SEQ ID NO: 46738 - DNA, 1188 bp, Oryza sativa
  Clone ID: PAT_MRT4530_49576C.1
atggagccaaactacagcgactaccaccccaacagtgtccccttcgatgcctactacgagcacggccatggccatctcgacgatcatggccatggccaccaccacctgatccctgcccatcctgagccctcctactcctacggcaactggtccttcctccatgccgatgccaccgcaacgtcctcctccgagtcgtcgtcggcgtccgccagctccggcgcggcgcacattgttggcgcctccggtccttctgcatccttcgtgcggcagcttcatttcggcggcgagtactacgacgacgacgcggcggacatcagcgccctcatggaagccgcctccatctcctgctggacgacgaacggtggtgccggtgcgtcaacgtcgcaaaccacaggcttggagggggtggaggtgatgaggagagcggcggccccggcgccggacaacggatcaagtgacaaggaggaggcggcgcggccgctgatcggggtgcggaagcggccgtggggcaagtacgcggcggagatccgggactccacgcgcaacggcgcgcgggtgtggctgggcaccttcaacacccccgagcaagcggcgctggcgtacgaccaggccgccctctcggtgcgcggccccggcgcggtgctcaactacccgctccaccgcgtgcgggagtcgctgcgcacgctcgagctcggcgccgccgccgccgcctcggagtcccccgtgctcacgctcaaacggcgccaccgcatccggaagcgctccacgaccaagaaggcgctggcgggcaaggaggccgacgaggcacccgccacgacgtcgtcggaggggaagaagaagcggcaggtcaacaccaccagccatagtcatgacggcgcatggcgccgacacctcctctcctccgggcggctctcgatggaggggtcgacggcggctggcgggcacggcgggctcgcgggaggacgtggggaggcagccgggagcaacgtgcgtgcggccgacgacgacgaggacggcgaggcggcggccgggagcagtgtgcacgtggctaacgacgatgacgacggcagcgaggcggcggccgtgagcagcatgcacgcggccgataatgacgacgaggcggtagccggaagtggcgtgcgcatgacgacgacgacggcggcaaggaggcggtcgggagcgggctga

SEQ ID NO: 46739 - DNA, 258 bp, Oryza sativa
  Clone ID: PAT_MRT4530_49577C.1
atgtcgatgaggccgcagaggcaggttcagcatgatccagtctactccatcccgctcgtcagcgtgcatcggcgatcgggagaacatgtctccgaaacatctgccttcgacgtcctgcaccgggagaaggcggcactaagttttttgggaagcgcttcgcgcgactgctacctgttcgaccacaacggctcgtcttcctattctcttgcgtgctgcgcgcggtcgtcaacgcccacaaccacgagtaattcctgctga

SEQ ID NO: 46740 - DNA, 285 bp, Oryza sativa
  Clone ID: PAT_MRT4530_49578C.1
atggagtggagcgcacccttgatcgacgcctctgcctctttgttgtcgcgcgcgttactagtcgttgctgccacctcctctcgtccgcctcttcgtcatcgtccgtcgcctcttctcctccacctcttctacacgcccggctggcggtggccacggggggcggaggaggtgccagtggctgcggaggacccctcccttgccctcgactttcccgtagcagcagcaggcggcggcaacggcaacggcaacgaggaaaaggaggcaacaaagatggtggtggtgtaa

SEQ ID NO: 46741 - DNA, 1227 bp, Oryza sativa
  Clone ID: PAT_MRT4530_49579C.1
atgtcgaaccaatctgatggtgattcccctacacatgatgattctcttgatgaggtgagcagcatagatccaatggatctgtacccattggatgagatcagcaacatattgggtgatcttgctgatcatgtggtagccgaattgaagtccgaagttgaagctctacaagatatgagacctactaggcagagtggtccgaggaggtatgttgataggccttatgaagaatctaaacatgggctattgaaagattactttgtacagaatccagtctataatgatacaaccttccggagaagattcaggatgaaaaagcacctcttcttacgcattgttgaagccctaggccagtgggataaatatttcacactgagaatggatgctcttaaccgcccagggttatctccacttaagaaatgcacatcggctatttgccaattgggaaatggtagccctgcagatcagcttgatgagtatctaaatattggagatagtactacagtggagtgcttgaagatgtttgtgaagggtgtgattgaggtattcggtgcagagtatttgcgacgccccatggtgcaagatgttgaacgcttagtgcagattggtgagcgtcgtggtttcccgggcatgttagggagcattgactgcatgcactggcattgggagaaatgccctgttgcatggaaggaaatgtatacccgtggtaatcaaggtgttcctacggtcattctagaagcagtagcttcacatgatcgttggatatggcatgccttttttggtgttgctggatccaacaatgatattaacgtccttaatcaatcaccattgttcgtccagcaactaagaggggaaggtcctcaggtgcagtaccatgtcaatggaaggcaatacaacacaggttattaccttgcagatggcatatacccagaatgggctgtctttgttaagtcaatacgtcatccacaatctgaaaagcacaagttgtttgcaaaacatcaagaagggaaatggaaggatgttgaatgtgcttttggtattttacaatctcgctttagtattttgaaacgacctgcacgtctatatgatcaaggggatcttgagaatatcatgctagcttgtattatccttcacaacatgatcaagtcctgctattttggtgctgttgtgctgctggtggaaatgctatggatcaagttcgtgcatctagaagaactgctcatgtcataa

SEQ ID NO: 46742 - DNA, 256 bp, Oryza sativa
  Clone ID: PAT_MRT4530_4957C.1
tttcacaccggacccctgaaaagtctcctcgcctcctcgcgtgcaccgttgccaccactgcactccaccattgcccctactgtcgctcctcctcgcgtgtaccgctgccgccgccgcactccactgctgcccccgcagtcactccttctcgcgggtaacgctgcagccgccgccccaaggtactgctctattgctttcgctcctatctttctcttctctttttgaatcaccacctggttcttgatttctttttgat

SEQ ID NO: 46743 - DNA, 414 bp, Oryza sativa
  Clone ID: PAT_MRT4530_49580C.1
atgccgctggacaggacaccattaattcctcatcaagacgccggcgcctctgctcaagccctcttcctccgtggccccgtcccgacctccccactccccggcgacggatccggcacggccctcccttcctcctccctccaacttccactgccgctgggccgagctcctccgacgggcgacgggcccttgaccgaggcaaggggactagaagtgacgcgccgtcgctcctccgacgaccagcatgatgccgcgcgcaccgccgccgagcttgacgaggtcggctcgtttatgggcactcacgaagaacgtccagccaacaccaaggtgaagcttatcgggatgttgatgaactgctgctcgtggaaatcgattcttgtgatctcgtcacaactgagaaaaactaaagcggagtga

SEQ ID NO: 46744 - DNA, 112 bp, Oryza sativa
  Clone ID: PAT_MRT4530_49581C.1
gcaagcaaacattacgtaagtcacagtacataataatatatgcccaacaccaagctgaaaagaaattggagcccaaattgtccttacaataaacaaactcctcaccagtaag

SEQ ID NO: 46745 - DNA, 657 bp, Oryza sativa
  unsure (1)..(657): unsure at all n locations
  Clone ID: PAT_MRT4530_49582C.1
ggacggcngncgaacgcgtgggccgcccacctgcttctctccccccaaggcgggttgccgcctcgccgccgtcgccggccggcggcggcccggcggcgaagggtctggagcggcgggatcgcgaacgccggggccggtggatggatcgacacggatttgcgtaattgtaggtgtcgcagaaccagatttcaagcaattaaagcttggctgagctcatgaagtaagctgactacactagaaaggaaaggtggaagtatggacccaggttacacaaggggcaaagctagaaagatttaacagagaagaccaggcaatcagagccaagttattactacaaaggctgccagttgctatggggtgtccaaatcaagatccaatgtttggatcctgatcaatctggagataacatgcatcatcacatattcgtcaaagtaaccagcaaaaagggcacacaacgtgcaactagttaagcaaatgtgtgtttgtgagtcatgacaatgtaatataaatcattactttgcaaatgtatatcatcatacctaagattggctatgcaatatgtcgatttcaacagatctagggaacttcacaaattagtgtcgtcattagttctctacagagtaccataaatatatatgtatcaaaaaaaaaaaaaaa

SEQ ID NO: 46746 - DNA, 253 bp, Oryza sativa
  Clone ID: PAT_MRT4530_49583C.1
gtggcacacaccatcgggagagtaaaatcggggccgaaatgacttcatgagaatgaaatgttgttcatacacgaaccaatttttgggggacacggccggaaatgaacgggtgacccgttctagcctaacccaacccaacctggctgactaagctgacacaatcttctggtgacctaaaaaaacgggtaacaccatttgccgaagtctagaggttgacttttcccgacagcttgctgtatgccacggtttggct

SEQ ID NO: 46747 - DNA, 177 bp, Oryza sativa
  Clone ID: PAT_MRT4530_49584C.1
atgttttgtagtacaaaacgaccgacggacgacgcgtacctgctcccgcctccaagacttgcaccaaatggacgtcgagtcgtcgacctgatctctagtacaagtgtgagtcacgtcaagcgtggcagaccgcgggtactagggtatcagccacttttgctccggaatctcggctga

SEQ ID NO: 46748 - DNA, 1320 bp, Oryza sativa
  Clone ID: PAT_MRT4530_49585C.1
atgtcaaaaagaagaaaaaagaacgaaagggtggagttgagatttaaggcacccgattatgctacgtggaaaaaggaggcagctgcatgcgacaaagctaatggcaatggtaaagatggatcgattacatttatggatgaaaggaatatttcgattgccaagaccatagcaaatgacataatcatcccagaccctgctcccgagtggatgtgttataccttcttggacaaatatgaccaattggagcccatctttataaaggatagtgcacgttgcttcctccgattattcaagaactggaagggctataccatgtcatggaatctcaccatcaccgcacaaaccttaacctgcatggtcagtttcaattccctgcgatgcgcgaaagttgtattggagggcagggcacctgagctccttggggtgcatgccaatcccaactgcgtaaccaaatatggatacttcccgctccatgaagctgctgaaaggttctctattgagatgatcaagctgctcttacgccatggtgcatcagccaacgtacgcacggttggcgacgatgtcatcgatggcctactcctgctccatatcgcgattgagaacacttgcctgcataagtatcttgaggacaatctttctcccggccaggatcatctggattatatctacaagcttttccatctgctgtgtttacctgaaatgaagatcttcctggatacaactagactacttgcaggaaaaacaaataatctccttgaagagctctggaattatattgagaatggaaaacttatccagaccgcaattctactactggctgctcaggagcagatccgagggggatgttcctccaagataaatggcagtagaaagaaaaatgggtatgacattatgtacaagcgtatactgaggctttcatttgccttgagatgggggaaagtttcaaatggaatgacacagaagcttatgaaggaaaagagggcactcattgattgcatggggctgcttgttgatgcaatttcccatgctggtgaacctctttctgcatacattcaggctcattcagaggcgccacatgtggaggtcttggaacatgtttcaactatcctcaaggagtatggattttgccctactgaagaagtcatggacaccataaacctccaaccttatgactgcaaaatgtcagaaacaaaatcatgtagcaaagggtttacagatgcaaacacggcagttgcggaaatggctaatctgcatgctgcagacaaaaaggctcttgaagctgttgaagtaaagcacgagtacaaaaggttctatagttga

SEQ ID NO: 46749 - DNA, 570 bp, Oryza sativa
  Clone ID: PAT_MRT4530_49586C.1
atggaaaagcttgtagatataatccagatgatcctggccgggagaaagattgtcctcaagatacttatgcaggcaagtgttctcaatcgcgatatggagcaggacttcatggagcgggaagtatccatatttggttacgcagttgggattggcatgcaccccaaggagctcaggtgccctgccctccaatacaactttcgcgcatcgcagggaattgaaactgaccatgcaggagaggagcggcaggcagccgaagtggaccggcgtgcggcgtgcggtgggcggaagacaacgggagaggaccagcgggcgacgggcggcagtcggcaggcggctggagtggagcagcgtgcggcgggcggaagatccgcctcctcatctccatcgtcgcctcctctgcgatggcgcatgccactgtcgctgccgtcccggaagatccggcgagggaagaccacaatcgcggaggtcgccgccgacatctccctccccgcccgcagccatcatcagccagagcggctccccattgaggccgccatcgacatctccccgttcgcggccaccgtcaactag

SEQ ID NO: 46750 - DNA, 4160 bp, Oryza sativa
  Clone ID: PAT_MRT4530_49587C.1
ctacagttcaaacttcactcctgagacaaatccacatgtctgattactgactgcatcaaacctcgcttggttgtagaacgacatgctgcaaagagcagtgaccaaaagaaattcattcttaacatggaagatgatgaaactggtaattaccataagaagaccaaacaacatgggtaaaactaccttgatttgagtccttttgtatgtgtatgtcacatgaaccagcccatcagaagtctgaattacagcagggtatgagaactccacaccatgggtctcctccagtgtcagcacatcctcccatttgtcgccgtcatcctgagaaacagcaaccttgagcacccctcttgaggtgctgttgtataccagcaccaccctcccatccttgagcttaacgccatcgataccagaattggggtttgggagctcggttggttgcgcatagctccagttgacaccagaatccttggactccgcaacgcagatgcgacctacttcatcggacgggcgcagcagcatgcggattgtgccactgctggtctggtagaggactggctgaatcactcccatggtttttcctcttacgtaaatcgggccatacttcttccatgttttaccatggtccttggtgaccttgttcttgatagggccaaggataccaggtgggagttgctctctctttgaccagataacaccaccatccgatgagcatttcatgcatccactccaactttcgacagtcttgccaaccttgtagaaaaggaggatctcaccagaaggaagctggaagagaacagggttccacagaggaacattgggcacttcatcaactacttcaggagagtgccacgagccattgtaatatctctgtagccaaattttaacatcgtcagcaccttcctgtgttcccccaaagtaggccaccagaaacatattcttctgaacctcaacaattgtggaagcatggcaggttttgaaaggtacgttgccttctgaaaatgtaaattcttccctcaatacgctccacttattggtcattttgtcacacttttcttggatatgaaggattaatccgtggtctttactcccctgagagctgagagtaggcaggtcaaacttaatttgtgtccggttgtatgtgtacgtgatatgtatgagatcatccatggtctggatcactgcaggatatgaaaactccatgccttcagtatcttccaatgtcattacatcgttccatgaatcaccatcatccatggagactgcaacttttagtgttcctctggagaaggtgttgtaagcaaggagtactctcccatccttcatcttaactccatcaatcccagagtttgggttaggaaggtcagtctcgtgcacataactccatgttacacccccatcagcagaatcagccatgcagacacgaccaattgtctcaaaagatcgcagcaacactcgaatagtcccattggcagtcatgtagggaactggctggatcacccctagtgtttcgccttcaatatatatagggccatacttccgccatgttcgtccggcatcttttgtgacctcaagccatgcaccccaagagttccagctttcaacagatgacccacatagcaagcgcccatcttcaaccaagaaaggactgtatctctgcagccagatcttcacatcaggagcaccttccttggatccaccgaaataagccaccaaaaaactatccttctcagtctctacaatagtagaagcatggcagctattgaaaggggcacttccagctggaaatgtgaattcctccttgacaatgctccagtcagaagtcacatttgcagttgcattgatgatgttatgatcgttgtcttccatatgttgtacaatttctacattacggtcattcaggtttgcaacaaactccgcggatgaattgttaaccctctgaacacgacttgaactgatgctaatctcacgcaataacctagatggtgctgttttgaaattgagaggtttcttgttcaagaggatcctatgcggtgaaccagagaaaaagaacagcagggaaatcaaaagtgtacagcctgtagcgctccatgcaactttttgcctgctgcaccagtaaatggtgaccatcacgttttgaaattggcagaataacaaactgtacttgacaatgtattttcctaattgctgagcctcaagatccagcgggcaagggtaccggagcccccatgctagatctgtcacactagatttcagcagcttcaagagcctgaatgcaccagtagcacaagtgctgaagctccttttggattgatgattgtttgcaaatggtgggattcttcccacttcacaggacacagggttcgtaaaactgatctccaatatgggaaaaaatttctccttgtatacgtgggatcccatcctccgcctacttcctttctcccagcctttgctacatgactctctctccatttcgcagtcataaggctgaaggttcatagtgtcaatgacttctgcagtggggtaaaacccatactccttgaggatagttgaaacatgttccaaaacctccacatggggcgcctctgaatgcgcctgaacgtatgcagaaagaggttcaccagcttgggaaattacatcaacaagcaggcctgtgcaatcaataagtgccctcttttcctcccgaagcttctgtgccattccatttgaaactttcccccatctcaaggcaaatgaaagcctcagtatacgcttgtacataatgtcatacccatttttcttactactgccatttatcttggaggaacagccccctcggatctgctcctgagcagccagtagtagaattgcggtctggataagttttccattctcaatataattccagagctcttcaaggagattatttgtttttcctgcaagtagtctagttgtatccaggaagatcttcatttcaggtaaacacagcagatggaaaagcttgtagatataatccagatgatcctggccgggagaaagattgtcctcaagatacttatgcaggcaagtgttctcaatcgcgatatggagcaggagtaggccatcgatgacatcgtcgccaaccgtgcgtacgttggctgatgcaccatggcgtaagagcagcttgatcatctcaatagagaacctttcagcagcttcatggagcgggaagtatccatatttggttacgcagttgggattggcatgcaccccaaggagctcaggtgccctgccctccaatacaactttcgcgcatcgcagggaattgaaactgaccatgcaggttaaggtttgtgcggtgatggtgagattccatgacatggtatagcccttccagttcttgaataatcggaggaagcaacgtgcactatcctttataaagatgggctccaattggtcatatttgtccaagaaggtataacacatccaacctcgggagcagggtctgggatgattatgtcatttgctatggtcttggcaatcgaaatagccctttcatccataaacttgtcaatctttttataatctaatccctcagcaagttcaaaacgagggggagggtgccgtggatacttatttcttactggaattgatccatctttatcattgccattatttttgtcgcatgcagctgcctcctttttccacgtagcataatcgggtgccttaaatctcaactccatcctttcgggtttactttccggaggcggaagcagaaggacgacggcacccacctcgcgggagatggatgggaagcggcgcaggcggcgaggcgaggcgcggcgggcgaaacggatacgaaaacgaatatggatagctcgaatacggaaacgaatacggattatctcgaatacgaataagaatcgaatatgatcgggcacgaatacggaaacaaatttttctcggaacacgaaaaccaactcaacttcctctctacttatttctccttcaatgacgccggcgtgagagaagcggcgtgcggcgggcggcaggagaggagcggcaggcagccgaagtggaccggcgtgcggcgtgcggtgggcggaagacaacgggagaggaccagcgggcgacgggcggcagtcggcaggcggctggagtggagcagcgtgcggcgggcggaagatccgcctcctcatctccat

SEQ ID NO: 46751 - DNA, 475 bp, Oryza sativa
  unsure (1)..(475): unsure at all n locations
  Clone ID: PAT_MRT4530_49588C.1
gcacgaggttatgatatcacaantatttttttttgacccaatcactgcagggagttccccacggtggaaattttattaatagaaatgaaacaaaaaattacgagtctaaccagtaacttaaaactgccaacaatagtgagacccaataagagtgaaaactagaatatttccaaatattggcacttgctacgctaattttgaactcttttgagctgactaaatggtttccaatttttgtatgaaccaattgaattgttcatgctatggtaagttttatatagatgaatgagaattgtttcaagtgggataataatcactattttattactgaaacctgattgagtattatatactgggagcaggacattctgccaagtaaatgttagttatatatataacttctccacttggaacatgctatgcttaatcatttatttggattcggttgtaatgcctgggcacttgggtgcttact

SEQ ID NO: 46752 - DNA, 321 bp, Oryza sativa
  Clone ID: PAT_MRT4530_49589C.1
atgaagttaaacatgaaacgacctcagtacagccgtacttctcgaatggagttttccccctcgggagcgccagaactcctctcactgctagaaaccgtgtacgcctagagtgcatgagggcttaagttcatggagcggatactgccaaagtgaggttattgaaaggctttgccgtggcaagtctcattcgttgggacgtaggctcatgtgttgggcaagttgcggagtacgggtaaagtgtacatccactgcagtgagagtgttgaagagaagcccttgtcgcaacagaatgaaactttacttgataataaaacataaata

SEQ ID NO: 46753 - DNA, 724 bp, Oryza sativa
  Clone ID: PAT_MRT4530_4958C.1
caagataagatgctctagattaaaattactcttttgtgctgtttttggttgtatcattgtttgatttatttggggatcaagatggggttttttttttttttttgaaggaatcggactcgactcctatgagggacgatggacgaaaaatcgcgggtgaaaaggacgtgacgaccggaaaaatacgaatatttatatatatgtgtgtgttggaggaataccacgaggaccttcggccgggcctaccaaaaccaaggacaagcaagggcgcaggccggaggtaagcggcgaaggtcgaagagacaacataggcgaaagccacacggcgaaagttgtggcatggagtatacaaccttcgctgaagatggaccttgccggagggacatacggtcgaaggccgcgaggcgaaagccttgccacgaagggcatgggtttcgccgagtgtcgaacctcaccgggagaaggcccagcgggccatcgcgccttccggaggctccgccaaggactaggccaagtcacttgacccattaggagcccgtgcaagcaaaagacactatatgcccgtaatgatgtccctatcataacggcaaccatgaaaattcccctgtaaagcctaaaccttaagggaggagtctgtaatagggctataagtacgtagccccctaaggccatgtaacaaagggatctgaaaaaaattctactaaacaatacaattgtctttacttcc

SEQ ID NO: 46754 - DNA, 462 bp, Oryza sativa
  Clone ID: PAT_MRT4530_49590C.1
atgtgcattaaaatccccgtccaggaccagccggggtacacaaacgacaatgttgacattcagatccaccgggaacaccactccacaggcatcctcgacggcacggacgaagcctactcctcggagaaaccttcatctgacacatactcgaactctgggcggctcggggagggaggaagggcgccgacaagcgggccccaccggtcagcggctcggggagggcggtccacggcggatcgggtccacggaccggggaggagcggcgcgccacgcggcggccgaaccgatggccccgatctacccaagggtagatcggacggcggcgggagctcgcggccggtgcgcgcgggcacggcgcaaaccggcccggcgaccatggcgcgcgacggcgcggcgcacatgcggcagcggcgcaagacggcggccgacggcgaccgaccggcggcggagagcggcggctag

SEQ ID NO: 46755 - DNA, 672 bp, Oryza sativa
  Clone ID: PAT_MRT4530_49591C.1
atgtgcattaaaatccccgtccaggaccggccggggtacacaaacgacaatcgggaacaccactccacaggcatcctcgacggcacggacaaagcctactcctcgaagaaaccttcatctgacccgaactcgaactctggggttgggaaaagtttcacccccactcctcgcaaggcagcgggcagtcccctctcgtgcctaggtgaatccggaagccgcataggccgtcgcagggcccatccaaactccatcacgcccacccttgcctggatgcgtcggctagaggaaagctacgctacaagcctagccgttgcccacgctggcttgtgggctgacgtcatcaaggcggggcgcggcaccgacatgcgggccccaccggtcagcggctcggggagggaggaagggcgccgacaagcgggccccaccggtcagcggctcggggagggcggtccacggcggatcgggtccacggaccggggaggagcggcgcgccacgcggcggccgaaccgatggccccgatctacccttgcggcgggagctcgcggccggtgcgcgcgggcacggcgcaaaccggcccggcgaccatggcgcgcgacggcgcggcgcacatgcggcagcggcgcaagacggcggccgacggcgccctaccggctgcggatagcggcggctag

SEQ ID NO: 46756 - DNA, 675 bp, Oryza sativa
  Clone ID: PAT_MRT4530_49592C.1
atgtgcattaaaatccccgtccaggaccggccggggtacacaaacgacaatcgggaacaccactccacaggcatcctcgacggcacggacaaagcctactcctcggagaaaccttcatctgacccgaactcaaactctggggttgggaaaagtttcacccccactcctcgcaaggcagcgggcagtcccctctcgtgcctaggtgaatccggaagccgcataggccgtcgcagggcccatccaaactccatcacgcccacccttgcctggatgcgtcggctagaggaaagctacgctacaagcccagccgttgcccacgctggcttgtgggctgacgtcatcaaggcggggcgcggcgccggcaagcgggacccgcatggcagtgactcggggagggcggtccacggcggatcgggtccacggaccggggaggagcggcgcaccacgcggcggccacgcgtcagccgaaccgatggccccgatctacccaagggtagatcggacggcggcgggagctcgcggccggtgcgcgcgggcacggcgcaaaccggcccggcggccatggcgcgcgacggcgcggcgcgcatgcggcagcggcacaagacggcggccggcggcgaccgaccggcggcggagagcggcggcgtcgcggcgaagcggcagctacgcggctaa

SEQ ID NO: 46757 - DNA, 806 bp, Oryza sativa
  unsure (1)..(806): unsure at all n locations
  Clone ID: PAT_MRT4530_49593C.1
cccacgcgtccgcccacgcgtccgctctaccattgctcagttttaatttgcttaatttaatttgaaggctctcactctcagtgtcggatcaacgtgttcgatcgatcgccggtggcaaacttaattacgatcgagctgagttgactgaattggtaatggcttctgcggtggcggcgagccatcagccggcggcgagcgtgatggcgcgcgtggaccggctggacctggtggtggggcacctcgaggagatgcgccgcggcggcggcggcggaaggaggtcgtcatgcggtggctcgccggggaggacgacgacgaccgtgagtagtaatgagtccgggtcgtcgtcggtggcgagcacgccgagggggatgagctgccggccggcgaaggaggcgctggaggaggcgcgggccaagggcagcctcgtcgaccgcattgcctccctcgagaccagagtgctcaagatggaggaggagatggaggtgacgtcgtcggatgtgaggaacacgggcagcgatgagaagcagcagcggagtgcagctggcaataagaaggcggagaagaggaagaggttgaagagcttggtcaagtcctgcgtcaggggcaaactcaacaccaacgactgattgatccatctatctctcaccttttaattacttgcaggagagcgcgcttaattatatcatccgttgtcacgtatgctggcatatagcgcatatatgtatcatgtatataagtatatatgcacgtaaaagttgtgaatcatgtacttttgggatggtcgttcttggcccaactnnnnnnaa

SEQ ID NO: 46758 - DNA, 616 bp, Oryza sativa
  unsure (1)..(616): unsure at all n locations
  Clone ID: PAT_MRT4530_49594C.1
tttgccttttagatcgaatttcattcctaaaatggaccacctcattccgaattgaagtttagaactctctagaaaaggaccacattgcacacatttgcatgtcctacctcacttggcattttgccctttagctagacacagcacagctgttagttaggtaatccccatcgtccattctcatctggagtacagattgcctttccactaagctccctttccaaatcctttttatcgcaacttatcagaggcattcattgtgttgcatgctttcgtacatgtaatagtttggtcccaaattaacctctcaaatatgacaattctcaatgctacaatgggaggccatggaaagagatcaagcagagcctcctctgttcctggcaccaaactgacatatatagttttgttaattaggtatatgataaaggcagattggttatttgattattacattgtaatgaatctttagccacttacatagatcagagatgcattgcatggatctggcaggccaagttgtatctcttatttcacactgaattattgttgttcatttcattgtagcttcacatgccaaaccttcnatatgcaaagacctagtattcaaaaaaaaaaaaaa

SEQ ID NO: 46759 - DNA, 342 bp, Oryza sativa
  unsure (1)..(342): unsure at all n locations
  Clone ID: PAT_MRT4530_49595C.1
attcaagagtttatttgcaggccatttggccttagtttgcaacttttacatgcctctaaaatgatgtgattcgtctattgtatctctatcactctcgttctaaaaagaatcaagagtgcaaatattttctttttcctcttatangctnacactttagccttgccggcatttgcatcatcaatagttaccgagttaccgtgttattagtatttgcctacccgatatanttatcaagacntgaattagcgttaattctggcattccaagaagaaacacacagctgctttgtaacgttaatcggggcgaggcgtaagtcccattctgccggccggccgcccggag

SEQ ID NO: 46760 - DNA, 101 bp, Oryza sativa
  Clone ID: PAT_MRT4530_49596C.1
ccagagtgacacctaagataaaacgggcagcatatatatgtacatatggttatttcctccttaagatatagtaacaaccatcgactgatttccatgtaaac

SEQ ID NO: 46761 - DNA, 1321 bp, Oryza sativa
  Clone ID: PAT_MRT4530_49597C.1
ttcgtggtcgcacaagggggcgggcgccgcggcagtactcactttgccaggggctgcgccgattcggtacactgcaaggctacagttcgatacgaccaacaacacggcagaatacgaagttgtactgttgggcctaagaaaagcgaaagcattgggggttcggcacttgctgatccgaacagactccaagctggtggcaagtcatgttgacaaatcttttgaggcaaaagaagaaggaatgaagaggtatctggaggctgttcgatctatggaaaagtgtttcgccggcataacggtcgaacacttatctagatgccagaacgaggaagcagacgccctggtgaaatctgctgcttgtggaggctcacattcaccaggcatcttttttgaggtcttgtacgcaccaagtgtgcccacagagagcctgcacatcatggcaattgaccaggcagaactgggcgaagacccagaggactggcgaacaccgttcgtgaagtacctcaagaacggttggctcctggaggatgaagtagaagcgaagcgcctacagctcagagccgcaagatacaagctgatctcagggcagttgtatcgctccggggtgctccaatccttgcttcgctgcatctcctttgccgaaggcgaggaagtggcgaaagaaatacaccaggagctgtgcgcaatcgaatacttctcccgttggatcgaagccgaaccacttggtgcgatcacttcggcagcagtacagaaatttgtatggaagaacattgtttgccgtttcggagtgccgaaggaattcatcactgacaatggcaagcaattcgcctctgaagagttcagagagatgtgcgaggggctaaatctagaaatcaggttcgcttcggtcgtgcacccacagtcgaatggggcggccgagcgtacaaatggcaagatcctggaggcactcaagaaaaggcttgagggggcggcgaagggtaaatggccagacaaaatgctatctgttctttgggcccttcggacgatccgtacaaggccaaccaagttcagcccgttgatgcttctctatggtgacgaagcaatgaccccaacagagctaggggctactaatttgccaagggtgatgttctctagaggcgaagatgggcacgaggtgtcgctcgaactcctcgaaggggtaagagtcgaagcactagaacacatgcgcaagtacactacaagcacctcggcaacttacaataaaaaaagttcgaccgacggagctattgcctggccatctcatcctaaggaagaaggcgaacccagtggcggtcgggaaacttga

SEQ ID NO: 46762 - DNA, 1620 bp, Oryza sativa
  Clone ID: PAT_MRT4530_49598C.1
gaactgaagcacaaagaaacggcagtaaaaaaaaaaaacagaatgaagcaattatagatgcttgtacatttgacaataactaatactgtactaccatttgccaattaccagaagtaatctcaaaacagatctccaggtatagggatattcacatagctcatggcccccttccccctccaaatcaaatcatgttaaatataatcacaagtctcttgtgcaaatccaatttgagatcctagagtgtcaaatatgaccctcagattcttctgctggtaattaccaatgattgaagtttcatactcagatttcagggaggccagagccaagcaaacctgagaagaatcactgctgacaaagtagagcactccactggaatcaacctccacctccacattgccttcaaacacaaacttcaggctaggaatctgcacttctctgaaccctgtcaagttgaagcaagtgtcaagaatcgagaaccccggcgcttgcggatactccgcgaactggctcaagaactctgccttgaccgcattgtacaccgaaggcacgaggctcgtgatgatcgttcccgagtcgacgataaccttgccagctgaagattctacctcctggccgccaatggtgatcccggtcaggttaacaaagtagaagggcccttgcaccgggtcggaaaccatggttgtgtacacaattggggttgaattccggtacaccgaggtgtcgtcgccgaggacgagagaccctgatgattctgactccttgagaggtaggcagtatgagaagacaccaccgaattgatccatggtttgtgatatcagcgagagctggctccggcctagacccatcagaccggaggtgccgccgaatggcccctggttgctggtgccgcagccgaacacgaagccgtcgatgacctcgccggcgaggctcagcttgtcgtgcgccaggacgccctgggagtaggagccgtcacggtagctgagggtgtagctgcaggaaggctgctcgccgccgccgcacgccccggccgccgagccggtggccacctgcagcgcgtcgcaggaggaggagttgcacggcagcacggcgtaggacggcgacgacgccgggtcgaacagcgggccctgctggtcgtggcacgacgcgcacggcgcgcactgcacccaggtgagctcgctcgccgtgtccacgatcaccgtcgcctcgccgccgccaagccccacggtggccacgtagttcagcgtccgtagcctcgccccggacgtgacgggcacccgcccggtcgccgccgccgccgccgcctcgtcctccgcccaagacccgccgcctgcgcgacgctgcagcgacgagacgcgcgcggcgtcggaggagaagaggccgccgagctcctcctccctgctcctcccgccgctcttccccgagccgccgccgccgccgccgccatggtgcctgagctccagtatggtggcgccactctctgctcttgacctcaggtggtgcctcctctgcaaggctctcctgctcctcgtcacctccaggcaatgcacccctcctcctcctcccgcaccaagtaccaggaggaggaggagcagagcgcaagccccccacgccatcactgac

SEQ ID NO: 46763 - DNA, 286 bp, Oryza sativa
  Clone ID: PAT_MRT4530_49599C.1
caaaacacgtgccttgtcattcttcctcgcaccgcaacacaaggcccaccaacaccaagcaaaccaacgcaccacgcttcccctcctcctcctgctccgatccgatccgatccaaatcggcatggattgattcaagtgccttcttggcgagcccgagcaagagccatactgcgtgggctgtgcctgggggggggtttgagctgctgggcgtgggggtgtggggtggcggagccatcagagagggtgtccacggagggggagcccgctgacgtctaggagggggcag

SEQ ID NO: 46764 - DNA, 807 bp, Oryza sativa
  Clone ID: PAT_MRT4530_4959C.1
atgtggatctgggggctcatcgccgctgctcacctcctcccaccgccgctgccgcctcctcccgccgacgcggcgctggccacccgcaccatcgtcgtcgttgccgggttcacattgtcattgtcatcggccggcagcgcatcgtcatcatcgtcgccgcggcgctcgtctcccgcgccggatctccgagctcgtcaccactccctcctcccgccgacgcggcgctcgccggccgcagcacatcgttgcgggtatgacaccgcctataaaaatataaaccggggtggatatttgttacccgcctgcgaaaatcaatttttccaggtggaccacttaagagaaatcctccatctccatcccacctcaccgcgcccctcctcgccgcctccgccgccggttcccctcctccgccggctcccttccgcgccgcctccccttcgccgccggttctcctcctcgccgtctccgccgccagttccgttcctcgatgacgacgacgaccgagccacctccggctcccctcctcgactgctcctcgaccgcgccacctccggctcccctcctcgccaccaccgccgccggctccatcctcaccgcctccgccgccggctcccctcctcgatgcgcgacgacgatggtgccgatgcctgggcgccgctggccgcgacaacgacgaccttcgtgacgcggcgatggctccctcctctcctcctcaacggcgacctacgcgccgccgggttcctcctcgccgccggctcctctcctcgacgcgcgacgacgacgccgccgacgcccgggcgccgctag

SEQ ID NO: 46765 - DNA, 5773 bp, Oryza sativa
  Clone ID: PAT_MRT4530_495C.1
gatggggattcaagcccgagacgtcatggctagtcaaggcgaactcccccatggcgaagactatggagcaaggacggcgagaggcagggaatcccagccaagctagaggcctcctgggcgaagagcgcaaagcgaagggcatatgccgaagggggacgacttcgccgtagctaagggcccatggaccacaattatgctatgtacccatgtaaatgtccctttcataaaggcaaccatttgtcgtttcgacaacagctggcgccgaccgtggggacctccaagcgaaaccactcagagcgaatgccaccaaaggtcgtgaaggagaaggttacaaggcgaaaggaaagcgaagccagggcggttatggccgccgaagagggagcagagccttcggcgcccatcgccgaagatggaggagcgccatctgcttccgcacctgcgccatcactaccgccatcggctcctggcccctccacacaggtgccgaacgcggctgacatggcgaaggcggctgcggtggcaagggcactccagaccaaggcagagatcctttcgacaagccagctgctggtgccccaagccgctccgtcgcagtcggcagcggccccaactgcgctctccgctgtgcaagcccaagtcaaccctgaccccgaaacacaaaccgaagccgacatggaagccatgcgacagaacatgacatgactccaagacatgcttcgccaaatgcaagaacagcagtaggcataagagacggcaaggcggtccaaggtcactttggccccaatcctccagtattggcaggctatgtcccaccccaagtctatccacaagtatcgacccagccccttccgccacaagtcgcgcaaagcaccaatgtacatcgccgggtagccatcgaccgcagcagcacatccggcccctcacgtgcaactgcaagctcaaccggtcgctgcccaagtacactctcaaccgcctggccaagtgccacaaacaatggcagaaggggcttcggctttgcaggcgcagctccaagctttccttcagcagctcagccaaccccacaacatttcaggaacagccccttcggcccacccgaaggggaatacaagtcagggtgcgcctagttggttgccgtcgaatcagccaggtctgggggcttcaccgtggagtcaaggaccgcagttcgacttcatcaatgctgctcaggcaccaaccgttcagccgcaagcaccaacgccaggcttcagagcaaaccaagcaccaaaccaggtcgccatgacatggccacagccaactttcgacccatccatggcggctcagcaagcatcaccaatcgaagccgggcagccgaatgccatggcccaacctcacgcgcaagccgtgatttcgcccttcaccacgctgtacccgcagcaaggtgctgtgaatagggcagggggcgaaaaggggctactgctgagtcggggaatcaagacccgtccgatcccaccccagttcaagttcccacccttcccacgctactcaggtgaaactgacccaaaggaattcctctccatttatgagtctgcgatcgaagcggctcatggcgatgaaaataccaaggcaaaggtaatacatctcgctctagactgcatcgcccgttcttgatatttcaatttgccagctaatagcatttactcatgggagcaattgcgcgatgtctttgtccttaactttcgaggcacctatgaggagccgaagacgcaacaacatctactcggcattcgccagaggccgggggagtcgataagggagtacatgcgtcacttctcgcaagcccggtgctaagtccaagacataaccgaggcgtctgtcataaacgccgctgcggccggtttactcgagggcgaactcacaaggaaaatcgccaacaatgagccacagacgcttgagcacctacttcgcatcattgatgggtacgcaaggggcgaagaggattccaagcgacggcaagcaatacaagctgagtatgataaggctttcatcactgctgcccaagcccaagcacaatcccaggttgccgaaccaccttctctcgctgttcgccaacctcagccggtgatccaaggacaatcaccaaggctaggccaagcccccatgacctggaggaagttcagaattgaccgtgcgggcaaggctgtgatggctgtcgaagaagtgcaagccctccgcaaggagttcgacgcccaacaagcaagcaatcatcagcagccggtccgcaagaagtatctaaactagctaatttcttttgggccaaaagacgccgaaggagtaatgttcccgcatcaagatcctttagtgatctcagccgagatagctggcttcgagatccgacgaatcctggttgacagagggagttcggccgatgttatcttcgccgaagcatatgccaagatgggattgcccaccctagcccttaccccagcaccggcctcgctccgtggtttcggtggagaagcagttcaagttctacgccaagcacatttgctggtagccttcggaacgggcgaaaatagacgcgaagagcaagtattgttcgacgttgtcgacatcccatacaactacaatgccatattcggctgggcaaccttgaacaagtttgaaaccatttcccatcacaattatctcaaactcaagatgccgggcccagcaggagtgatcgtggtcaaggggcttcagccttcggttgcctcaaaaggcgatctggccataatcaacagagcagtgcacaatgttgaggccgaaccgcatgaccgggcgaagcacgcggcaaagcccacccctcacggtaggataatcaagatacagattgatgatgccgaccccacaaagctcgtatcgctggagggcgacatgggcaaagaagaagctgagatcatcctagaggtactcaagaagaacattgatatcttcgcctagggccttgatgaagtgggaggtgtttcgacagatctcatcatgcatcacctggcagtcaagccggatgccaagccaaggaaatagaagctacgcaagatgtccgccgatcgccaagaggcagcaaaagccgaagtccaaaaattgctcaaggctggggttattcaagagatcgaccatcctgagtggctggcaaatctagtgctggtgcggaagtcaaacggcaaatggcgcatgtgtgtcgatttcacagacctaaacaaagcatgtccgaaggacgattttcccttgccacggatcgaccagctcgtggattcaacagctggctgcgaactcatgagcttcctggatgcatattccggctatcatcagatccacatgaacccggccgacatccccaagacagccttcatcacactatttggcaccttttgtcacctcaggatgcctttcggcctgaggaatgccggagcaaccttcaccaggctggtgtgcaaggtcctttacaagcagttggggcaaaacgtggaggcttatgtcgacgatatcatcgtaaaaagccgtaaggctttcaaccacgcgtccgacttgcaggagacctttgacaacttgcacgcagcgggtatgaaactgaatcctgagaagtgcgttttcagcgttcgcgcaggcaagttgttgggcttccttgcagccgaaagaggtttgcccttcttcaagaccctccggggcgcgggaaaattcaattggacacccgaatgccaagcagcgttcgacgagctaaagcaatacctgcaaaacccgccaactttgatcagcccagcaccaggaaacgaactgctactatacctggcagcttcgccggtgccagttagtgctgccctcgtccaagaaagagattcaggccaaaaatcaatctatttcgtctccgaagcattgcaaggagcgaagacaaggtacattgaaatggaaaagctcgcttaagccctggtgatggcttcgcgcaagcttaagcattacttccaggcacacaaagtcatagtgccatcgcagtaccctttgggcaaaatactctggggcaaagaagttactggccggcttagcaagtgggcagcagagctatcccctttcaacttgcattttgttgcccgcactgctgtcaagtcccaagtgctagctgactttgtggccgaatggacaccggcactcgcccccgagcccgaacctgtcgaacagccctgggtgatgcattccgatggttcgtcttcgcacaagggggcgagcattgcggcagtactcacttcgccaattggtgtgctgattcagtatgccgcaaggctgcagttcgacacaaccaacaacgcagcagaatatgaagccattcttctaggcctaagaaaggtgaaagcattgtggattcggctctagctaatccgaaccgactctaagctggtggcgggccatgttgacaagtcctttgaggcaaaagaagaaggaatgaagtggtttttggaggccgttcggtctatggaaaagtgcttcaccggcataacggtcgaacatttacttagaagccagaacgaggaggcagatgccttggtgaaatctgctgcttgtggtggcccacattcgcctggcatcttttttgaagtcctatatgcaccaagtgtgcccatggacagcttggaggtcatgacaattgaccaggtgaaattaggcaaagacccatacgactggcgaaccccgtttgtgaaacatcttgaaactggttggcttctggaagacgaagcagaagcaaagcgcttgcaactcagagccacgaagtataagatggtctcgggccagctctatcgctccggggtacttcaacccttgcttcgctgcatccctttcgccgaaggggaggaaatggcgagggagatacaccaggggctatgtggcgtgcaccaagccgcaagaacagttgcctccaaagtgtttagacaaggagtttactggcccactgtgttgaaagtctgtgttgagcaagtcaagaagtgcgaaagttgctagcgtcatggccgaagccaaaccgcacccagtatgagttgcagcccatcgcatcaatctggaccttcgctagatggggactggacatcattgggccgttcctggtggcacgaaacgggtacaagttcgcaattgtggccgtcgaatacttctctcgatggattgaggccgaacccctcggagcgatcacttcggcagcagtatagaagtttgtatggaaaaacattgtttgccgtttcggagtgccaaaagagttcatcactgacaacggcaagcagttcgactctgacaagttcagagaaatgtgcgaagggcttaacctggaaatcaggtttgcgtcggtcgcgcacccgcagtcaaatagggtggccgaacgcacaaatggtaagatcctagaagcactaaagaaaaggcttgagggggcagtgaagggcaaatggccagaggaaatgctatctgttctatgggccctttggacgacccccacaagaccaaccatgttcagcccattcattcttctttatggcgatgaggcaatgaccccgacaaagttatgggctaactcaccaagggtgacattctctgggggcgaagaggggcgcgagttatcgctcgaactcttggagggggtaagagtcgaagcactcgagcacatgcgcaagtatgccacagtcacttcggcaacttacaacaaaaaagttcgaccgacggagctgttgcctggtcatcttgtcctaaggaagaaggtgaacccgatagccgttggcaagct

SEQ ID NO: 46766 - DNA, 417 bp, Oryza sativa
  Clone ID: PAT_MRT4530_49600C.1
atggccaccagcgcaacctcttggcccttgccaccgccacttccagatgtcatcatcatcgtacatcatggccaccagcacagccttgacccttgtcgtcaccattgccaccgagaaggaggaattgggagtgtgttgaggttgcctgcttttcccccgtcagatctagataacaacctcatctcctgcacgcccatgatgaactggggctgccactccaaagaggggctcagtgactggtgctaccgtcaggagaggagctcgctatccatgattgctggtgtagccatggccctcgccgctgtcatcgacaaggaggagaaaatttttgcttatgtgacaatgtatttaatactatgggcactatatgacatcgagggttggggatggccttatgttactacaacccagtcctag

SEQ ID NO: 46767 - DNA, 465 bp, Oryza sativa
  Clone ID: PAT_MRT4530_49601C.1
tcgggaaaaaaaacatatacactatctaatgaattgactgaggtgatcatgaacaggtatagcaagggcatgttctacacggaggggctcatggtagtcatggtgaccatctccggctcacacttgagctagtcggagatgaagatcatggacaggtagtgccaaagccaggagaaggacagcccgttggacgcgtgctggctggtgctggaccggctgatgaccggcctgcagaggtgctagtcgtggttcccgcagcaggcctcgctcgaccagcgcatgcagtgctaccagtggttgcacgacgagagctgggagtgccagtgctccgacaaccaccacaaggagacgagctacaaggagagcatgatgctgtccttggagctaggctgcatgcggcggatggcggagcactacgactcgcaggtgacgtcctgcaagtactggcactactgcatgcggagg

SEQ ID NO: 46768 - DNA, 415 bp, Oryza sativa
  Clone ID: PAT_MRT4530_49602C.1
tcaatggcttccacggtcgtcgctccctttctggcccttagcctcctcctctttgctgtggtagcacacggttgcacacccaactgccccggcgagcaggctgtcccggcaacacccgttgcagtgccagtgcagtcgcaccatggccagcacgatgagcatggccgttgcccgatcaacgccccgaagctgtgccggcgcctcaacgtgctaaacgggctggtcgatgtgaagattgggtacggccccgatgactgctgctcgttgctgtcagggatcgccgatctcgatgctgccatctgcctttgcaccgccgtgaaggccaatgtgcttggcattagggtcaaccctcccagttgatctcggactcatcctcaacaagtgtggcaagacctatccgaccgatttcacctgc

SEQ ID NO: 46769 - DNA, 393 bp, Oryza sativa
  Clone ID: PAT_MRT4530_49603C.1
atggggaaaactattgaaaactctcggagaggatgtgcccctaggccctttaggcctttaccatgcgaggatgcggagttcaagaagcctctgctacaggtggagctgaagccagcaccgcatccgccatcacatcctgttccacagttaacggggttggaagtggacgagctagaacatcaattgcaaggatttgacgactaccatcaccttcttgcccctctttttcatgccctcactcttgtcggcctagatggggtatatccaattagaagcagcaccagttcgctccagagctccatcgccgtgaactcttcgcggcggaatatggtggtcagcgatgcgccgtggtggattgggaggcgtgtagtggacctggaggcgacaggttga

SEQ ID NO: 46770 - DNA, 752 bp, Oryza sativa
  Clone ID: PAT_MRT4530_49604C.1
gtagaaacgcgacagctgaacaaaaggaagcttgcactcgactagctgatcgaacctctctaccagagcagcatgtaaaatcaaaagtgttattattattctgtgatgaacaattagcattggagattattggttttgttatttagaatttatttgcgaagtggttttggatatgattggatttcacaggtgatctacaggtacaactgtttgttggaccggtcagaccggacatgtgctgccggtcagatttaatacacgtggttggtgaagattccatatggcatacgatggaggtattgtgtgcgtatgtgatgtggagttgaatttggaaggagtccaaatttggtatgattggttatgtaaagtttgtttctggtactagagggtttcctagggtgattaggagttctagtatgagtttggttcgtggctttaggctgcctaccttgggtataaatagagagggagcgtcagactggcggcatcgcggcggtccgaccggtgggcacacggcggtcagaccggcggtggcgacagggagcggcaggcgatctcggcggttcgatcggagtttaatctcggtcagaccgacgttcatcaggcggtcagactggcgcatacacttcggttaggccgcgatccgtcgaatttgagggatccatcccagctgatgtacactccagctgataccttcacagccgatgcatactctgttcttcgaatcgatctcttcatcgaatccgcctcga

SEQ ID NO: 46771 - DNA, 192 bp, Oryza sativa
  Clone ID: PAT_MRT4530_49605C.1
tcgcccacgcgtccgcttgggtggtactcaagcccagctcctccgcttgatgttcactcccaggccgtataatttctccacctttgccagattttgtagagccctctaagacaaagaccaccactcttccaaagggcattcaagatcgcatcgggagacatcacccgattccgggctgtatcagggggaact

SEQ ID NO: 46772 - DNA, 264 bp, Oryza sativa
  Clone ID: PAT_MRT4530_49606C.1
aaggattattcctacttttggtcctgttaagttactcccaaacatattgtttaacactgtctctgtggcttggcctgaacaaaagttagatacacttaaaccacacaagctataggccaccgagagctaggccacgaatcccaattatgcaactaaacaagaagtgagctctctacactcagagcactcgcaattggacatagaacccaggctttaccgtgatctttacctgacaaggatagtgcagaagctgcttgtcacaga

SEQ ID NO: 46773 - DNA, 325 bp, Oryza sativa
  unsure (1)..(325): unsure at all n locations
  Clone ID: PAT_MRT4530_49607C.1
gggtnggggcgaaaaaaaagaaaatttccatacatttgaatcacccaatacagcttgtgctcggccatgcattttcggttggattgaatagcactactaggaaaaaagggttttgccggggccaaaaatagttttttcaggtgggggaaaggacctcctattctctaagggttgcaaaaattattttctctagggacacctgcatcttcgcaggcgggagattcacccgtctgggaaaaacattacagcgtttaaaaaagggggtgcgcccgatgggtctcctcttgcattcggcggggtccctcacaaccggggcggacgcgtg

SEQ ID NO: 46774 - DNA, 248 bp, Oryza sativa
  Clone ID: PAT_MRT4530_49608C.1
catgcacgcgcgtgctgacttaccccctttttttttttaagtgaccttataggggtttaacagaatgaccgcagcactggggtattacttcccgtctgttattctacttagctcttgctatatatctgtttgtggaaattataagaccgcttttctggttagttgcttgtcttaatcacctacactcatactgagacaaatatttctgaggggtaaagtacttgttgagattagatcttaccttgttt

SEQ ID NO: 46775 - DNA, 204 bp, Oryza sativa
  Clone ID: PAT_MRT4530_49609C.1
atggtcagtatttacttgatgacgtggcgcaatgtgcaagcaacttcgttgtacaagctacccaacatatacatggctcagggcaccagggcggtcgcactgcccgtcctaccccaggaccagaccagaactgttcatgagtggtcgacgacggtcgagatgcgatggaaatgtgcctgcgtcgcccgccgtgtgccagagtag

SEQ ID NO: 46776 - DNA, 353 bp, Oryza sativa
  Clone ID: PAT_MRT4530_4960C.1
ggggaaaacacccttctttcaaaattagagttcctttttccccaaaaatttttcaaaaaccgggggaggggcccccgggtcttattaaacgaatttgaaacagggttgggaagggggccccagggaaaaggggtgcccaaaaataaggggttttttttttttttttttttaaaacccccaaattttggggcctagacctaactgggggccaggggaggggcctcccttaagggagccacggggggccgttaaatctcctaagcccccccacaaccccagggccaaaactccagggccgagcctaagaactttatattggggcttccagggggtttaaaccccaggggtttttt

SEQ ID NO: 46777 - DNA, 389 bp, Oryza sativa
  Clone ID: PAT_MRT4530_49610C.1
gaccaaccaaaaccagcgatcggggcttattacatttagcagagcggcaaaactctgaaaagtccttgactggtgttaaacatactaggattcagaatgcgtggctaacaataccaatagatgaaacggctgaaggaaccaaaaaggaaaagtggtactttacagccccgagtaataggaggaatatatgagacctaacgacgcagaaaacaagaaacacgagctaaaataagggcatgaactgagctagtcgcaatgcaccatgcctatagaaagcatgctgcgaagtttagtggccaagcaccaacccaagtatgcgtatcgatcaggcacgcactgaacctttagaatttgacaaactgactgtgggttgaggaattaacgccaaa

SEQ ID NO: 46778 - DNA, 1608 bp, Oryza sativa
  unsure (1)..(1608): unsure at all n locations
  Clone ID: PAT_MRT4530_49611C.1
atggaggccctgctgcctacggcggctgcgcgaagcctcccgtggcaagagttgcctccgcgcacagacgccggcgagctatcgcgggccagcaaacaagttataccgccccgttcgccattcttgagcttcttgaagtgcagttcttcatccgtgctgaaacggaggaaacaagagctctgctgctgcttcttcttcattatttttcttcttccatttttgtctgtcctctctcgtcttcttcttgtgtcctctctctccgtcctcgagcgcctcctccgcctcctcgcctcccgcggcgtcttctccgagcacacctcctccccgcgccgcttctcgctcaccaccgtcagccgcaccctcgtcccggccggcgggggcccctccgccgcgtcctacgccgactacgtgctgcagcaccaccaggacgagctcgtccacgcctggcccctcctccacgagatcgttctcgaccccgccggctccgagcccttcgcccgcgccaacgccggcgccctcgcctgcgagccggtggtgccggacacgacggacggcagcacgaggacgagggcgctgctggagaatgacatcttcgtcatggccacctaccggactcagggcagggagcgctccgaggaggagttccggccgtgttctcgaacacaccgacgaggtgtgtggtcgcggaggagcgcggatgcgggggtgcagcggaaggcgagcgcggcggaggagcggcggcgggcgagcgcggcggtgggcaaagcagcggagggcgagctaggcgaagcagaagacagtggatgggacgaggagctcccccgtgctcggccgccacctactgtgagaatggaagtatgggtggagagaggtagaaaagaattggggtcggtgtgtgtcttccccaatgctcctggtgttgtgcttaccgccggggccgacgccccgcggcctcttgtggggggctgtggttcgggcggcggcgctggggccgctcccgcgccgccttgggcgcgccnntgggggcggtcgggcgttgcctccggggttcggtgcttctgcccgccgggggcgtcccgggccccctcccgggtctcgggttgccctctcgccccccgctttggggtggggggcgtttttggttgggttcccgtcgcgggttggtggcccccttcgcggtcgttgcgtttctcnggggccgcggtggcggttgggggggctgcgcccgcggtcgtgtgggtttcttgtccgcggnccgcctccccctccctcccggcttggctggccgccgcgcttgctcgccgccgctccgccgccgcgctcgcgctccgctactctgtccgcggcctgctcgcgctccactgctcagcccgctgccgcgctcgcgccttccgctgctctgttgccgcgctcgccctccgctgcgccgcccgcatccgtgctcgtcacttcgcccgctgcctccgctccgccgctgcgctccgctgcctccgctccgccgccggacggccgcgccgcgtagccttgcccacggcgatgacgacggcggccacggcgcgcggctgctccgcccgcagcctgaaggagaagagaagagagagaaaataa

SEQ ID NO: 46779 - DNA, 1507 bp, Oryza sativa
  Clone ID: PAT_MRT4530_49612C.1
atggcgagtgtgctggcgtgcggcagcaccaacttctcgggtgtctccctgcagctccgcgacgaggcgagctgtgcctgtgagaagccgatggcgacgatctactggagacttgcggccgtgcggaaggaggagatagttcggaaaattctcaagagttatcgggaccgaatcgccacccgccgccgccgcggccgctcgccgctagccggccgcatccccgttgcatcttcctttggcggaagcggcactccatccagtctcgccgagtctccggccgaggacttccatcaggtatgctctaggaatcccctcttccccaacccccttctgccctcatcccccgtcccctcctccacatcaccctccttgagtcatcgtcctggactccgacgagcttccatcgccgcacatggaggccctgctgcctgcggcggctgcgcgaagcctcccgtggcaagagttgcctccgctgcacagacgccggcgagctatcgcgggccagcaatcaagttataccgccccgttcgccattcttgagcttcttgatgtgcagttcttcatccgtgctgtgagcggacgccgggcgagacgacacgagctcttgcttctttttgtctttttgggatgtaacttcatctaagatttccgatatttttcctctgtcgaatacttttaatagcaagaatgtatagaaaagctgaataagatacaaaaatttggggacactatggacacaatccattagtatgttaagcgcggccatttgaggtgtcagcctagcatgtatttttgtaaagtgtattggcacactatggctgttgtatagtatgcacttatctccctgcaacgccattaaacaagcacaacgtcgggaagggaataaactgatggagaaagcaaagttttgctgcacgaagctttgttcaggaaacggaggaaacaagagctctgctgctgcttcttcttcattatttttcttcttccatttttgtctgtcctctctcgtcttcttcttgtgtcctctctctccgtcctcgagcgcctcctccgcctcctcgcctcccgcggcgtcttctccgagcacacctcctccccgcgccgcttctcgctcaccaccgtcagccgcaccctcgtcccggccggcgggggcccctccgccgcgtcctacgccgactacgtgctgcagcaccaccaggacgagctcgtccacgcctggcccctcctccacgagatcgttctcgaccccgccggctccgagcccttcgcccgcgccaacgccggcgccctcgcctgcgagccggtggtgccggacacgacggacggcagcacgaggacgagggcgctgctggagaatgacatcttcgtcatggccacctaccggactcagggcagggagcgctccgaggaggagttccggccgtgttctggccagcggcgtgtccacaaccagctcgcacgctcccgccaccgccgccaccgccgccaacgccacgtccgcctccat

SEQ ID NO: 46780 - DNA, 2907 bp, Oryza sativa
  Clone ID: PAT_MRT4530_49613C.1
cttctctcctagcgctagccctagccctagggcgcgcgttcgctcaccgccgctgccgcctcggcaggaatttgcatccgtagcgtgatcttcaaaggctgccaagatggttaagtttacggttgaagagctgcgcaggattatggacaagaagcataacatccgtaacatgtctgttgtcgctcatgtggaccatggaaaatctacccttactgattcccttgtggcagctgctgggattatagcccaggaagttgctggtgatgttcgcatgactgatacccgtgcagatgaagctgagcgtggtattacaataaaatctactggcatctctcttttctacgagatgagtgatgagtcactcaaaagttacaagggtgacagagatggaaatgaatacctgatcaacctcattgactcacctggacatgttgatttttcttcggaagtcacagccgcacttcgtataactgatggcgctttggttgtggttgactgtattgagggtgtctgtgtgcaaactgaaactgtgcttcgccaagcccttggtgagaggattaggcctgtcctcactgtgaacaagatggatagatgttttcttgaacttcaagttggtggtgaggaagcttatcaaactttctcccgtgtcatagagaatgcaaatgttattatggcaacatacgaagatgcactccttggtgatgttcaagtctatccagaaaaagggactgttgctttctctgctggcttgcatggatgggctttcaccttgtctaactttgcaaagatgtatgcatccaagtttggagttgatgaatctaaaatgatggagaggctttggggtgagaactactttgaccctaccacaaagaagtggaccatcaaacacaccggttctgatacttgcaagagaggttttattcagttctgctatgagcccatcaggcaaattatcaacacctgcatgaatgatcagaaagataagttgttgcctatgctgcaaaagcttggtgttaccatgaaggacctaactggcaaggctctcatgaagcgtgttatgcaaacttggcttcctgcaagtaatgcacttcttgagatgatgatctatcaccttccctctccagcaaaggctcagaggtaccgtgtggaaaacttgtatgagggcccccttgatgatatatatgcatctgccattagaaactgtgatccagaaggtcctcttatgctgtatgtttcaaagatgattccagcatctgacaaggggaggttctacgcttttggtcgtgttttctcagggagagttgcaactggcatgaaggtccgtatcatgggccccaattatgcccctggccagaagaaagatctgtacgtaaagaatgtccagcgaactgtcatctggatgggcaagaagcaggagtcagtggaaggtgttccttgtggcaacactgttgctatggtgggtttggaccagttcatcacaaagaatgctaccctgacaaacgagaaagaagttgatgcctgtccaatcaaagccatgaaattttcagtgtcccctgttgtgcgtgttgctgttcagtgcaaggttgcctctgaccttcccaagcttgttgaaggtttgaagcgtctggccaagtcagatcctatggttctctgtactgttgaggaatctggcgagcatattattgctggagctggcgagcttcaccttgaaatttgtttgaaggatctgcaggaagacttcatgggtggtgctgaaattactgtctcccctcctgttgtctcattccgtgagactgttcttgagaaatcttgccggactgtcatgagcaaatccccgaacaagcacaaccgtctgtacatggaagcccgcccaatggaagagggtctgcctgaagccattgacgagggtcgtattggcccgcgtgacgatcctaaagtacgctccaaaattctatccgaggagtttggttgggacaaggacctcgcaaagaagatatggtgttttgggccagagaccacaggccctaacattgttgtggatatgtgcaagggagtgcagtatcttaacgaaataaaggattccgttgtggctggctttcagtgggcatcaaaagaaggtgcactggctgaagagaacatgcgtggccgtggcatttgctttgaggtttgtgatgttatcctccattctgatgctattcatagaggtggtggccagatcattccaacagccaggagggtcatttatgctgctcagctcactgccaagccaagactgcttgagcctgtttacttggtggagattcaggcccctgagaatgctcttggtggaatttacagtgttctgaaccagaagagaggacatgtgttcgaggagatgcagaggcctggtaccccactctacaacatcaaagcttacctccctgttatcgagtcatttgggttcacaagcacccttagggcagcaacctctggtcaggccttccccctctttgtatttgatcactgggaaatgctgtcagttgatcctttggagcctggcaccagacagctaaccttgtcctggatatccgcaagaggaagggtctgaaggagcagatgactcccctttccgatttcgaggacaagctctaaatttttggccgccgcatgtgttgtgccgttacccttacatgttctagttggtctactgctaaaagaactgctttcgttgtcgtatttcatttcccttttgtcgaatgcatgtgtttcacatcaacaatcctatgttcgcgtgctactgagaaactatttttactcaaaaaaaaaaaaaaaaaaaaaaaaaaaaggacggcggcctcatatgaggatggcatagccatgcgtacgtgtgcgtgcatcgtcagacatagctcatagagagtgtcgcct

SEQ ID NO: 46781 - DNA, 857 bp, Oryza sativa
  Clone ID: PAT_MRT4530_49614C.1
gcacgagggcttccattccatccatctctctcgctctctcgcttgctcgcctcgccgattccgcgggcggagtgaggagctcgccgctgctgcttgtcatggcggccgccgcgctgaccagccagctcaacgccctcgtcaacaacatgttcgccatgggtttgctggacgaccagttccagcagctgcagatgctgcaggactccaccgcgccggacttcgtctccgaggtcgtcacgctcttctgcgacgacggcgagcggatcatctgcgagctctccaggcagctggagaagccaaatgtggattttgacagggtggactcgtatgtgcatcagctcaaggggagcagcgcaagtgttggtgctcagaaagtgaagaacacttgcattcagttccgtgagttttgccaacagaggagcagagatgggtgcctcaagactttggatttggtgaggactgaattctatgatcttcgtaacaagtttcaggctatgcttcaggtcaagttgaattatttttggattgacatgcaccagaacagtcaagaacacatctacaatccagcctttccatcatctgggtcccgatattccacactgaaggttgaacagctatatgttgatttgccattatttgttggtcggtggttaagatttgatcatttcgttgcaactacatacatacagcattgcaaattgcagcagcagcaggaggaggcaagactgcagtgctcatgtgaatgtggtcctctggcggcattcatggtttcatcttattgcaaaacagtgattttcctgaccaatcagaaattcacaaccaatagaaagaagatacacacaaacaacatattttag

SEQ ID NO: 46782 - DNA, 561 bp, Oryza sativa
  Clone ID: PAT_MRT4530_49615C.1
gaagaacatcagttcttcccgactcttgcacttcgagttcctccccctctgttcttgggctgtagaatccttcctcggttctgttcacctgcgtgcacaggtgtacgggatgagcatgtgcttccggaactccgtccgcttgagaaactgcatgggtaggcgggcgatcaaatttttgggtagcgcttcaagcgcgactgctcctattcttcgttcttcgacgataacgttgcatcttcctctgtttctgcttcacgatcacttctaatggagagaacggatgagacaacatcaacggaggcaatatgaatacctcaacatcttctgcaccattccctgggtataagattctaagcttatttgattttcttcttgatgtctatgcttattttgccataagcatgctcatgtttatgtttagcctcatcaccagatcgcttctcattgtgtatgtcttgattattgtcctaaaattttggattaaaatatgctaaattatgaccaaatttctaacaattaattgcttgcaacgagtgttcatgttactattgttcttgcgcg

SEQ ID NO: 46783 - DNA, 306 bp, Oryza sativa
  Clone ID: PAT_MRT4530_49616C.1
atggggtcggcagtagtgcggggtgggcagcgggagaagaagtggcgggagatgcgacggcagccgggcccgtgccggtggcaggacaagaagccacggcccatgccggtggcgggagaagaagttgcggccgggctgtgtcgacggcgggagaagcagtggcggccgagctggggaggcggcggcctcgccctcccttccgccagatccggcaggaggggaggcggcggcggtggagcgactgcaaccagaccggaagaagattttttttttaggatttgcgatgaatttgtttttgagaattag

SEQ ID NO: 46784 - DNA, 106 bp, Oryza sativa
  Clone ID: PAT_MRT4530_49617C.1
atggcggttataagtatgcggaatgtccattctgcccctgcaaccgccatcaggatatcatctggagcgtccacgccaaaacctggaatcaagggcgcaaatgggg

SEQ ID NO: 46785 - DNA, 246 bp, Oryza sativa
  Clone ID: PAT_MRT4530_49618C.1
atggcgcggcggcaacaaacaattaatcgagagttcgcacctgcattggtacaagcgcttcggctcgccaaaacgcggcgtcctcggaggagatgccgcagcggcggaggcgaccggggggaggaggtagtccagcggcggcggggaggaagtcctcctcgtacctggctgtgcccaacaactcccgcaccaactcaatcagcagattaccctcggctggaggaggacggtggagttctttcctaa

SEQ ID NO: 46786 - DNA, 540 bp, Oryza sativa
  Clone ID: PAT_MRT4530_49619C.1
ccacgcgtccgagccattcggaggatggcacgcggcgactgctaaagcgtgcacttgatctatgacgatagcaccggcacctgacagagcctcctcccttcagacaatctcccaacacgactgtctgctcattccgagctactgagaaggcggcccggtgagtaggactaagactgacacggctcgaccatgcaaatttgctacgaggagcaccacatgggaatctgctataacctagacttgctccaccgtctgacatgctcacaatacactgcaccgataacgctagcatgctcagaactcgtgtatgatgcaccatctagcgagcggagagaggcttgaaagcactataccatcatgaataggagggacttctcgagatcacaagtgaaccctccaagtgacaggtccactcgagttggtgttgagctggcaccatcgctctaacttgatcaggatgacctacacaaccttgctacagagatactatatgatatgaatgacatgtacaagggagatgtgcgtggttttacgacgata

SEQ ID NO: 46787 - DNA, 592 bp, Oryza sativa
  Clone ID: PAT_MRT4530_4961C.1
ggcgaagagaatagcaaagcaatgatgatccctgcgttgtattagtgtacaattacaggttattagccaagctactagaaactaggagttgcaacaaaaataactcctcagcaaagcatctgcggcggcggagattgttgcgccaatatgcactccttgaatacgttctcataggagtgcatatacgttctcatacttgtcccttctgcacaggctctgtcgcttactttctgaacatagtgcactggatacgcacggtgttctcgcggaaaatcatggacaaaaaccacagaaaccaacggtgctatagctgaaatcataggcaaaaaccatataaagtatagaaaccaccaattaagaacacttgcagatcaaggacgtcgtattctgtggcgtatacaagttgcactgctcatctcccttttctcacacgtccaaaactcgagctcgaaatctcttcagctggattatatatgccttccaacaagatggccatctccgtcgtgctagcagcgcccgcgagtgtctcctccaaagcaagcaaaggagcaactggtggtcaccattccagggttcactgtgctcgggctgc

SEQ ID NO: 46788 - DNA, 906 bp, Oryza sativa
  Clone ID: PAT_MRT4530_49620C.1
cctctctcctcctccggtctccttcctccccttcacctccgcggcgcgccgtcggtcgccgctcgccgccgccttctggttcttctccggtctatttccccgcgggattcgtcgcggacactccggttggttggtgtatcttcggttcgagttgccaaaatctgattgttctccggaggtgaaggtttactaggcaatcatggatgtcgataagcaggaaacgatggaagagaccattcttgttggtgatgatctcatgcgtgggttgccatcccctgtcataccaaaggaaattgcttcacatgtccttgacggtgttgagatttgtgatggcatactcaaaaatcttttcttatgtctgcaaatcaatgatattgagccgttttgccaagatgaaattgtactataccgacaatgtgctgagaaaagggacaaggaaataagagagcggctgcaggatagtgaatataagctgggtttttcaatgcccctggaagaagctaaggaaagagctacccaactccaatcagaaatcacactgcttgaaaggcgcatgattcttgctagtggacttgagggcatggaaggatttcgccaaagatggagcttacatggacagcttggagacacaaggaaaaggttggaagcgctgaacagtggaatcgtaaaaagagggagccaaagttctccagtgcaagagacaactcctgcagtcaggaagaggtggttcctttggtaggttagttttcgttttctgatttgcaaaccagtgtagcatatggtatattattggccatgggcatgcactcgttcctttccacagtatgctgtctccaaaccaacaatcgcacctgctaaccagtacaatttgcatttatacataggctccacccccaacttccaact

SEQ ID NO: 46789 - DNA, 279 bp, Oryza sativa
  Clone ID: PAT_MRT4530_49621C.1
atggcggtgggctggccgataaaggagagagcagctagccctgcgagccagtttaagttgtggggtggtggagtgggcttgggtggtgatgggatggcgcggtggtccgacgatgcaccaagaaccttcaacgtgcaacggtggccattggtggactcctgcaatgactccgaagctgacgaggccttcgccgtcttggtatcatttcttgctttacggtgggtgaccatcattcttatttggttactgctaggcaaagtcggagctgcttcgctgtag

SEQ ID NO: 46790 - DNA, 152 bp, Oryza sativa
  Clone ID: PAT_MRT4530_49622C.1
ttttgtgtgaattaaaaagaatgggctgttcatactgaatcatatatcgagttaccaatggagtgtacatgaatgccaccatgtggcttctgtgagcgggaccacaaaagacacgaacttgcagttgagcctatgatagattgatagtgtta

SEQ ID NO: 46791 - DNA, 1193 bp, Oryza sativa
  Clone ID: PAT_MRT4530_49623C.1
taagtattgactcaacatagttttgctgtcgtggggcgcctcaaccaaactgaacttaattatccttttattcaagcatgccgtagctcgacccttccctgcccattatcccgctcgccgccgagccctctcccggcgctcccatcgcctcctccgcacgctccgccgccactgccgccgaggaaggaagcccgccacgcgctcggcgatgagagaccggcccctccccgccaaggttcgaccagtccatcctcctcctcctccgcagctccggcgccgccccggcccctgcccccctcctccctgcctccgccgccggctccctcctcgacgacgacgacgaccgcgacgccgcctccgctcgccgtcggctcccctcggtcgtgagatgatgaccttcgcaacgccgtgaagcagcggatccaccagctcccctccccccgcctccgtcgtcagctgccctcctccccgtctccgccgccggctccctcccctccgccgccggttcccctcctcgccgtcggctccatctccgccaccggctccctcctcgcccccagcttcctccctctcccccccacccgcggcctacaaagcaaatgcccccgccccccgcctcctctcgtcggtcaacgccgcgctcgatctctcgccgccatggcccgcctcgccgtcgccgccgcactcctcctcgtcgccctctgccgcgtcgtccacggcgaggccgatcaggagaccgcccccgcctacgccaaccgtgaagcctacgtcgagcacaatggtggtgacgccgccggcacgtccgtcgccatcgtcccgccctacctcgacgccgccgccgccgcccgcagggcttcctccgcttcccctgccgctaccactgccgctaccgccaccacatgcgccacggcggccagctccaccacggccgccgctcccaccaccaccatcatcgccaccaccacttccaccgccgccgccaccaccaccaccacaggatgcaccaccaccgcggctgccgcttccaccaccaccaccaccacctcagcttccgccaccgtcacccttatctcttcctatccctcctcctttcctctcctcctctccctcctcctttcctctcctcctcctttcctctcctcctctccctcctacggacccggcccaataacagcccgtttgacctctcctcc

SEQ ID NO: 46792 - DNA, 1455 bp, Oryza sativa
  Clone ID: PAT_MRT4530_49624C.1
atggcgggccgccgccgcgtggtggtgctggtggtggcggcagcgctgttggtcgccgtggcctcggccggcgcgagcggcaagtcggcgcggttcgagctgctccggctcgcgccggcggcgtccctggccgacctggcgcgcatggaccgggagcggatggcgttcatctcgtcgcgcgggcggcgccgcgcggcggagaccgcgtccgccttcgcgatgccgctctcctccggcgcgtacaccgggacgggccagtacttcgtgcgcttccgcgtgggcaccccggcgcagccgttcctgctcgtcgccgacaccggcagcgacctcacctgggtcaagtgccaccgcgccgccgccgccgcctccgcctcccccagaaacgcctcctccctcccggcgcctgcgccggcctcccctcgccgcacgttccggccggacaagtcccggacgtgggcgcccatcccgtgctcgtccgccacctgcagggagtccctccccttctccctcgccgcctgcgccacccccgccaacccctgcgcctacgactaccggtacaaggacgggtcggcggcgcgcggcacggtgggcgtcgactcggcgaccatcgcgctgtcggggcgcgcggcgaggaaggcgaagctgcgcggcgtcgtgctgggctgcaccacctcctacaacggccagagcttcctggcctccgacggcgtgctcagcctcggctacagcaacatctccttcgcgtcgcgcgccgcgtcgcgcttcggcggccgcttctcctactgcctcgtcgaccacctcgccccgcggaacgccaccagctacctcaccttcgggcccaacccggcgttctcctcgcggcgcccgtcggagggcaccgcctcgtgcaagcctgcgcctgcgcccacgcccgcccccgcaggcgcgcccggcgcgcgccagacgccgctggtgctcgaccaccggacgcgccccttctacgcggtcaccgtcaagggcgtctccgtcgccggggagctgctcaagatcccgcgcgccgtctgggacgtcgagcagggcggcggcgccatcctcgactccggcacgagcctgacgatgctggccaagccggcgtaccgcgccgtggtggcggcgctgagcaagaggctcgcggggctacccagggtgaccatggacccgttcgactactgctacaactggacgtcgccgtcgggcagcgacgtcgccgcgccgttgccaatgctggccgtgcacttcgccgggtcggcgcgcctggagccgccggcgaagagctacgtgatcgacgcggcgcccggggtgaagtgcatcggcttgcaggagggcccgtggccgggcctgtccgtcatcggcaacatcctgcagcaggagcacctctgggagtacgatctgaagaaccgacggctcagattcaagaggtcgcggtgcatgcactga

SEQ ID NO: 46793 - DNA, 2010 bp, Oryza sativa
  Clone ID: PAT_MRT4530_49625C.1
accacaacacaaatacggtatacgaaatacatatacggtcgtagaaaagtagaatacacagcagccatatgaatcatgaatgaactcgacacaacaacacaagcagacgatggagaagaagaagcagcggcaagctaggctgatcgatcgagagacctagaagcggttcacaaagtccttgagccaactcatcaccccgtctttatacttgtcctcggcggtggtggtgttgttggtgcaatgtgacgcggcggaggcgacgacgtgcgccggtgcggtgccggcgaggccacggccggagacggtggcggcggtgggtggggacggcggcggggatgggtgggtgggtcccggagggaggtggggaggagggagaggaggagaggaaaggaggagggagaggaggaaaggaaaggaggaggagaggaaaggaggagggagaggaggagaggaaaggaggagggagaggcggcggcggcggcgtcctccgcgcggtggcggaagctgaggtggtggtggtggtggtggaagcggcagccgcggtggtggtggtggtggtggtggtggaagcgcttggtcctcatctcggactcctcctcctcctcgtggtggtggcggaaccgcttcatgggcgcaccctcctcgcgctgctcgtggtcgtcttcgtggtggtggtggtggtggcggcggcggtggaagctgatcaaccggtggtgatgatggtggtggcgatgatggtggtggtgggagcggcggccgtggtggagctggcgatggccgccgtggcgcatgtggtggcggtagcggcagtggtagcggcaggggaagcggaggaagccctgctgggggcggcggcggcggcgtcgaggtagggcgggacgatggcgacggacgtgccggcggcgtcaccaccattgtgctcgacgtaggcttcacggttggcgtaggcgggggcggtctcctgatcggcctcgccgtggacgacgcggcagagggcgacgaggaggagtgcggcggcgacggcgaggcgggccatggcggcgagagatcgagcgcggcgttgaccgacgagaggaggcggggggcgggggcatttgctttgtaggccgcgggtgggggggggaggaagctgggggcgaggagggagccggtggcggagatggagccgacggcgaggaggggaaccggcggcggaggcagggaggaggggagccggtggatccgccggcggccgaggcgagccgacggctcgcggaggtggcgtcgcggtcgtcgtcgtcatcgaggagggcagccggcggtggaggcggggaggaggggggagccggcggcggagacggggaggagggcagctgacgacggaggcgggggggaggggagctggtggatccgggggagccgacggcgagcggaggcggcgtcgcggtcgtcgtcgtcgtcgaggagggagccggcggcggaggcagggaggagggcagccggcagcggaggcagggatgaggtgagccggtggaggattttttttgctaagtgtgtgagggagaaggagagagagaggaggggggatgagtggtggcggcggcggcgggcaggggccggggcggcgccggagctgcggaggaggaggaggatggactggtcgaaccttggcggggaggggccggtctctcatcgccgagcgcgtggcgggcttccttcctcggcggcagtggcggcggagcgtgcggaggaggatggattggtcgaaccggtggtgggaaaggagtgtatggaggcggagtaatgttcgcggcggatgaggagctcgagctccgcgacgtagaggggcgccgccgccacagctggggacgcgcggtgcagagcgctacggagtccgggagggaccgacgggcgggaggatgcgatcaagctcgtcgtcctcgccggagggggccatctcatcgggtgaagcactagctaaagagcggccgccagcgcggtggcaacccagcttttcaattttaccctcct

SEQ ID NO: 46794 - DNA, 540 bp, Oryza sativa
  Clone ID: PAT_MRT4530_49626C.1
atggcgtttcatccacccctctcctacccgacgacgccaattactacgtcaacctgctcggcatctccgtcgacgggacacgcctcgctattcccaacgacacgttcgcgttcaacccaaacaccggccaagacgcgcggcgtcgccttccagatcggcgcgccggcgaccctgctggtcgagccggcctacaccgccgtcgtggaggcgttcagggcgcggatgtctcggacgtacgaggccgtcaacgggagcggcctcctgtgcttcctcgtcgacgacgcgagcaagaacgtcgtcaccgtgcccacgatgacgatgcacttcgacggcatggacatggagctgctgttcggtaactacttcgcctacaccggtaagcagagcggcggcggcggcggcgacgtgctgtgcctgatgatcggcaagtcgagcaccggctcgcgcatcgggaactacttgcagatggacttccacgtgctgtacgagctcaagaactccgtgctgtccgtgcagcccgcggattgcggcaagatctga

SEQ ID NO: 46795 - DNA, 531 bp, Oryza sativa
  unsure (1)..(531): unsure at all n locations
  Clone ID: PAT_MRT4530_49627C.1
aagtagaatacacagcagccatatgaatcatgaatgaactcgacacaacagcacaagcagacgatggagaagaagaagcagcggcaagctaggctgatcgatcgagagacctagaagcggttcacaaagtccttgagccaactcatcaccccgcctttctcctcctcctcgccggcggcggcggcgtcctccgcgcggtggcggaagctgaggtggtggtggtggtggtggaagcggcagccgcggtggtggtgcatcctgctgctcatcagcgccttcctgatccaccgcctcgccatctcctccagctcgcgctcgtcgtcgtccttgtggtggtggtggtggaagcgcttggtcctcatctcggactcctcctcctcctcgtggtggtggcggaaccgcttcatgggcgcaccctcctcgcgctgctcgtggtcgtcttcgtggtggctatgatggtggtggtgggagcggcggccgtggtggagcctcgccatctcatcctngtcttcctcctcgcccacgcgtccg

SEQ ID NO: 46796 - DNA, 1040 bp, Oryza sativa
  Clone ID: PAT_MRT4530_49628C.1
atgaagctggtggcgccgttgtcacgtcgtggtcgtcttagcgtcgttggcaccgtcgtcgtcgagagggaggaagctgggggcgaggagggagccggtggcggagatggagccgacggcgaggaggggaaccggcggcggaggcagggaggaggggagccggtggatccgccgcttcatggtgccgcgaacgtcgtcgtcgtcgtcgcggccgaggcgagccgacggctcgcggaggtggcgtcgcgcgccgcgaaggtcatcatcgttgcggccgaggggagccgacggctcactgaggcggcgtctcatcgaggagggagccggcggcggagacggggaggagggcagctgacgacggaggcgggggggaggggagctggtggatccgctgcttcacggcgttgcgaaggtcatcatctcacgaccgaggggagccgacggcgagcggaggcggcgtcgcggtcgtcgtcgtcgtcgaggagggagccggcggcggaggcagggaggagggcagccggcagcggaggcagggatgaggcggacctcttaagtggtccgcctggaaaaaatgattttcgcaggcggatgatatcgagggtcgtgtttgcaaaaggggccggggcggcgccggagctgcggaggaggaggaggatggactggtcgaaccttggcggggaggggccgcgcagagtagcgacgccgtttgccgcccgccgaccccgcccgagatgctgtggtgggaaaggagtgtatggaggcggagtaatgttcgcggcggatgaggagctcgagctccgcgacgtagaggggcgccgccgccacagctggggacgcgcggtgcagagcgctacggagtccgggagggaccgacgggcgggaggatgcgatcaagctcgtcgtcctcgccggagggggccatctcatcgggtgaagcctcgtcgcagaagttgccggcagaccccgtcgtcgtcgtcatttatggaggcatccaacgaagctcacggctatcgccgccactcccgcctctgccgccgctg

SEQ ID NO: 46797 - DNA, 366 bp, Oryza sativa
  Clone ID: PAT_MRT4530_49629C.1
atggcgtcgacggacagcgcatccggcggcgccaccctcaggagggccagctccggctatggctacggcaggcgcgcaacggaggcggcggatccagaggaggaggaggtggcaatagcggtcgacggcgggcgcacggcctcctcccgcccaggtctggcagcgggagcggctagcggcgacgccggtgggagcggcttccacgacgccggtgggagcagcagcggtgggcctcctcccacccagatccggcggcggcgggccttgtcctgcacagatccgatggctggagtggacggcggtgggagcgggcagtggtggctcccacgacggtgggagcggagggcacgacgccggttgatgtga

SEQ ID NO: 46798 - DNA, 2401 bp, Oryza sativa
  Clone ID: PAT_MRT4530_4962C.1
atggtgaacactcgcagcaacgggaatggtcccaacaaccccaataacaataacaatggagagaatcccactcttgctcaagttcttgctcaacagacacagctaatgaacatgatgatgcagcaacttcagaaccagcagaaccaaggaaataaccatgtacctcctcagaataagttagcagaatttcttcatgtaaggccgcctgttttctctagtaccactaatcctgttgaagctggtgattggttgcatgccatagagaagaagttggatttgcttcagtgcactgatcaggagaaggtctcatttgcatcgcatcagttgcatggccctgcctctgaatggtgggatcatttccgccttaataggactactgctgaacctatcacttggcttgagttcaccgctgctttccggaagacgcatataccatcgggagtggtgtctctcaagaagaaggagttcaggtcgcttacgcagggatctcgctctgttacggagtatctgcacgagttcaatcgtcttgctcgttatgctccggaagatgtgcgcaatgatgaagagcgtcaagagaagttcttggaaggacttaatgatgagctttcttacccactcatgactggagattattctgatttccagaagttagtggataaggctattcgtcaggaggacaagtataatcgcatggaacagaagaaatgccggattgctcacttcaaggcacaacaggggaataatcagaagccgcgtcttactttaggatcccagtctatgccacagggaggttcttcgtctgttgttcgtccgcagcgtcagttcttcaacaacaatgctggcaacaacatccgcaatcaagctccacgtcctgttgcagctccagcacagcaacaacctgtcaagagggagcaaggcagcaagcccgtggtgtgtttcaactgtggagacccaggacattacgctgacaagtgtccgaagccccgacgcgtgaaggttgtccctgcccagagcaactctaccgcaccagcatcaaaggcccgtgtcaatcatgttgctgctgcagaagctcaagatgctccagatgtgattttggtccgggagtattccgatgtgttcccagatgatttacctgccaatgagttggcagaagttaagaggcaagtagacgatttgcttcagaaaggatacatcagaccgagttcatcaccatggggagctccggttatttttgtggaaaagaaagatcatacccagaggatgtgtgtggactatcgtgcattaaatgatgtgactatcaagaataagtatccactacccagaattgatgatttgtttgatcagcttaaaggtgccactgttttctccaagatagatcttcgatcaggatatcaccagttgagaatcaaagaggaagatatacctaagacagcttttaccactaggtatggattgttcgaatgtactgttatgtcttttggacttaccaatgcccctgctttcttcatgaacttgatgaataaggtgtttatggaatacctagacaagtttgtggtggtctttattgatgatattcttatctactctcgaaccaaagaagagcatgaagaacatcttcgccttgcattggagaagctacgagaacatcaactgtatgctaagtttagcaagtgtgaattttggttgtctgaagtgaagttccttggtcacgtcatctctgcaggaggagttgccgtcgatcctagtaatgtggaatccgtaaccaattggaaacaaccgaagacagtttcagagatccgcagttttctaggccttgcaggatattatcggagatttatagagaatttttccaagattgctaagcccatgacacgactgcttcagaaagatgtgaagtacaagtggtcagaagaatacgtcgccgtcgctcgggaaggacgtcatcgtggtcgccgtcgcgtcgccgtcctcgttcgccccttcgccgtcgccggagatcaccggagcagcgtcgccgtcgacaacccgaaggtttccgccgcttccttctcgtcgccgtcgtcgtctgttgttcgtccgccgccgttttggtcaccggtgtgttcgccgcgtcgtcctctacgtgctggtgccctccgtttgcgtcctagtgccgccgttcgccggcgagcgtgcgccgcccgagccgtccgctccgccgagccgccgccgctgtcggtgacgtcaccgctgacgtcatcggggtcgtccgcccgtggttcattgcggggcaccagactgagaagtggcggagataagcccacgggggtcgctggggagtccatgccttgtttataagggggtgattatgatccaggaagaggaagagttcttcaatgaggctgatggtgtggaggagtag

SEQ ID NO: 46799 - DNA, 136 bp, Oryza sativa
  Clone ID: PAT_MRT4530_49630C.1
tctgttacctttgcttgaactccgacgatggagaagctgccaccgaggagcatatgtccatggctcgcacgaaggcgtggagaagcacgaggttaacacaaattgatgatgacgagcataacacagaagaaaggag

SEQ ID NO: 46800 - DNA, 219 bp, Oryza sativa
  Clone ID: PAT_MRT4530_49631C.1
atggcgtgggggctctccgtatcggccgcggggcgagcgtccatattccacccggcgcgcaggggtgatggcgtgttgctccgtcggtcggtgacagcttcggcgtcggactttacaatggaccggtggtggctgctcggaaggaacatcgggccgactgccgagacgcagatgatgaggctgccagggagcaacttgggatccaaaggtcttgtttag

SEQ ID NO: 46801 - DNA, 255 bp, Oryza sativa
  Clone ID: PAT_MRT4530_49632C.1
ctcccttggcggcccaacggcaaccttgggtaaaatcccaggaagccacaattgttgcctaacctcttgggtgaaaggggtttttaattgaaggggcctttggacctggcctgtgtcccaaccaaaaccatgtgcccaaacaaaggcctttggaaacaatcttgggcccgggccttaaaaatgaaaaggaaagaccatggccggaatatcccctgagttgacccctccattttaccgtattcgaaccttaatatt

SEQ ID NO: 46802 - DNA, 414 bp, Oryza sativa
  Clone ID: PAT_MRT4530_49633C.1
tttatttcttgtacaagaagggctagtatctaccaaggggtataaatatgtatacccagggtcattgtaaactatatcacagatcaatacccctactctcggcgcatcgccaccctctttttcgaggtttttccttatcatagtggaacttggcacctgatgcggggctgcatcggttttcgatctccgacgaaggggtaagtcctatgttccgtcggccctcggctacattggtgttgttcaaacctgcatcgctttgacctcttggatcgctctagttcggttgatatttttgcctacctatttatcatatatcttagttaatctagtttagcatcttaatttgatcatatcggctaagattcgttttaggggttatgctggtatcggctaaattatattgctagattagat

SEQ ID NO: 46803 - DNA, 147 bp, Oryza sativa
  Clone ID: PAT_MRT4530_49634C.1
atggggatgaggatttttatacaggttcgagcccttgaattgtcagtcgacaacaaggtagccttcctcctcgaatccgcatccggcaagatcagagacagcgctatatctctcctgacggtggccataggcaccgtaggggactag

SEQ ID NO: 46804 - DNA, 396 bp, Oryza sativa
  Clone ID: PAT_MRT4530_49635C.1
ttaggagttaaggtgcgttgctgcgtgtccatatacttgggttttcactaatatttcgtcccctgctgaagcggaactgaagaagaagaaccaccgccgtggagacgtaggcgcagcgctcccgattccgccgccgccgtcgccgtagccgtcgccgccgctgccgcgccgcggtgtcgacgaaggagccctccgcttgcggccgcttgggtggtcggatctaacatctagggtatgtaccttgaatcctggatttccctgctccgatttcatcttcttggcgtcttcatctctgggacgaacccttgttttcagaggttgatgagatgccaggatccatggaggatcaaaagccgctgcaaaagatgtcgcacactcgtcgctactgaaggctat

SEQ ID NO: 46805 - DNA, 457 bp, Oryza sativa
  unsure (1)..(457): unsure at all n locations
  Clone ID: PAT_MRT4530_49636C.1
ggctactggatcgagtaggcggtggaggagatggagagggcgcggcgcgggaatcggcacccatcgtagagatgcgccccaccggcggcgagtgaagccggaaagcgggaggaggaggaggcgggacggtgacggttgcaaggtcgacggtctggtcgccgtcgacgaagacgatgggcagcacggccgtgggcggcgggggcggtggggggaggcacgtggacgcgcccgcgcagaccttcgcctgcgaggacgcaaggacgcaagcggccgtgactggcggcgccggtcgggagtagggtggcggcggcgtgcggggctacagggcgctagcgttgggcagcgcgaggaggggcgtcggcggcgcgcggggccccagggcgcaagcgaaggatgccgncgcccccatctctagtcttctacgccggcgcccccaactcgccaccgaggcagcctc

SEQ ID NO: 46806 - DNA, 1968 bp, Oryza sativa
  Clone ID: PAT_MRT4530_49637C.1
atggagtggcgagggccatggatgacgtcggcgatgacggcggcgggcggtttgtcatggagtaggggcaaggcggcagcacgtggcgtcggtggcgcaagggctgatggcggcggcggccagtcggtcggccacctcgcgagcgagcgcgcgcgcgacgcgggggtgcggccggatttcgaacagcggtggcgggaaatcggcgccggggagagggagttcgacgagggagagatccgtgaacaattctgggcaaggacgtgcaagaaaaactcacccgttatggaagcagcaaccgccaacattttccaccttagcctcaccttcttcttcatggtcctccttactctcggaacatctgccgccggcgttgcatcggacactctgagcaatggccgcaacctcactgacggcaacacgctcgtgtcggccggtggctccttcactctgggcttcttctcactcggcttgccaaacaggagatacctcgcgatatggttctccgagtccgcggacgccgtctgggtggccaaccgtgacagcccactgaacgacaccgccggcgtactggttaacaatggcgcgggcgggctcgtcctactcgacggctccggcagggccgcctggtcgtcgaacacgactggcaagtcttcatcagcgacggcggcgcagctgctggagtccggaaacctcgtcgtgcgcgagcgcgaccagctgaacaccggtgtcttcatctggcagtcgttcgatcacccgtcgaacacactgatcgccggcatgaggctcggcaacaaccggcagaccggcgacgcgtggttcctctcgtcgtggcgcgcgcacgacgacccggcgacgggagactgccgccgcgtgctggacacgagggggctcccggactgcgtcacgtggtgcggcggcgccaagaagtaccggacggggccatggaacgggcagtggttcagcggcgtcccggagatggcgtcgtacgaatccatcttctcgagccaggtggtggtcacgcccgacgagatcgcctacgtcttcaccgccgccgccgccgccggctcccccttctcccgcctcgtgctggacgaggccggcgtgaccgagcgcctcgtgtgggatcccagcagcaaggtgtggatcccgtacatgaaggcaccgcgcggcgtgtgcgacgactacgccaagtgcggcgcgttcgggctgtgcaacgaggacaccgcgtcgacgctcttctgcagctgcatggcggggttcagcccggtgtccccctcgcggtggtccatgagggatacctccggtgggtgccggaggaacgcgccgctggagtgcggcaacgggagcaccacggacgggttcgtgccggtgcgcggcgtgaagctccccgacacggacaacgccacggtggacacgggcgccacgcttgacgagtgcagggcgaggtgcttggccaactgttcctgcgtcgcctacgccgccgcggacatcagcggccgcggctgcgtcatgtggatcggcgacatggttgatgttcgttatgtggacaaagggcaggacttgcatgtgagattggcaaagtctgaactaggcaaacgtcatcagaataaggttgtccagaagagagggattctaggatacttgagtgcatcaaatgaacttggagatgaaaatttagagctcccgtttgttagttttggagaaattgctgctgccacaaacaatttttctgatgacaacatgctcggacaagggggcttcgggaaggtttacaagggaatgctagatgacggcaaagaagtcgcaattaaaaggcttagcaagggttctggccaaggagcagaagagttcagaaatgaagttgttctaattgccaaactgcagcatagaaacctcgttagacttcttggcatggaacttgtggaagaacgacagggcgatggatttgatggactcatccatttctaa

SEQ ID NO: 46807 - DNA, 2406 bp, Oryza sativa
  Clone ID: PAT_MRT4530_49638C.1
atggaagcagcaaccgccaacattttccaccttagcctcaccttcttcttcatggtcctccttactctcggaacatctgccgccggcgttgcatcggacactctgagcaatggccgcaacctcactgacggcaacacgctcgtgtcggccggtggctccttcactctgggcttcttctcactcggcttgccaagcaggagatacctcgcgatatggttctccgagtccgcggacgccgtctgggtggccaaccgtgacagcccactgaacgacaccgccggcgtactggttaacaatggcgcgggcgggctcgtcctactcgacggctccggcagggccgcctggtcgtcgaacacgactggcaagtcttcatcagcgacggcggcgcagctgctggagtccggaaacctcgtcgtgcgcgagcgcgaccagctgaacaccggtgtcttcatctggcagtcgttcgatcacccgtcgaacacactgatcgccgggatgaggctcggcaacaaccggcagaccggcgacgcgtggttcctctcgtcgtggcgcgcgcacgacgacccggcgacgggagactgccgccgcgtgctggacacgagggggctcccggactgcgtcacgtggtgcggcggcgccaagaagtaccggacggggccatggaacgggcagtggttcagcggcgtcccggagatggcgtcgtacgaatccatcttctcgagccaggtggtggtcacgcccgacgagatcgcctacgtcttcaccgccgccgccgccgccggctcccccttctcccgcctcgtgctggacgaggccggcgtgaccgagcgcctcgtgtgggatcccagcagcaaggtgtggatcccgtacatgaaggcaccgcgcggcgtgtgcgacgactacgccaagtgcggcgcgttcgggctgtgcaacgaggacaccgcgtcgacgctcttctgcagctgcatggcggggttcagccccgtgtccccctcgcggtggtccatgagggatacctccggtgggtgccggaggaacgcgccgctggagtgcggcaacgggagcaccacggacgggttcgtgacggtgcgcggcgtgaagctccccgacacggacaacgccacggtggacacgggcgccacgcttgacgagtgcagggcgaggtgcttggccaactgttcctgcgtcgcctacgccgccgcggacatcagcggccgcggctgcgtcatgtggatcggcgacatggttgatgttcgttatgtggacaaagggcaggacttgcatgtgagattggcaaagtctgaactagttaacaataagaagaggactgtggtaaaaattatgctcccacttacagcagcatgtttgcttctgctgatgagcatattccttgtatggttatacaagtgcagagtcctgtcaggcaaacgtcatcagaataaggttgtccagaagagagggattctaggatacttgagtgcatcaaatgaacttggagatgaaaatttagagctcccgtttgttagttttggagaaattgctgctgccacaaacaatttttctgacgacaacatgctcggacaagggggcttcgggaaggtttacaagggaatgctagatgacggcaaagaagtcgcaattaaaaggcttagcaagggttctggccaaggagcagaagagttcagaaatgaagctgttctaattgccaaactgcagcatagaaacctcgttagacttcttgatcatgcaaataaatatgttcttgattggccaacaaggttcaagataatcaaaggagtagctagaggacttctttatctccaccaagattcaaggttaactgtaattcatagagatctcaaaccaagcaatatcttattggatgttgatatgagtcctaagatatcagattttggtatggcaagaatctttggaggcaaccagcatgaagcaaatactaacagagttgttggaacatacggttacatgtctcctgaatatgcaatggatggcgccttttcagtcaaatccgacacatatagctttggtgttatactcttagagattgtaagttgcttgaagattagcttgcctcggctgacggacttccccaatttgttagcttatgcatggaacttgtggaagaacgacagggcgatggatttgatggactcatccatttctaagagttgctcaccaactgaagttttactatgtatccaaataggtctattgtgcgtgcaagataatccaaataatagaccactcatgtcttcggttgtgtccatgttggagaacgagaccacaacgctttcagctcctatacagcctgtgtattttgcacatagggcctttgaaggcagacaaacaggtgaaaatagcatcagcttattagagggacggtag

SEQ ID NO: 46808 - DNA, 274 bp, Oryza sativa
  Clone ID: PAT_MRT4530_49639C.1
atggagatccaatatgagcttaatttggatagggatccgaataggagtcctacaggccttggaggcccgaatgatggatcctatatattcgtgaggggtgtgaccggcggagggattgcatcaccgtgggaatacgacgaggagaacgcacgaggaggagaaggtcgagctagtgcgatcgactacttcctctacatcgacgcgcgctacttcgtgagaattccttcgacttcttaacgccttcttccgttgcgcagtgcgtcgagtggtaacg

SEQ ID NO: 46809 - DNA, 467 bp, Oryza sativa
  Clone ID: PAT_MRT4530_4963C.1
cccgggtcgaccccacggcgtccagcaagcgtgacaaacaatctgaacgcaagtgcacaacaagtgcaagatatcaaggtgcccactgggtgtacaggaaggtcaggccccactaccaaggaagctgaagacaaacacttccaaagccttccaagccacaaactggtttatggtggatccaagtgcggccttgcacatgttgctggtgaagatctggccaagtatggtgtagtcgtagttccaagaacttgaagatggaatgcttgatccttgatggaagcctggtttttgaaaagttctgttaggtcacatgctgcaggtctcctctgaggttctgcagtatcggatcctcggatccttttctttggcttgggatcatcgagccctcatacggacaattcccagttgcctgatatgggtttacggaaatattaaacgttgctatttgctcaaaaaaaaaaaaaaaa

SEQ ID NO: 46810 - DNA, 139 bp, Oryza sativa
  Clone ID: PAT_MRT4530_49640C.1
cctttcggtgagtgagtgagattctcagaaggagggatttttgtattgttttggcacgcacatatctgccacattatatcgttatccctaattaagctatctcctccatatagcaaactaccaaccgactccctcacac

SEQ ID NO: 46811 - DNA, 183 bp, Oryza sativa
  Clone ID: PAT_MRT4530_49641C.1
atggagccatatggagaaagccgtcgagatggtggactggatctggatctgccgctgcagctcggccgtgtccgtggactagatctgcatcggcgcggtctaggacaacgagccaatgccaacacccccactatcatcaagggggaggaggcccatggtcgaggggaaggatgctcttcttaa

SEQ ID NO: 46812 - DNA, 1512 bp, Oryza sativa
  Clone ID: PAT_MRT4530_49642C.1
atgaagcccttcaatatttccaccaattggtggtgggggagagagaaaacacctaggcatgcatcaacccagactggtgcagaaaaagtgacagaggtacttgaagggcatgtcatgaattgccttgtggcgtaccgtatggaaccggaggtcttcaaaagtactgcagaatttctaagaaggaagaacttggtccgtgacactaggggagttagagtggaggaaaagcttgctatgttcatgtatatgctatcccataatgcgagctaccaagatatgcaatatgaattcaagcatagtggggcgacaatccacctacatattagggcatttttcgatatagtccctactctcacccatagattcattaagccgcctcttgcaaaccaaactcattcaaagatcacatcaaatcctcgcttctacccatacttcaagaattgcttaggagcaattgatggtactcatgttcctatcactataaaccctgagatggcagctccatataggaatagaaagagcacactaagccaaaatgtgatgttagcatgtgattttgacttaaacttcacattcatttcttgtggctgggagggatctgccacggatgcccgggtgcttaggtctgctcaactaaatggttttcgcataccgatgggcaagttttaccttgttgatggtggatatgccaacacgccttcattcctcgcaccttaccgtggcgttcgataccatcttaaggagtttggtcgtgaaagggctattggagttttgaagaagcgcttcccgatcttaaaagtaggcacactacaccctattgaaaaccaagttaggataccagcagctgctgccgtatttcacaacctgattaggaggtacaatgggaatgagggatggttggatcttgatcatcagccacatgatccacaccatatatcacctgaagattttgttgatgttccagcgggaggacaaattcaagataaagaaaaggagcttaagagagactacaggtgcttgaaagatgcaagaacacaaagtggggcatcttgggacgaaaaactcgggatgattattgctgatgatcctgcagtttgggataatattattcattctttccctcgagctaagaagttccgcaacaaaccatttccaatctttgaagctttaggagaactatatgatggtcaaactgccgagggcctcttgaactttacatcccttcagccaacaaatacactagatcagtcaagaaacacagaagatgatattgttacacaagtaggtgctgatgatttgctgatggagaacaatcaagatgacctaaacaatgatgatccaatcacagcaagtgaacaatcaaaagttgaagtgtcaaatcagttaaatcaaagaagacaaactgtcagtacatcaaggaaacctcctgaggataaaagagagaagaacccaaaaagacataagcaaaatgggaatgtggctgatgcaatggagaaatacatagagctgtga

SEQ ID NO: 46813 - DNA, 193 bp, Oryza sativa
  Clone ID: PAT_MRT4530_49643C.1
acaagcagatccgaacagatttattgtattgacatacattcgataggaattaaggaacctactcatcggcgtgttacctactcgatatcagttggaaactcctgacttgactgaggagcacaggaaacttttagcctctaatggtctttggcaagaggagttgaaaaagatattacatgacactgatctagaa

SEQ ID NO: 46814 - DNA, 487 bp, Oryza sativa
  Clone ID: PAT_MRT4530_49644C.1
cggtcgcagccaaactgcgtccttaacgataccatcgtgggatacattcttgcctaggagaaaattaatatgctaaagattaaatgcacacttcgatgttcaaaacttgacacaaaactttcaactttgcaacgatatggcacgaggcttatacgaagaggctcatgcccagttcaccatcggactcctcctcgggctcttccttcttgtctccctccttggcagccgatgtagcgccagcaccactggcggcggctactggcgcagcaacagtgaacttgctggggtctttcaaatactccttgatcttatcatgatgtgggtacaagaactagatctccacagcaacaggaagcacatcgcttgtacccatgtgacgaacatgtgtgagggcaataggcaacagttggggacgaaaattgccaggcgaaactggaggcaatcatacgaaacaccaggaagcagactttttccatccagggcatcc

SEQ ID NO: 46815 - DNA, 286 bp, Oryza sativa
  Clone ID: PAT_MRT4530_49645C.1
gtggttttgtgaacttgggtttcctgttctttcttcaaccttacccttaaatgctcagtattgtccttttcatcatcataacacattattttgttcttatcactctcacggatgtaaacaagcatgtaagcatttgaatactttgcgaatttaaatggttcttttgttgaaactcggatttatctttgaggcattctttttttcacccccgttttgctcttcaagggcacttcatagtatctttcttttagttacacgctcatcatctaatttatactcattgatc

SEQ ID NO: 46816 - DNA, 306 bp, Oryza sativa
  Clone ID: PAT_MRT4530_49646C.1
atgtgggtgggcgccgaggagcaatcagctgcctccctgtgtaaagacaagcagtggaaaccacttttcaaaggtgtggagactgatgaactggagttgctgacaacaagactgaaggaatgctatgctggactgcgaaatatcagaactggggtggatgatcagttccattgccaaatcgaaacaaatatgttagcattagagttgaggactttgtttttggatgatcgattctacatggatgaatccatggtggatttgttgaggtggtcctccaggacagcagtagagaaaagtgatggctaa

SEQ ID NO: 46817 - DNA, 399 bp, Oryza sativa
  Clone ID: PAT_MRT4530_49647C.1
ccacgttcttcggccatcgcgggtggagcagggccgccgcggagggctgggggggagcgcgagtcccggggatccgagccatctgccggtgggcggcggcggcggcggcggagttggggttcgtcgtctaggtcttgggtcttcttcgtccctcgctgcgggtgggtagcgcagcgtcggggcagatccggctagccactgcgacgctgaattctggagatccccgcacatggagtcgcagcgagggcaatcttctgatcgtggatcagacgcatcaggaccaaaacagtctagtgtttcatcacatggtagacaaaggaattcatcatcttctatctgtaaagattttctccggaagtttgtggacaatgaactattgacatcaagcctagaggactg

SEQ ID NO: 46818 - DNA, 309 bp, Oryza sativa
  Clone ID: PAT_MRT4530_49648C.1
acgtccacgcgatctagttgtgataatacaaagcatgcacagcctatatggctacatcgattatctgatcacacacaaagtctgtgtacctccattagaaaatgcgatcacaaaattgatgaacaacattgaagatgttggcctatctatgatgagaaactatgctggctatatctgcgaatcactgcagcatgatgttgtctacatatgcgatacagcacgagagatagctgaatacagatgttgccttgcaagagttgaaaaggacaggtctgacgtgcttagatgatattgctggtagcacgatca

SEQ ID NO: 46819 - DNA, 446 bp, Oryza sativa
  Clone ID: PAT_MRT4530_49649C.1
tttttatcaccaatctgcttcaccaagaatggagttagggaggcagagccagtggctaggagttggagggaacggggatggtgcctcttcttggctgcttcagttcttttttcctctcggccacaagcaaatcagccaagactctgttttagatggcgccgaaggccacggtgaggcagggttcgacagagggatagccgtgacactgtacatgagggcaccagaggctgccattacgccttcgaggaggtgggggatgcttccatggtttttctcgcaccggtgggcgaggcagccgtgatatctctcctggatctcagtaagcaagcaagcacgttcccagtgctatcgaggaggcagtgacaatgaccctgatggtcttcagcgaggcatatatgaattcctttgacgcaggtggcgatgcagtcccgacgctaatcatgttg

SEQ ID NO: 46820 - DNA, 232 bp, Oryza sativa
  unsure (1)..(232): unsure at all n locations
  Clone ID: PAT_MRT4530_4964C.1
ttgtangttgccgaccggcagcagtccgaggagggggatgtataagtggagctggaggggcacgacgacaacgacgtcatggacgacgacgaggactggtaccagcgtcgtctgcggcgcgaggacttctacctgcctgactacgacgaggaggtatcccggggttagggctatagccactgagacgcggggaccgcggcgggcgaatgaagagctcattgagaaggacaat

SEQ ID NO: 46821 - DNA, 205 bp, Oryza sativa
  Clone ID: PAT_MRT4530_49650C.1
gcgaaaacaaaaaaaataaaaaaaaaaaaataaaaaaaacactaaaaactaataaaacacaaaaaaaaaaaaaaaaaatgtggcggccttttcttaatacgagccaactttacgtctcctggcatgctataccttacctcttttatctccacactccaatcaatttctttgaccatcgtttaccaacacattaattggaaaaacc

SEQ ID NO: 46822 - DNA, 267 bp, Oryza sativa
  Clone ID: PAT_MRT4530_49651C.1
atgccccaagccatcgccgaatttgctgcctgcctccagcgaccgagctccaccgcctgtggcaaccccaccaccttgagcctccagatccaccacccaggccctgagccaccacctgtccctctgcttgatctgggagaggggaggggattggaggtgctgccggaaccttctcaaggcctagctgtcgtcatggtagccgccgccggatccacctcctccaccgtcacctgcccttctccttcaccaccggggcgacggatctag

SEQ ID NO: 46823 - DNA, 131 bp, Oryza sativa
  Clone ID: PAT_MRT4530_49652C.1
cttttacttggagatgacaagtctgggcatgtgggtgggctttgactaaaaacaaggcctaaacaagttctcgatgctgtcaaactcccccacgcttaaagaatataaatggtactagactggatgataac

SEQ ID NO: 46824 - DNA, 201 bp, Oryza sativa
  Clone ID: PAT_MRT4530_49653C.1
atggcgacgacttctccgttggatctaacggcggcggcggcgacccgcggacggatccggtttgatttaagaatggaaattctggaatggtccagcgtgaatcctgaaacaacaccaaactcactgcgaacaagtgaagaatgcaacttccgtaatgcactatgtgggagtagctacacccggattcccaatgcctcttaa

SEQ ID NO: 46825 - DNA, 327 bp, Oryza sativa
  Clone ID: PAT_MRT4530_49654C.1
atggcggcgcggcgccggcctagaagaagacggtggcatggtggaggcgccgggtacatgaaggtcctcagcgaggtggaccagcagctagccgacggcggcggagccgagccgccggccggcgatgtggctgctggctgctgcctcccagcacttgaggacaaaactctgatggtgggcccaggccagccaacttgcacaagtggcaaggatgccaggtggcctgcccctcatctggcgatggcattgtggcactcccacgctggtggtggcgttgtggcgtcggccggtggtggtgatgaggaggacgaccggatctggctctag

SEQ ID NO: 46826 - DNA, 141 bp, Oryza sativa
  Clone ID: PAT_MRT4530_49655C.1
tttttgcgtttttcccctccgggtttatataaagctgggtttggtattatgcccacaaaggtcattaatctctttaaggaggggaacacccgggtggatttacacaggggagaagttttacacacaaacgacacttatttg

SEQ ID NO: 46827 - DNA, 1460 bp, Oryza sativa
  Clone ID: PAT_MRT4530_49656C.1
tttttttttttttttttttttttaacatctatatgtatgtgggcaaggctaaaaagtcttacattataaaacgaatggaatacatattatcggtcgccttttgcttgttcatttatctcctgtacgcatgcagtggcgctgttttggctctttggctctctctatctgatcacgtgcttgattctgacttcttgagttgccttttgcttgttcatttatctctagtacgcagtgacactgttttggctctccctatctgatcacgggcttgattctgacttcttgagttttccgttcactatctcggtaatatacccatccgatccaagcgcttgacattgaatgttcctcctgtgtctttgtctaaaaagactgaatacattcgaatgtttacagtaaggtaaagcactgaccaagaagtgcttagtacagagtagaaaaaaataaaacatagagaagggagaacatcagggcaaaacagatgttccgtccacaaaagagcatagttcatgtgaaacaaatgtctgtttgacatgtccaattattagccaagatttcatcaacacaacaaatgcacagcgagtgctttaagagtgagttcctcgtagcaattttttttgggtattctggttcaaaagccttatgcatgcccaaaagacatgatggcatctttggtaggctgcggcaagccccttggatttcatcaatcttcacgacgcagctcgccggtggcaggaggcatccatttcccggaattatagacactttggccgaccttccatccagggacatctttcataattatttcctcccacataagagactttgtccactctttgacaaatctttcatcttcttcagcttggagcactggcactaaagcggtgcgggcagcaattttctcctctttgagtgcacggcggaccttgttcccctggccaacctggtacatcccccaggcgaaggcgccgaaggtagtgaggaagatggcgatggcgctgggccccttggtggggatccggcgcgcgtagcgcacgggcgcgaagccgcccggcggcggcccgtcctgcagcaccggcatgtccttgacgctcgccatcccgggcttgtgccgcacccacgcctccgtcatcttcgcccccgattcggaaaccccaccgccggcgacgaggtcgactacctcccgcagatctggagcctccggcgagagatcgagcggttggagatcgcagttgccgctagggttagtggacggggcaaggcgagacgacgattccgcccccgattcggaaaccccaccgccggcgacgaggtcgactacctcccgcagatctggacctccggcgagagatcgagcggttggagatcgcagttgcgctagggttagtcctcgggcgaaagaaatgggggccaagtttttggggaatctcctcgacaccagcgagaagcggacgcgtgga

SEQ ID NO: 46828 - DNA, 333 bp, Oryza sativa
  Clone ID: PAT_MRT4530_49657C.1
aggcaactgaactttccagctaaagaaggcgaaaacaacgcgggcggaactcgggtttttttggttttttaaaactttagcaggctccctttttaaaacatcggggaactggtcggggcggtttttagcaatgactttttggaaaccagctttttaaagcttttgtccgtaagccctgacttcgggaaggtcataccccctttgtttaatggaagctgcgaacttttttgaaggtttcccggggcccttgcagtaatcactaattgggcccttccccccgggtttgggccccttgaaaaaacttttaaatagggggggttttttttgtttggg

SEQ ID NO: 46829 - DNA, 780 bp, Oryza sativa
  Clone ID: PAT_MRT4530_49658C.1
atggcaagcccactcttctcgctggtgtcgaggagattccccaaaaacttggcccccatttctttcgcatcgtcgtctcgccttgccccgtccactaaccctagcggcaactgcgatctccaaccgctcgatctctcgccggaggctccagatctgcgggaggtagtcgacctcgtcgccggcggtggggtttccgaatcgggggcgaagatgacggaggcgtgggtgcggcacaagcccgggatggcgagcgtcaaggacatgccggtgctgcaggacgggccgccgccgggcggcttcgcgcccgtgcgctacgcgcgccggatccccaccaaggggcccagcgccatcgccatcttcctcactaccttcggcgccttcgcctgggggatgtaccaggttggccaggggaacaaggtccgccgccgcgaattccgttggtatgggacacccgccaaaaatcatgccttccagagctgcttcttgttatctatattctacgctacttcgaatgaattgttgcagccggcgatttggtctgagaaaaaccttttacacgaagtacgtgcactcaaagaggagaaaattgctgcccgcaccgctttagtgccagtgctccaagctgaagaagatgaaagatttgtcaaagagtggacaaagtctcttatgtgggaggaaataattatgaaagatgtccctggatggaaggtcggccaaagtgtctataattccgggaaatggatgcctcctgccaccggcgagctgcgtcgtgaagattga

SEQ ID NO: 46830 - DNA, 620 bp, Oryza sativa
  Clone ID: PAT_MRT4530_49659C.1
cgtgcacacggaaatcatgaattacttcacttacaaggccacaagcacggtgctccaccagttgtatgaaatgaatccacctgcttatacttggctgtataactacgtcgtggttaacgatccaaaggagggcaaacatttcctcatcgcactcgcaaaggagaggcaagatttggcagagagagtgatgatcacacgactccacttgtacagcaaatggatcaagaaatgtgaccatgcaaaaatgtacgagaagatttcgaatgagaatctggagataatgcgtcagaggttaatggaaactgtagcgtggccaacggacgacacaaacaccagcgacacggcgaaatgaacgatcgattcatggcagcaaacttgaaactcatgttgagtatgacagatccactcaataatgtactttacgaatattccttgcaggttttgagttaatcatttgtgtatataagtagccctgcatgaatagaacaatcgatgtatattctcctagtaaaaagaacagttggtgtatattttcttctagttactgagattatgatgctgatccttgtgtactacacactatgcgaaatacataagctgtggtcgctttgttaattttc

SEQ ID NO: 46831 - DNA, 1735 bp, Oryza sativa
  Clone ID: PAT_MRT4530_4965C.1
tctagagtttctttgtgtgctgattttaagcatgctgttcacattgctaatgaagttgaggaacgtaaattgctatcttctttaaatactttgggcacctctccccgccttctccttctctctctccggcgccggccggcctccagccgcctctccctcctcgcccgagcgccgtccggtcgcgccgtcgccaccagcggcctcgcagccaccttctctcccccggtcagccctccgtttcgcggggaaaccaccggaggcgcatccccgccggcaaccggtggcattgccgctacccaccctccagccgcccctgccgcgccgctcaggtgcgggccggccgcgccgtctcctccctcggcgtcgccgcgtcgacctccaccccggcctgccctcggtttcgccggaacgccgtcgcccacgccggtctcgccctccacctcgccggagttccttcggcaaccccttccgccgtgcccgtgcatcggccgacgtcgccatctcctcctccggcatcgcgactcctccggtcggtcgttcgtcctcgccggctcgtcgtctcgcggcgccgcctccgtcgtcggattcgcagcggctgttccacgccgtcctcatctctgtgcagctactgctggctgccctcgtcgcctcctcgccggccccggtcgtcgtcatcgtcgtcctctcgtcgttcccggtcgtcgtggcgttcgtccctccgtcaagccattcgcgttcgtcgtccgcgttccgtcaagtgagccgctacagccccgtcatcgtctttgtcctcgtctccgcatcatcaagcctcgcgccggccgcgtctcacccatgtaccggtgtcggtagtcgtttgtgtgtgcgtgtggtggccgtgtttgtgtgcgcgctcggtagccgcgtggtttccaagtgtgcagccctcgtggtgtctagtggagtccgtttgtcggccacttgcctcggttgacacacggggtccgcttccgtcgacccgtggactgtctctgtgtactcggttttctttttatgtattgttattgcttctttataggcttgtagctttgcttgtgtgcttcgcgtagtcttcgtcgttccggaggttcccgaagcgtggtttgcggtcgtcgccgaaggttcggaaggccgttatctctctccccctctattcaaaacccccaaaatagttttaggctgggctcgaggtgcgtggttgggttttgttagtcgtacctcgggtactataaggattaagctcgggcctctgttgcaaagcactaccgtacttccacatgtctagtgggtaaggcttagtttgtggctcagtctggttataaacaaaagtacacggatggagatggacgaagtcgggggtcgatggacatctctaggacaaatgaaggctacacgagctgcggcccggtagtcgagatgtcatggcatagggccggtgtcctgctgataggggctcagtcctgcctacctgtcccaggggttccggccgtaggtggggttgggtcggtactcttgtctatggctaggatgggttggaaactatgtcacgtcttccgtccgtataccgtggtggtatgtggcacgtggttacacgtgaggaagatgtgtcttgtggcacttatgggtgtgtcttgttgagtacggtggttgtactcagtcttgctcaattttgccaaacccagaaaaggagccccttgatgatgaaggctttggtgtt

SEQ ID NO: 46832 - DNA, 324 bp, Oryza sativa
  Clone ID: PAT_MRT4530_49660C.1
catcggagaaggagggggcagcggaatcccgtagccctccacttatgaaggtgaagcgtcatttgacgcccccctccaattgtaaggggggccggccaatttcaagaggaagaagtaaagtcgccggagccctcggttcataagctagcatcataagtgaagaagctccacaaggagaatattgagtttagggaccgcaacgcggagctacgggtagaactcgctgagcttaggaataatgttgatacccttagtcgcggtttgtgcgctaaaatcaagcatccatttgtagaaatgggtaaggagaatagagattatgcaaaa

SEQ ID NO: 46833 - DNA, 231 bp, Oryza sativa
  Clone ID: PAT_MRT4530_49661C.1
gggcgcttgaaaatgaaaatcttaccaaattttggaactaatactcgaaggtggagggcacaataaacctatggggcaagttggaacagacatgtccgctctgaacaagtgtcataaaagccaaatcagttaaaaaggatctattttttgggggcgcaatttatatttttatggttacaaacttctttatgtccaatcatctggaaagaacggatgccatcctagaagaaa

SEQ ID NO: 46834 - DNA, 379 bp, Oryza sativa
  Clone ID: PAT_MRT4530_49662C.1
gatgtgatagcaagaattgtaacgctgtcaaaagagtccatacatcgggacggcatgccataccaaagcatcgttacaaccgactaacctatcatgcatagatgactatcacccgtagagcactagggcaacggggatacacactggcatggcatagttcgggagagacagagagagcgtacatatatgtgtcagctatgccagaaagcaaccagcgcgatgcacgaactatccacgatgggggacggccggacatgggctatgtactggaacaccggagcctcactgacctgctcacctggagagcgcatagcactgagctttctctgattgaagctctctacctcctggaccaactcatgctggggtctgctacatg

SEQ ID NO: 46835 - DNA, 470 bp, Oryza sativa
  Clone ID: PAT_MRT4530_49663C.1
gcgtaacagatacctcagtcattgtaggagagagtgatggcatcccaatttcctgatgtggtggcaggtctggaataagcaaattgcgtcaagaattaagagagctaacagaggaccttactttacatgctctgtaaggaaccattgattggagttacatagaaaattttaacatagtaaccaaaacaatggggagatgtggtgtgagattgggatatacttattttgtagcaaataacctaaatgcttatataacacatacaaaaaaaaagttttgaaaattcaacggagatacagatgtggagaaaaatatccaaaaaaaagtagcagaatagaggatcacatgcatgaaacaattggtacatgggaagacgggataaagtgaagcaaataattgaacaaaaagaaggatggcaaaaaaacaacattgtagactagtgcaaaaaagatcaataaaaactgaggagctg

SEQ ID NO: 46836 - DNA, 189 bp, Oryza sativa
  Clone ID: PAT_MRT4530_49664C.1
atgtgcggcgagagaggggaagagcgccgggaggatgcaggacatgcggaggttcccactgaggaggagcccaatgatgttgttgagcatcgcgctgtcagagaagctcccatgtctaccgtcgacgaagccatctttgccaccgtcgtggtcaccagtcggtcgagcggcgagagtgcaccagattga

SEQ ID NO: 46837 - DNA, 244 bp, Oryza sativa
  Clone ID: PAT_MRT4530_49665C.1
atgtctgcggacggtggagaacggcgagggcacacggtggttcgttatcaaagcgggcaacacgttaatagggcgttggcgcttatttacacccggtgggacccggcgaaagttttgggcatgttcaaaactttggccgggtggcaccggctgcaagtaagcggcaagaggacgatgttgaacggtatgaggacggtggctgctacaaacccggtgcacacgttcgagacccggtatgggcccg

SEQ ID NO: 46838 - DNA, 442 bp, Oryza sativa
  Clone ID: PAT_MRT4530_49666C.1
tttatatatgccaaaccaatcccaggaaccttcgtctgcaacatcggtgacatgctgaaggtttggtcaaacggaatatatcagccaacacttcatcgagttgttaacaactcccctcgctaccgtgtatctgttgcattcttctatgagtcaaacttcgatgctgccgtagagcctgttgagttctgccgggagagaacaggtggtgttgccaagtatgaaaaggttgtgtacggagaacacttggttcagaaagtcttgacaaacttcgtcatgtaaaatttgtggaaaagaacatgcattgtactccaatgtctgatcgcaacattcgtcactaaaataaaatcatttgtaaatttgtcatagcacagtagaacagtcatattgaagaatggaatgcatccttaattgaaatcacaagcgatgtgaataatcttttcgt

SEQ ID NO: 46839 - DNA, 183 bp, Oryza sativa
  Clone ID: PAT_MRT4530_49667C.1
atggtgaatgcgagcaacgagctcttgaggccattttacatgtggaaatactggctattggatgtggatctgacgacctccaccaacatgctaggctgcttggagctgagctctgatgagtcagcaaacctggggcaccttggacaagagctcagcgccgtcgaggctggcgcggagtcaaag

SEQ ID NO: 46840 - DNA, 710 bp, Oryza sativa
  unsure (1)..(710): unsure at all n locations
  Clone ID: PAT_MRT4530_49668C.1
ccacgcgtccggcaagtaggaagaaggatgaaagcaaagatagtgatttcaaggatgctgctgaggtttgcctaccattgatacacgctgccttggaaggcgttgagaaaggaaccttcctcagaggctgcttactgaacattggggttccaagctcaccaactacaaataagggtttcaagctgactaagcaaagcatatatcgtcctgcccaaagttgggaaggtgtgtccacaagcagacctacacctgctactcacttcatgggcatgcaccaaagccttggtattcagctcgcacaacttgggaaggatgcatctgcagcaggggctgcacgcagaattaatgctcagcggaagattgtcgaggttgagtctgttgcatctacagggaaagcagaggctcgagaagtagtgaagaagcttttccgtgctgagttcactgaaaagcagcatgaatgcttagacgaggatatcgatttgagagctttggagaatggatttatatctgtcactcctctgaatatacacggaaatgtggctcctgaaactggagcacctgcttcagattggctctcggtagctgtgggtctagacaaagcaaaggaagattctgtagttacagcagaagaacaagatgctccagctgtagctgaagaaaaggaagctccttcagcaacctanaactcgcaggacatgtatacattccct

SEQ ID NO: 46841 - DNA, 2344 bp, Oryza sativa
  unsure (1)..(2344): unsure at all n locations
  Clone ID: PAT_MRT4530_49669C.1
ccacttgccagttatgatgcgacattgtgtgcatataacaacgaaaatgcccctatttaattacacgcagtagagaaaagagggattngaaacagaatattcgagagataagcacagtgttttcccagattaccatcgtagttaacaaggacgaggaaggaggcaagaaatgtccaaatagagcgtaatatggagaatgcgccacccccacacatattgctaaatatcgataatttataagaaaatcattgtggtcgccatatttacaataataatattatgccgtaaagataaacaccattcatgactttttcacgtgaataaacaagcgggcagactggcaataatcatttcctcattgacaacttatccgaccacaggaggccgggaaatattagtagctttcctcaacaagtacatgtgccccccacacctggctggagtaaggggatacactataaattgctaggaggccgcttttttttttttttttttggtactttgtcggccatctcccagatggggaaaaaaatcaatattcatccatccaatgctgaatacaacaccttactggaacaaaccacactaaaaaaaatagtggtggtggcaggaggcaagtatttcatcaagtagatgcattgccctacgtggttacatccaaactgtagggtttccagcactaaatcatttcacatgataaaaaaaaaactggcaatcatcagagaacatgaacaaaaaataaagattgcagtgggcaaatatgaactgcaaaagactaacaagcaaatcaaaccgattaaccgataaacaaaggtgagaaagaactacgacagctagggaatgtatacatgtcttgcgagttttaggttgctgaaggagcttccttttcctcagctacagctggagcatcttgttcttctgctgtaactacagaatcttcctttgctttgtctagacccacagctaccgagagccaatctgaagcaggtgctccagtttcaggagccacatttccgtgtatattcagaggagtgacagatataaatccattctccaaagctctcaaatcgatatcctcgtctaagcattcatgctgcttttcagtgaactcagcacggaaaagcttcttcactacttctcgagcctctgctttccctgtagatgcaacagactcaacctcgacaatcttccgctgagcattaattctgcgtgcagcccctgctgcagatgcatccttcccaagttgtgcgagctgaataccaaggctttggtgcatgcccatgaagtgagtagcaggtgtaggtctgcttgtggacacaccttcccaactttgggcaggacgatatatgctttgcttagtcagcttgaaaccctgataaataaggctaatggatatttttgcatttgtgggcaagccagtaaggtaactagtaccaggacgactaagacagtaagcattcttatttgtagttggtgagcttggaaccccaatgttcagtaagcagcctctgaggaaggttcctttctcaacgccttccaaggcagcgtgtatcaatggtaggcaaacctcagcagcatccttgaaatcactatctttgctttcatccttcttccaattcaatgatattgcaattgaaggaacatcatacagtaaggcctcccttgcagcagcaatggcagaagaatgaaacatctcatatccacagttcgcccctgcattgatcccactgatcaccaaagcaggcgccgaccaagagaacagcctcccagataatgccaaagagacgcaatccaccggtgtccctgatatctcgaaagctttcgcccctttgaaatccaccgatgttgctgtaatggtctcgcggatggtaatggaatagccgcaagcaggcttgtccgattcgggcgcgcatacgtggacgtcgcatcggccgccggcgacgagggagtcgacgagggccgcgagacccggcgcccggatcccgccggcgcaggtcaggagtacggccggcttcgcgggaccttcatcggccacgggagcagcgccggaggactccgccgcctccggtgccggggcctcggcgccggcctcctccgcggccggcggcggcggccggcgcgccgcgaggacggactgcaggttggacacgagcgcggacgggagcggattgggcctcggcgcgtcgtcgccggagctcgcggccatcgggcttcccttcgcttcgcctcgccggagaggtgtttgggcgtggaggagagagagagagagagagagagatgtacggacgaatgaaggaagggaagagagagaggaggggttggaacgcgaggggggcctcgtgcg

SEQ ID NO: 46842 - DNA, 540 bp, Oryza sativa
  Clone ID: PAT_MRT4530_4966C.1
atggaattgagagtttttgctccatcgatcagcgcggcgactcgattggaagccggtgggcggcggcgacatccaccggccgcggagaagacgattggcctccgccgccgctatctttcatttgctcctcagtcttcagctgcaacacgctcttcctctgctgtccggatgcctcaactccactcttcaaggtttcaaggtttgaggaattcaagcaactcatcagattccaaccattctcaggcaggaaccaatgtactgatccattctggctgtgctttctgtgatccatacggcattttgcaacgaattcagtattcagcttacagccaagacatgtgcacatgcattacagtgggctcaaaacagcaaacccaacgtttcagtacacagttgctgactactgacaccaattgctgctggttccaagcttcagagttcagagagaccagatactttgctttcagatcacaagttcacaacatgttgagaaaggcattgatcaatgggataaattgttcagcaatccatccagcatga

SEQ ID NO: 46843 - DNA, 711 bp, Oryza sativa
  Clone ID: PAT_MRT4530_49670C.1
atgagggtggcggcggcggccggatttggggaaccggctcacctccgcctccgcccccagccacgcgagctcgctccgcccacctccgccattggccgccagacgccaccgccgccccacacgcgctacttcggcgtcgccccgccgccaggtgccactaccgaccgtccgacccaccgccctagcgccagcaccgacccgcagccccaccatccccgccgcccaagtgccaccactcagccgccgccgagcgccaccaccgacgcccccgccgccacagttcaccaccacccggccggcactgtgcggcaccacctccagccgccccagccatcagcgccattagagaacgggggcgtcgacctggggtggcggcgcacagtgctagcggcgctgctcgacggcggggtggtggggcgacgcacccgggcggcggccgctcgtcggcgcggtggtggggcggagccgctcggcggcgcagtggtagttgctagtgtctggtggcgctcggcgtcgctggtgtctggtatcgatccagaaccagagagatatttctctttttatctgacaggcatgggaggaggcggggcggcggaaggcggggatgaggcggggcagtggaaggcggaggaggaggaggcgcggcggcggaatgcgggggaggacgcgcggcggcagaaggtggggaaggaggaggcgcaggctaattag

SEQ ID NO: 46844 - DNA, 891 bp, Oryza sativa
  Clone ID: PAT_MRT4530_49671C.1
atgtcctcctccaggcggccgcccgcgcgcgccgccgccacggaggcggcagccgacgccgcgctccccctccacccgtcctcgccccgctccaagaagcgctcctcctcctcccgccgcgccgccgccggcgaccgccgccccgcagcgcgggcgccgaaccctagcctcagcccgcgcggcggcggcggcgcgccgtcgcgcaagagcgagcggaggcgcaggccgcggtccctcgcgatggccgtccacgggcacgcctccacgtcgggcggccctggccttgtctggaacgacgccgacgaggtggcgctgctcacggccgcggtcgccttccgcgcgcgcaacgggttcgcgccccgcctcccggacatgggcgcgctgttcgagtccctcaggggctccatctcctcccacatcgaccaggccaaggtgtactacaagctgaagcggaacaagagcaagttcctgcacgccccaccggaggccaccaccaccaccccgcacgatcgccgggtgcgcgcgctctccgcggagctctggggcagcgagctcgcgccgcccgctgtagagggcgacgcggatgcagccgaggcggccgacgagagggacgccgaagagggatacatcggtggcaatctgcatgtttcggtgaggcttccggtggtgtcggaggtgcttggtgattactggaggaagaatgggcgtgtgctgtcaggtgtctcgcttgagagggggttggctctggttgggccggaggagggtaggatggctgaggcaaagtggaagcggcagcttgaagtggagacgcagacgcaggggcgccggcacgatttggcgaaggaggtctgcgccatgcttatcgatgctgtcaggggcctggggccttaa

SEQ ID NO: 46845 - DNA, 128 bp, Oryza sativa
  Clone ID: PAT_MRT4530_49672C.1
tttttggggttttttaactttgcgcggctcattcaaccataggaaaaacctgatcttagttgtccttcacgagactcgcacggaaagaaactggtgggtcacacacaccggccagtagttaagtatta

SEQ ID NO: 46846 - DNA, 146 bp, Oryza sativa
  Clone ID: PAT_MRT4530_49673C.1
accacagcgctcgatccacccccaacgcaacgctactcgtcgcatggtcttgttctccagccaagccgacctcacccgtcctcctcgcggtgagcccatggcggtgccattaggccgccgcccgagcgatgaccgcaccagaggga

SEQ ID NO: 46847 - DNA, 329 bp, Oryza sativa
  Clone ID: PAT_MRT4530_49674C.1
attataactttatatagtgtgaccgttgtagaaaaggtgcctcatttcaattatagcagacaaagtagaaaaaaggaaagtcacgggtggggggggggggtcctataatcagatcatttgagtgacctttaacttattctggcagcaccactggttctcttgaggcagcatatactcaggccactgggaagcctgtctctctttctgagcagcagctggttgattgtgctactgcatacaataatttcggatgcagtggaggcctaccatctcaggcctttgagtacatcaaatacaatggtggccttgacactgaagaggcttaccct

SEQ ID NO: 46848 - DNA, 353 bp, Oryza sativa
  Clone ID: PAT_MRT4530_49675C.1
acgcggacgcgtgggaagcccaagtcgcgtcgcaccgaagcagagtagagaaggagaggagcggagcgccatcagccgtccgatcgagtgatccgatggctctcgctctctccacctttgctgctgctgccgctgcccgccgggggccggcccttcccgccagggtgaccaccaccagggggtacccccggttcggcggcttctccgccaataagccggccgccgccgccgttgaagggaaaggcccctccgggataacccaagccaaaggccgggccgtctcctccgccggaaaggaagggtcgtgggtgccccaccccgtgacgggccacttccggccctttaactttggc

SEQ ID NO: 46849 - DNA, 909 bp, Oryza sativa
  unsure (1)..(909): unsure at all n locations
  Clone ID: PAT_MRT4530_49676C.1
ttttttttttttttttttaatacttcaaatgtgtatccgtatattcgatatgacaatcaaacctaaaaattttcccctgttgacaacagtatcaagaagaggcaccaacgggacaaaaaatggtcccttcggcgtggcaacgacgccgtccagcttggagtagagcgccgcggccattctcagcgcctccagcttctttgaagggaagccctcgaacctcgccagctcgcccatgtccatggattggaacgcgccgacggcgtctttcagctccaggatcgccgccgggtgggttccgacgtcctcctcgatttgccggaagtaggccgatctttccgttccaatattgtcgtagcaagcgaagattaccacaagaatctcgaggtcatgatcaatgtcaatggtgtttgcggtgcgtgcacgtacctcttggtcatctcggccgatgcgtcggccatgccatgacctgcaccaccgcccttggcgccggccgccggcgacgcccgggctttcttgtcgcgcgagctcttgccgccatgcaggtgagaagcgccgccttctactagatcggtcacgcagatgccggtacatgctccccatccatgacctgcaccaccgcccttggcgccggccgccgcgacgcccgggctttcttgtcgcgcgagctcttgccgccatgcaggtnagaagcgccgccttctactagatcggtcacgcagatgccggtacatgctccccatctctgccgatcgcttcagcttcgtcgcggatttcttntccgcagcgctaacctcagaatnaaattacagctttggtttccttctgatctgctgtacatacagaggaagtattgtggtatgcagataagcctgataaacatttcgggtatgcgatcttcagcgcttcttg

SEQ ID NO: 46850 - DNA, 4101 bp, Oryza sativa
  Clone ID: PAT_MRT4530_49677C.1
atggcgtctccctcggggaaccctaaccccacccccaaccagcccttcgagctcaaccgcctcttcaagcagcatccccccgcctccgcctccgcctccgccgccccaaaccctaaccaccaccccgcccccgccggcatcttccctggcgccgccgcccccgccccccaccacggcgtcgtcgtcccgccgccgatgacgtccggtggcgggccctactcgtacccgccggccaccccgcctttccaccgggggccttacctccctccctaccccaacgacccccacctcgccttcgccgggaaccctaacccccccgccgccgccgctgctcccaacccggcgggcgccaggctcatgcagctgctcgggaacacggcgcccacgcacctcgagtcggcggtgtccatgccgatgccgtcggagttctccgccgccgcggctgtggcgccgcccgcgccgctgcccgcgatgccgtccgcgccgcccgcgaggatgccgagcagcagcagcagcaagatgccgagggggaggctcctggggccaggggaccgggccgtgcacgacgtggactcgcggctgccaggcgaggcgcagccgcctcagctggaggtgacgcccatcaccaagtacacgtcggacccggggctggtgctcggcaggcagatcgccgtgaaccggacctacatcgtgtatggcctcaagctcggcaacatccgcgtgctcaacatcaacaccgcgcttcgctcgctcctccgcgggcacacacagagggttacggacatggctttctttgcggaagatgtccatcggttagcaagtgcaagtgtagatgggcggatctatgtatggaagattgacgagggacctgatgagcagaataaaccacaaatcacaggaaagattgaaattgccatacagattgtaggagatgctgaaacttaccatccaagaatatgttggcactcccataagcaagagattctgtttgttggagttgctaactgcgtcttaaaaatagacacaacaaaagtaggaagaggaatggacttcagtagagaagaacctcttaaatgcccactcgacaagctggtcgatggcgttcacttggttggtaaacatgatgcagatattacagatttgtccctatctcaatggatgactactcgtcttgcttccgcatcaaaagatggcatggtaaagatctgggatgatcgcaaatctgtgcctctgtctgttctgaaaccacatgatggtcaagctgtttactctgtttctttccttacggcacctgagcatccccagcatataaatctcatcacagcaggccctctcaatcgagaagtaaaaatttgggcttccactaatgatgaaggttggttgttgccaagtgactctgagacatggagatgcactcaaacactggagctcgtgagttctctggaacataggtttgaggaagcatttttcaaccaagtagcagtgttgccacaagctagccttattttgcttgcaaatgccaaaaagaatgctatttatgctgtgcatgttgaatatggcccagatcctgcttctactagattggactatatagcggattttacagttgcaatgcctattctaagtctgacaggaacacacgaaagccaactggatactgaacagatagttcaagtgtattgtgtccagacaatggctatccagcagtatggattggaattatctctttgtttgcctcctacagctgataatcctgggtttggtagagatccagctatttctcatgtgtatgagagacctccagcagaagtaactgtggtggagtcatccaaggaaactagtctgattgattcctctgttgttggtccaactaaaccagcaagcaataatcaggccctaggtaatacatttgaaacttcacatccaaatgcttccattaattatggcactgttaagtttgtcatcaatatctcacctggtctatttgcttatgcagaagcgaatgtcccttcgcaagttcaatccacaactcctccatcaagcattgaccttggatatttagaagaaggtgccttgagaagaggtccttcaagaggtccatctcttggtgatcgtgatatagacccgtcatctcttgattattcaagtaagaaaaggatggattctgatggtgcaagtgggcaaggttcatttggtaggaaggatagtttcggaaaggaagagccaagaggcagccagggtgatggtacaaaaacctcagatcctcgtcctatgtttaaggtgggaggaaatgctacgcacttgataactccatctgaaattatttcaggtgtcctttcgtctccagaaacaattgctactggcagttctcaaaatgtagaagtggatgctaaacatgtggatgggagaaaatcagagcgaagtgttgaacttgaagctgtcaaggagacacaaattgttcatgagaaaagggagagacctcccaagactgctgaacaaactgtaaacacaatcagtgaacgcttggtaacaactgacaaatacagtgtggaagattcacaatctcggagtgctgatggatcagtatctacacttttgaaacatccttctggtgctggggatgaaaacactgtaagtgaagctccagagaaaactagtgatggttatgcttctaggaacttgcagttaaccttggctaccaaggaggagaaagttcttcatcctcaagtttctaggcagttatctccttctacaagcacttacaactctgctgattcctctcatgaacctccaagcaacgtaaaccctcctattgataacgttccacaagttggtattcaagaaacactacaacagctaatggccatgcatagtgacctgcaaaagcagctgagcacaattgtatctgctcctattgcaaaggaaggcaaaaggatcgagacatctttaggtcgtaacatggaaaagtccattaaggcgaacattgatgccatgtgggcccgtttccaggaggaaaatgcaaagcatgaaaaggctgaaagagagcgtatgcagcatatcactactctcatcacaactgctgtaaacaaggatattcctgttatgctggagaagtccctaaagaaagaaatatcttcagttggacctgctgttgcacggacaacagctcctatcattgagaaatcactatcttctgctgtttctgattcactccagaaagttcttggtgacaaggttgtgaatcaactggacaaatccctaagtacaaaacttgaagctacagtagctaggcagatccaaacgcagtttcatacgtctgccaagcaggcccttcaggatgctttgcgctctagctttgagtcaacaatcattccagcatttgaacaatcttgcaagacaatgtttgagcaagtagatggtgcattccagaaaggcatgtctgagcatggtgctgctatccgtcagcaggttgcaacagcacatactccactagcacaaactctcagggaaacaatcgcttcagcatcatcgataaaccagggtcttgcatcagagttgcttgatggacagcgtaagcttttggcacttgtttcatcggggggctccttatcgcataatacaagtgttctgcagcctagtaatggaccagtggctagtctccctgaggtcgatgctccactggatcctgttaaggagctaagcagactgatatctgagcgcaaatttgatgaagcatttacaatggctcttcaaagaagtgatgtctccatagtgtcttggctgtgctctcaggtcgatctgcacgagttatgcagaatgaaccccattcctctcaaccaaggggtcctgttggcccttttccagcaactagcatgtgacatcgtcaatgacacgcccagaaagcttgagtggatgacggctgttgctgttgcaatcagtccaacagatcctatgatcgctgtgcatgtgaggccgatattcgagcaggtctatggcgttttgaaccaccaacggtcactgccagcaagcagttcctcggaagcgaccaacatccgtttgatcatgcacgtaatcaactcggtgctgctgacctacaagtga

SEQ ID NO: 46851 - DNA, 661 bp, Oryza sativa
  unsure (1)..(661): unsure at all n locations
  Clone ID: PAT_MRT4530_49678C.1
gggnnaaaaaggggggggnaaaaaanncncaacccccggcggggaatnnntttgggggggggggccaaaaaggntttttttggaaaaaaaaaaaanggggggggggggtctncccccnnttnnnngngggggggggnaaannnnnnntnnnncncnnacccccanaaaaggggggggggggnttttttttntaaggggggngncnccccccccccccccccccccccggggggaaaaaaaannggggggggggccnccccngntttaaaatnaaaaatatccggggggncccngggntttttggaaantttttnggggggggttcnccncccccaaantttnggggggaaaaaanaaagnggaagttgtgaaanttcaagcattcaaanagggggggggtgnnaagnattcttggattctttcagaggaaaccaatgccagcatttgctgccctggtttnactctttggnacttataagggtataggtggcgatattttcaatcagagatgacatctgaaatcatttatggttctcgttcaagctgtcagtcccctcccattgttccntctgtaagagaactcgtttcatttgtaacacaattactgttatatataattttgcaagtagcaagtttcatatnnnnnnnnnnnnannnnaaa

SEQ ID NO: 46852 - DNA, 355 bp, Oryza sativa
  Clone ID: PAT_MRT4530_49679C.1
atggggaaccccgtttattaaaaattaaaggggtttttaaaccggttccgtaaatttcttaaggggagaaataccgttgccaaattggggtacagtcctcgaaattaccaagatttttcccgttttattaatcgttgggattaaaagcatgaaccacccattttccaggggggcacggagtacccgtgttgtttgcgcccgtgtggactcgaccagatttttttggaaaaattaccttattaattaattggggggctctttgggggcgccgattttggttattggttggcttaaagttcccccgcggaggtggtcgataggcccccacaaccctgggaaggggccggtcaagtgg

SEQ ID NO: 46853 - DNA, 4977 bp, Oryza sativa
  Clone ID: PAT_MRT4530_4967C.1
tcatgtactctgatgtcgtagctcgccggggagcatagcctcagagccgtacacgaggaagaagggtgtttccttgttagacgttgtcggtgtggtgcgtatggcccatagtactgatgggatttcttcaacccattttttgtcgtgtgacatgagtctgtcgtagacgtgggtttttatcccttgtagtactatgccgtttgccctctcgacttgtctgttgctttgagggtgagagaccgaggcgaagcatattttgacccccagcccgatgcagtaatcctggaaatcggcgctgatgaactgggagccgttgtcagttatgatgcggtgcggtagtccgtatctgcaaaatatccctttgatgaatttgatggcgttgtcggccttgatttcccccgtgggtactgcttcgatccatttggtgaacttgtcgatcgccacgaataggaatctgtagccgccctgccctcgtgggaatggcccaagtatatctagcccccagcacgagaacgaccaagttagagggatagtctggagcgcttgcgcgggtagctttgtgtgtttactgtggaattgacaggcttcgcatcgctggaccatgtcgcatgcatctttaagagcggttggccagaaaaagccttgtcgaaaagctttcccaaccaatgtccgaccggcggcgtgtgacccacatatgccttcatgtataccgaggaggaggtgtctgccgtcgtcggacgagacgcatttgagaagtaccccgtttggcgctttcttgtatagatcgttgccgaccatacagtagatctttgctttacgggttattttctcggcctctgtatcgtcctcgggcaactcctcgatgttgatgaatttgattagtgggatgcgccagtcgtctgtggtctcgatgtcgggggtgtccgggctaacttcgccgctaacctctttcactgatggcttcgtcaggatgtcgagaaaagtgccaggctcgagcgattctcgtctgaacgcacgttgtgctaggtcgtctggctcaatgttgtccttgcggtagacgtgtcggacctcgatcgcatcgaaccttttctctagcttcctgacttctgcaagatacttggataactcggggttagagcatttataatctttgtgcacctggttcgcgactagctcggagtcccctttgacgattagtcgcttgactccaagtgcagctgcagctcttatcccagcgagtagtccttcgtattctgctgtgttattggtcgccctgaagttgaggtggattgcatgcttgaattgatcttcagaaggagacgtcaagataaatcctgcccctgctccttggctgttgagtgcgccatcgaacgccattgtccatgtttcgttatcgacttggttgtctaacttgttatccggcatagtccaattggcaacgaaatcggcgagtatctgggacttgatggctgttcgtggcacaaagtggacatcaaactggctcagctcgactacccatttcgcaatgcggccgacaacatctttgtttctcacaactttgccaagagggaaaaaggagacaactgtgactctgtgggcttgaaagtagtggcgtagcttccttgatgtcatgatgaccgtgtaaagcagcttttggatctgtgggtatcttgtctttgcgtcgtggagagcttcgctaacgtaatagactggtcgttgtactttctctctctcgacaacaatgacggtgttgagtcttgtgggcgacttcatgttctcgattgccttgatcttcttggggtttgcttctattcctctgccagaaacgaggaatccgagtagcttgcccgacggtactccgaacgtgcacttctctggattgagcatgaggcgatatcgtcggaggttgtcgaacgtttgccgcagattggcaatcaatgagtcgcatgtcttggttttgacaacgatgtcgtcgacgtatgcctcgacattgttgccaagctggtcgctaagtgcgccctggaccgtacgctggaaggtattccctacggttatcagtccgaacggcatcttaacgtagcaaaataccccaaacggcatgatgaatgctgtcttctcttcgtcctcttttgccatgttgatttggtggtagctagagtaagcgtcgaggaagctcaacaactcgcaaccggttgttgaatccaccagttgatctattcgagggagagggaagtgatccttggggcatgccttattgaggtcggtgaagtcaacacacattctccattttccattggccttccgcaccatgactggattggctagccactctggatgaagtacttctctgataaagccaactttgagaagtttgtcgagctcttctcgtatggcttgttttcggtctggtgcaaatctccgcagtctttgctttactggcttggcatcgggttgcaccatgagtttgtgctcaatcacctccctggggacccccggcatgtcggacggtttcttgggtggcgtagtcgtggcgagtgggctgggcgtttgctcgaccatgttgaggctccgcttgtcgcactgcaccgctagctttgcgttcccttgaatagtgattgttccattcagtcccggcatcttgagcacttgatacgcgtagtgagatgcggccatgaacttcgcaagtgcagttctcccgatgatggcattgtaaggttgtggaagcgccaaagatgtgtgaaacgtggaggtcggagtctggatacgctggatccgattcgtgaggaacctcctcctcgttcttctcgaccacgcgtactcgcttgctttttcaaatgcgatgtgcttctcgagcgaatttttgaaaacaaggcaatcttccagggaatgtctgtccgtcttgtgtatggggcaccatgctttctttgtgtcgctactttgtgggtctgggcgcttgggagggttcacatattctgctgcgagaacttccacttgagctttccttttcccatttttgcgatttttctttttgcttgactcaaatccgtccgtggctggtttcttctctcccccggtcttcggcttatcgttcttgcgtcttagcgcatcatctgcgtgggcgcatcgctcaacaatctcgaacaatctccgagtggttgtgatgcgtcttgtcgccaactcctgtgtagtgtagcgatctctgacaccggatttgaaggcgcgaattacagaagcatcggtgatttcggggattgtatttctgcactcattgaagcgccgaagatattccctcaatgattcacccgagttctgagtcaacgcgtgtaggtcgtcttctatcgcgtggcgcttgtatgttccttggaaattggcgacgaactgttgccacaggtctgcccacgaagagattgagtagggaggaagatgcatcagccatgaacgtgcagaacctttcaacgcagttggtaaataattcgccaacgcgttgtcgtctgctccggcagcgtagagtactgtggagtagacttgaaggaactcctctgggtcggtgctcccatcatacttttctattactctaggtcggaatctctcaggccatcggacatcacgtagggaacgaccgaaagccctacacccagcgttgggggcggtgggttgtcggcggttgtgtgtccttcgtggatgtctgtctgacgatgaggaggacgaggatgatgacgatgacgacaggtcgcttgcttccagcgtacgattacgaggatgtcggcctggatctcgggaatcctgtcgtcgtctcccactattgtctcggcgccgatctccgtcatcatcgtcgttatggcgacggcctcgacctgtattgtctcgcacccgtcgttcgcgatcgttgtgatcgtggtggttgtcctggtctcggtcctcgtttgagcggtctctttgatttccgttatcatggcgccgtgaagagacatgacgccgagaacgattcacattgtctcgtgtgcgtcgtgcctctcggcggccgttgatgtgatctcggagatcgccggtgccgcgaggtggaggggtagctcgttggggtgattccctccgttccaggtcttcaccattgacatcgtcagttggtggctgctccgggtgtgctgcgatagcggcttcttcgaacgtgttgctgaggttggtcactgattcccgtagtcgttctatcaaacgctcgaggtcatcgttcagaatgggatcgtatggagtttccctcagtatagcttgaatggcccttatggtgctgggctcccacgacacactcgttttcgatgacccatagtcttcgagaaggtgtaagactgatggttcgtgaggatcgatatcgattaccccaacaaatcgatctgaaattgaagtcgctccttgttccttgtcgttatccctgatggggacgtatgacttaggagacggatctttcatggcgccaagaaagaccttgcagcttgagaggccgtgattctttgtcttgtgaataggacaatagacatcacgagttggagaaacacgctgaattccacgctctttgcaggcgtgaatttcagcgcggacgttgaggaaaacccagcaggcttgcaaagtgtgttttctggttttgtggatagaacaccaggaccttgtggcttcggaagtcatctttgtcggctcgcggttcatgtcggaagaacaaggtttggccgcatcagaatccttctcgagctcggatgtcgtcgatgctctgttctccgtctcagcgggaggatttttcgacatgaagtcgtcttggtttgtagccactacgttctcgtttccggtcattgggggaccggttgagatcagcattgtggtgtaaaccgggaagacgatttcgccgacttgagtccacaccagcatcgttgaagcagggtgtacttggcagaggttggtgttgacgccgttgtcgacgaagctggatgacat

SEQ ID NO: 46854 - DNA, 262 bp, Oryza sativa
  Clone ID: PAT_MRT4530_49680C.1
ctggattaaagaaagtctccgtgacatatggaagtgatggtgaagaggagccaaggaaaccattctctcaagtagggtatatgttagataaggaacgcaagaagtcttcagatgtagacgaagggatggactaaaggaagtctcggtgtcatatggaagtaatggcgaagaggagaccagcaaaacctctcctatgggaggattcatggcagataaggaatgcgaaatgtccctacaaggagagaaaggtgagaataagtag

SEQ ID NO: 46855 - DNA, 345 bp, Oryza sativa
  Clone ID: PAT_MRT4530_49681C.1
ccgctccggtcccggttcgatccaccggggcgtttttcgttaaaaaaaggtcgaagagaacgcgggttggttccatttccgagaacaatgtggggaggccccatcctccccgagttcatcccggcgccgtggcgcgccgcggcggcgaccaagcgggtgaccgtctgccacctgtggccggccggctccaagaacgccgcccgcggcaagagcaagagcaagaggcagcagaggagcttctccgacgttgactgacttcgaggccgtcttcgagcagttcgacgatgactccgacttctacgacgcggtggatgaagactaaggacacttcgtgtttgcgttcaa

SEQ ID NO: 46856 - DNA, 304 bp, Oryza sativa
  unsure (1)..(304): unsure at all n locations
  Clone ID: PAT_MRT4530_49682C.1
gtaagaatgtacctctgatcatcctcaatgcantgtgaccaatgaaattttgtaggactacatgtaatctctgttgggtgtagggttataaatgacattttgaccgtttgtaatcagctaaccaccttttgtcatttcacgccgaatcgaattaaaggtgcttatcttttgatttaaaataatttgttatttgtttgttcgttcttttattatatttatttaggtgatttttgattcgtatatggtctatccttatttcttagtttcataatattggatttgagtaacttcttggcttgtgcaa

SEQ ID NO: 46857 - DNA, 196 bp, Oryza sativa
  Clone ID: PAT_MRT4530_49683C.1
atggagatcggcgacccgcgcgggcagcgggcggcggagggcgggagaaagaactcgcgaggagccgacgccgtcatcacgccgacgagaggggggattgaggggggcctagtccctgacatgtggaccccacatatcggcgaccaccacgtcacggggcatcacgggcttccgcaccaaaggggatgggggaaaa

SEQ ID NO: 46858 - DNA, 1088 bp, Oryza sativa
  Clone ID: PAT_MRT4530_49684C.1
gtactaaccgacggtttccccggccatggctgctccgccgccgcggcgaaccccgaaccccgagcgcggcagcaggaggaagggcgaggacccgtggctcgcggcgagccttcgcccggggaatttcctcccggggctcgcgattgggttcctcctcggcctactcgtcgacttgacctcctcatggaggccccaatcgagtccaccgctggctccggctgccccggcgccgcggggctccaagcggacgggtggttcgtcgtccgctggcgggggcatcggcggcgaagagcttaagatggttttggtcgtgcgtaaggacctcaagatgcgggctggaaaaatagcttctcaatgtgctcatgcagcaactggtctgtatgcagaactgatggcaagcaaccggggtcttttgagacagtgggagcaatttggacaagctaagattgttttaacatgcaagaatcagcaggaaatgaataggattaaggaaaccgcagaacatcgaggtatcccaacatttgttgtcgctgatgcaggacgaacacaggtacaagctgggtctaagacagttcttgcagtagggccagggaggaaagcagacatagattcagttactgggaagttgtctttactatgaacggtatatatgacatgaaatcttgctcatatttttcatgtaaaaaaaagtccatctcatagtgttcttattttgtttgttaatgcaacaaatatttaccatgacttggaagtttgccttgcagttatcttgtgctaattcttttaaaagaggatggtccttaggttctttatgcaaattttggaaataccaacaaatgaagcctcttagccaagtaaaccagtaatgtctttagaatcatgtggcacacaacataatatatcatgatcttgtgatgcagggaggaaagcagacatagattcagttactgggaagttgtctttactatgaactgcatctcagacatggtcagcctcagactttcacctctttcttgttagatttctgatggtttctggtttgaatacatctgccttttattatctaatgaaatttgaaggacccacga

SEQ ID NO: 46859 - DNA, 653 bp, Oryza sativa
  Clone ID: PAT_MRT4530_49685C.1
ggaactaatcggtataaccggtaaatacattatgatagttctgtccaactgctatccatgggaaaaaaatgtatggcacaatttacatcttagtcccgtaaaaatatgtttggtgttagactgaattaattagccttgtcatgaataaggagcatcagaattcagaagagtctcgtaaatgcacaacaatctgcatcaatattttatcatgttccctggtttatcttttgaacagaagatggggaacattgtcacaaagtgctcaggaaataacaaaagttcattctgcaacttgatgcataaagcagggcatagcagtcctcaacatggataagggctttcatccaataaaaatagaaatgagactgcactgcatgatatgaaattggaactagcgcgccacagaggaaacccaagccctaactcccattctttctttctttctttttgaatcaactttccattctttgcaggtttgcgcatcctaagttatgtcaagagtctttctattctatcaaaattacgaattttccactgaaaacactaccatgaaccataataaactcgtggctcataattatcatgatacaagtcgtccacataaaactccaccaaatatcaaagcgccaaaccacttattggacacaaataaa

SEQ ID NO: 46860 - DNA, 447 bp, Oryza sativa
  unsure (1)..(447): unsure at all n locations
  Clone ID: PAT_MRT4530_49686C.1
cggangtggnntaggaacacaagcaaatccaacacttcttccttgagctcctttccatcgtcaacttccttagctggttacacttcgttgtccaatcgaaaagcatagttagttccaaaatggctgcaaaggcagttatgcttgcactgcttgtgcttgtgagcacggctcaggtatccatgggtgcaaggcggcgcatggagctgtacaagccagacccggctgacatgctctcctaccacagcggcgccgtgctccagggcaacatcccggtgtccatctactggtacggcaagttcacgccggcgcagaagtcgatactcttcgacttcctcctgtcgctctcggtggcgccctacgccgccgcgccgtccgttgcgcagtggtggagcagccatcgacgagctctacttatcaaggnggtgcaaaccaactccacggccagan

SEQ ID NO: 46861 - DNA, 237 bp, Oryza sativa
  Clone ID: PAT_MRT4530_49687C.1
aagcaaaaccaaaatagcgttgtcgacggatttaaatatgctcaaggcatcatattacatgagaacctcagactagccggcgaacaaggattcacgtgctgtgcgcaaccaccacataacgatggaccgatgcgacgtagccaagctagtgcaacaaccgcaggaaagagcgtgcgagaacaattgcgggcgggataacacggacgcacccgaacaatatgatagcgaaaggacatg

SEQ ID NO: 46862 - DNA, 275 bp, Oryza sativa
  Clone ID: PAT_MRT4530_49688C.1
atgttctctagcaggaaagaagtaggccgaaaggtgattgataaaggataaacagaaacatgctctgcatcgctcaaggaatacccctgatagtaattgccccgcaacagtcaccttgtcattgaggtaaaaaaaaatcatcatgagtaagcaagatgacctaggtaaaagtgttttcatgaaggcaaggagtgaaatattcaactcggtatcagatgctacacggagtgaaaagtgcaggcaccagttaccaggcaatgccatgtcttgggaga

SEQ ID NO: 46863 - DNA, 162 bp, Oryza sativa
  Clone ID: PAT_MRT4530_49689C.1
cggacgcgtgggcgcgggacccgccgctcgtcgagttcccgcaccgcgagacggagtacaaggcgccgccgcctccggccaagatcaagagcggcgttgctccctaggtcgacgaccactgctagcgccgctgcgttgcttgcacacgaccctatccatatg

SEQ ID NO: 46864 - DNA, 5217 bp, Oryza sativa
  Clone ID: PAT_MRT4530_4968C.1
atgtcatccagcttcgtcgacaacggcgtcaacaccaacctcagccaagtacaccctgctttaacgatgctggtatggactcaagtcagcgaaatcgtcttcccggtttacaccacaacgccgatctcaaccggtcccccaatgaccggaaacgagaacgcagtgtctacaaaccaagacgacttcatgtcgaaaaatcctcccgctgagacggagaacggagcatcgacgacatccgagctcgagaaggattctgatgcggccaaaccttgttcttccgacatgaatcgcgagctgacaaagatgacttccgaagccacaagcaacgcgtttgaagaagccgctaccgcagcgcactcggagcagccaccaactggcgatgtcaatggtgaagacccagaacgaagggaatcaccccaacgagctacccctccacctcgcggcactggcgatctccgagatcacatcaacggccgccgagaggcacgacgtacacaagacaatgtgaatcgttctcggcgtcatgtctcttcacggcgccatgataacggaaatcaaagagaccgctcaaacgaggaccgagaccaggacaaccaccacgatcacaacgatcgcgaacgacgggtgccagacaatacaggtcgaggccatcgccataacgaagacgatgacagagatcggcgccgagacaacagtgggagacgacgacaggattcccgagatccaggccgacatcctcgtaatcgtacgccggaaccaagcgacccgtcgtcatcgtcatcatcctcgtcctcctcatcatcagacagacatccacgaaggacacacgaccgccgacaacccaccgcccccaacgctgggtgtagggctttcggtcgttccctgcgtgatgtccgatggcctgagagattccaacctggagcaatagaaaagtatgatgggagcaccggcccagaggagttccttcaagtctactccacagtactctacgctgccggagcagacgacaacgcgttggcaaattatttaccaactgcgttgaaaggttttgcacgttcatggctgatgcatcttcctccctactcaatctcttcgtgggcagacctatggcaacagttcgtcgccaatttccaaggaacatacaagcgccacgcgatcgaagacgacttacacgtgttgactcagaactcgggtgaatcactgagggaatatgttcggcgcttcaacgagtgcagaaatacaatccccgaaatcaccgacacttctgtaattcgcgccttcaaatccggtgtcagagatcgctacactacacaggagttggcgacaagacgcatcacaaccactcggagattgttcgagattgttgagcgatgcgcccacgcagatgatgcgctaagacgcaagaacgataagccgaagaccgggggagacaagaaaccagccacggacgcatctgagtcaagcaaaaagaaaaatcgcaaaaatgggaaaaggaaagctcaagtggaagttcttgcagcagaatacgtgaaccctcccaagcgcccagacccacaaagtagcaacacaaagaaagcatggtgccccattcacaagacggacaaacattctctggaagattgccttgttttcaaaaaatcgctcgagaagcacatcgcatttgaaaaaggcaagcgagtacgcgtggtcgagaagaacgaggaggaggttcctcacgaatcggatccagcgtatccagactccgacctccacgtttcacacatcttcggcggttccacaacgtactcctcaaagcgagaatacaagaaagtggaacgtgacgtctgttcgacatggcagcgggctgcacccaagatgaagtggtctgagcagaagatagagttctcggaagaagaccaccccaagaccgccgtcatcccaggacgatatccgatcgtggtcgaacccactattcggaacatcaagcactttggacgcaatgggaattccgtaaagcgagttgacaccaaccgatcaacccttccacggaattactccccaaaaccattgggcaagattacgttgcccgtgactttcggccaagccaacaacttccaaatagagcagatcacctttgatgtcgctgaattcgacacagcttacaacgccatcatcgggagaactgcacttgcgaagttcatggccgcatctcactacgcgtatcaagtgctcaagatgccgggaccgaagggaacaatcactattcaagggaacgcaaagctggcagtgcagtgtgacaagcggagcctcgacatggtcgagcaaacgcccagcccacccgccatgactgagccacccaagaaaccgtccgacatgccgggggtccccagggaggtgattgagcacaaactcatggtgcgacccgatgccaagccagtaaagcaaagactgcggagatttgcaccagaccgaaaacaagccatacgagaagagctcgacaaacttctcaaagctggcttcatcagagaagtacttcatccagagtggctagccaatctagtcatggtgcggaaggccaacggaaaatggagaatgtgtgttgacttcaccgacctcaataaggcatgccccaaggatcacttccctctccctcgaatagatcaactggtggattcaacagccggttgcgagttgttgagcttccttgacgcttactctggctaccaccaaatcagcatggcaaaagaggacgaagagaagacagcattcatcacaccgttcagggtattttgctacgttaagatgccgttcggactaataaccgcagggaatatcttccagcgcacggtccagggcgcacttagcgaccagcttggcaacaatgtcgaggcatacgtcgacgacatcgttgtcaaaaccaagacaggcgactcattgattgccgatctgcggcaaacgttcgacaacctccgacgatatcgcctcatgctcaatccagagaagtgcatgttcggagtaccgttgggcaagctgctcggattcctcgtttctagcaaaggaatagaagcaaaccccgagaagatcaaggcaatcaagaacatgaagtcgcccacaagactcaaggaggtacaaaagctaaccggatgcatgacggcactgagcaggttcatcgctaggatgggagaacgaggacaacctttcttcgctctgctaaagaaacaagacaaatttgtatggacacaggaagccgaagaggcatttgttgcactcaagcgctacctatcaaacccccctgtacttgttgctccccaacctaatgaagaattattcctctatattgccaccacaccgtattccgttagcaccgtcattgttgtcgagagagagaaagtacaacgaccagtctattacgtcagcgaagctctccacgacgcaaagacaagatacccacagatccaaaagctactttacgcggtcatcatgacatcaaggaagctacgccactactttcaagctcacagagtcacagttgtctcctctttccctcttggcgaagttgtgagaaacaaagatgttgtcggccgcattgcgaaatgggtagtcgagctgagccagtttgatgtccactttgtgccacgaacagccatcaagtcccaggtactcgccgatttcgttgccgattggactatgccggataacaaatcagacaaccaagttgataacgaaacatggacaatgacgttcgatggcgcactcaacagccaaggagcaggggtaggatttatcttgacgtctccctccggagatcaattcaagcatgcaatccacctcaacttcagggcgaccaataacacagcagaatacgaaggactacttgccgggataagagctgcagctgcacttggagtcaagcgactaatcgtcaaaggggactccgagctagtcgcgaaccaggtgcacaaagattataaatgctctaaccccgagttatccaagtatcttgcagaagtaaggaaactagagaaaaggttcgatgggatcgaggtccgacacgtctaccgcaaggacaacattgagccagacgacctagcacgacgtgcgtccagacgagaatcgctcgagcctggcacttttctcgacatcctgacgaagccatcagtgaaagaggttagcggcgaagttagctcggacacccccgacattagctcagaggtcaccaaggtagaacgtgccgtcgccgacatcgagaccacagacgactggcgcatcccactaatcaaattcgtcaacagcaaggagttgcctgaggacgatacagaggccgagaaaataacccgtaaagcaaagatctactgtatggtcggcaacgatctatacaagaaagcgccaaacggggggctagatatacttgggccattcccacgagggcagggcggctacagattcctattcgtggcgatcgacaagttcactaaatggatcgaagcagtacccacgggggaaatcaaggccgacaacgccatcaaattcatcaaagggatattttgcagatacggactaccgcaccgcatcataactgacaacggctcccagttcatcagcgtcgatttccaggattactgcatcgggctaggggtcaaaatatgcttcgcctcggtctctcaccctcaaagcaacggacaagtcgagagggcaaacggcatagtactacaagggataaaaacccgcgtctacgacagactcatgtcacacgacaaaaaatgggttgaagaactcccatcagtactatgggccgtacgcaccacaccgacaacgtctaacaaggaaacacccttcttccttgtgtacggctctgaggctatgcttcccggcgagctacgacatcagagtacacgagtacagaagcactgcgatgaggaccaggaggaacagcgggacatcgatgtaaatcttcttgaggagcatcgtgaacaggttgccgtccgagcagccagctatcaacaggcccttcgccgttaccacgagaagcgcatccgagcacgcataccttcgatcggcgactacgtcctccaacgagttcaaagccaagcagggcgaaacaaactctcaccaaaatgggaaggaccttacacgatcacacaagtcttgtggccaggcgcattcaaaatcgcagacggcgacggtcgcgagttagcaaattcttggaacattgaccaactacgtaaattctatgtatga

SEQ ID NO: 46865 - DNA, 588 bp, Oryza sativa
  Clone ID: PAT_MRT4530_49690C.1
atgaaggagacggagagcgggcgggaggagtccgggcaacggatgcgcagcactctccctagcgaccaggagatggagagtgtggcggcgaggaagcccacgaggccaaagaggaggcaggcagtggagaaggccggggtggagaggaggcagcaaaacgtggcgcgacgggaggtggtcgccgaggagaagaccttcggcgagctcggcatggcttcggcgaactcgtcggctgctgccgcgtgggtcggtgaggcgtgccggatcagagccgagggagatgaggaggaggagtggtgttggtggacgctgggtgtcaatggcgcagggcaagcggggccagcggggcttgagcacgggctacctcttccagagcacacaagcagcctccttcttcagccgtgctacttcaccctagctggtacgaagctcgccgtgatcaactttgatctacccttcatagttgcaattgtcatcgccatcccgtggactagtgaatgcaggatcaacgcattagggaccagcggccactggatccgccggcccatgttctcgtggctacctacggatacatgcacccaggactag

SEQ ID NO: 46866 - DNA, 396 bp, Oryza sativa
  Clone ID: PAT_MRT4530_49691C.1
atgccctttgagccaacgatgacacatacgttgcgccagctagccgagcacgtacgtacgtacactacaccaccaactcgatcaaatattgctgaggttgttggagcgagcgaaccgccaactcaactccggcctgtgagtgggctcgtgatttgcggattggacaataaacgaatctccacctcaccaccaccagaggggagcaaagaaaatccaatggccctcaagaaaggcagcagcagtggcttctctttttggaagcttgcagagtgtgccatggtaggaggcgacggggggcacaatgaggaaggaggatcacgatggcctggagtgaacaggctttttgtgcctggacctaccgacatcgggatggatgagggggaatgtaaagaagta

SEQ ID NO: 46867 - DNA, 2847 bp, Oryza sativa
  Clone ID: PAT_MRT4530_49692C.1
ctccaccaactagctgccacgctcgctttcccctgcgacatgcgtgatgtgtgggcgctccacttgttaaccatctcgcgcgcacgccaggctcggctcctcgatcgacgccatgtcgctgcgccggctctgcttcgtgctgcccatggacgccgacgaggtggtggtggtagctggcgctgctggtgaggagcagcctcgacgacgagggatggcagcgagcgggaggctggcgtcgtacgtccgccgcaaggtcggccgcgcgctgcggtgcgggctctgcggcgcctggtgccaccaccgctcgtcgggagtctgcagcttcgaggacatcgccggcgtggacgcggtcggcgcggggaagctcggcggaggcgcgggcgggagccccaggatcttcagctactcggagctctacatcgggaccagtgggttcagcgacacggagatcctgggcagcggagggttcgggcgggtgtaccgcgccgtgctgccgagcgacggcacgacggtggccgtcaagtgcgtcgccggccgcggcgaccggttcgagaagtccttcctggcggagctggcggcggtggcgcggctgcggcaccgcaacctcgtccgcctccgcgggtggtgcgtgcaggacgaggaggagctgctgctggtgtacgactacatgccgaaccgcagcctcgaccgcctcctcttcagaccggcggcggcggcggcgcccgccgcgtcggctccggcgctgagctgggaccggcgacgccgcatcgtctccggccttgccgctgccctgttctacctgcacgagcagctcgacacgcagatcatacaccgggacgtgaagaccagcaacgtcatgctggactccgagtacaacgcccggctcggcgacttcggcctcgcccggtggctcgagcacgccatgtccggcgaggacgcgccgccgccgcagctggaggtgtccccgtcgcctcattccgcgcggtcgtcgtcgtttgcttccgcgaattaccagttccggctgatggacaccagccggataggcggcaccatcgggtaccttccgccggagagcttccagcgccgggccatggcaaccgccaagtccgacgtgttcagcttcgggatcgtcctcctggaggtggccacagggcggcgagcggtcgacctcgcgtaccccgacgaccaaatcttcatgctggattgggtgcgtcggttgtccgatgaggggaagctgctcgacgccggcgaccgcaagctgccggacggcagctacccgctgttcgacatgggccgtctcatacacctcggtctcctctgctcgctgcacgatcctaggtctcgtcccagcatgaagtgggtggtggagaacctctccggcagctgctccggcgacctgccaccgcttccgtccttcctagctctcccaaagtacgtctctctcacttccccctccgattccggcacgacgacgaacgccacggacagcacggtcacctctgcgtcgaagctctacggcacggcggccgggacgaccatttacctcaccgcggagaacggccaccgctccagaggtggcttggctgacaacagcggcggcagcagccagcgatcgacgcggccgctggtggtgatccccagcgtcgacactccccgtgagatatcgtacaaggagatcgtcgcgatcaccaacaacttctccgagtcgcagatggtggcggagctcgacttcgggacagggtacgagggcttcttggacaacggctatggcggcaatggcgcccgccgcgaccgcgtccatgtcctcgtgaagcggttcggcatgaagacgtgcccggcgctgcgcgtccggttcgccaacgagctccgcaacctcgcgaagctgcagcaccggaacctcgtccagctgcgcggctggtgcacggagcacggcgagatgctcgtcgtctacgactactccccggggaacctcctgagccaccacctcctccggcgcgatggcgcaggcgccgccgccgtcctcccgtggcgccaccggtacagcatcgtcaaggccctcgcgtccgcagtcctgtacctgcacgaggagtgggacgagcaggtcatccaccgcaacatcacgtcggcggcggtgttcctggaccccgaccgtaacccgcggctcgggagcttcgcgctggccgagttcctgtcaaggaacgagagccacggcggcgcgggcgggcaccacgttgccctgcccgccaccagctctgctgcgcggggcatcttcggctacatgtcgccggagtacatggagaccggcgaggccaccaccatggccgacgtctacagcttcggcgtggtggtgctggaggtggtgaccggcgagatggcggtggacgtgaggtcgccggaggtccttcttgtcaggagagcgcagcgatggaaggagcagagccgccccgtcgaggccatcgtggacagacggctggacggccaggttgatcgcccggagctcgagcggttggtgaggctcggcatggcgtgcacccagtctgacccggcggcgcgaccgacgatgaggaagatagtgagcatcatggatggcaatgacgagatcttgaagaaattcgagcagaggaagcagcagagcaaggaagagtgggagaccacaaatgctgctgctctgtccttagtaagaagactccatgctcttgcgatacactgaacacaacgtcaatatgtatatattttctctaatagagaaataaattctgttattatagttggacacgatatttttatatatatttattaatttcgttcttcaaaaaaaaaaaaaaaaaaaagagctcctcgtgcaaa

SEQ ID NO: 46868 - DNA, 399 bp, Oryza sativa
  Clone ID: PAT_MRT4530_49693C.1
ctaggccaccttcaggccgccgccgtcgcctcggcccgcgccggcgcgcgccttccccttcctcatcaaggcgagcagatccaggttggcatcgaagcggaagacgtggacgtggctcctggagatctcggcgtcaaatatgacggcgcacttgttggcgtccacggggccccacctcctgccggcgccggcggtggacgaggcgggcgaacgcggcatgaggaggaacacgagggagatgagggcaagcggggtgaggatgacgagtagcacgccgcggtagcggtggaggcggtcagcgagcgtgtcggggtgggcactcggtagtgcggagtagcggcgcatgttcttggcatcgacgtcggcgcccgagacgaggaggtcgggggaggagggcat

SEQ ID NO: 46869 - DNA, 1821 bp, Oryza sativa
  Clone ID: PAT_MRT4530_49694C.1
cgggctgcaggaattcggcacgaagggcagccaaaggaaaggagaaagcacggccatggcggaagacgcgccgccgtcgtcgcttccgctgctgctgccgcggaagtcgttgtcctcgtcctccgcgcagcgcaagcagcagtacgcgcggtgcgtgtcgcacgctggggacgagctccacagcttccgctcctgcctcgcgtggatgtgcgtcgaccactccacccgcgcccgcggcgccgcgtcgtgggcggccttcctcctcctcgccgtcgccgccccgtccgcggccaccctcgcgctcccctccccggtcggcggcggggggtcgccgttcgacgggcaggtccaggtgtcgctcaccctggccgccgcgctcgcctacctcaccctcacggcgctcctccagggccgcggcctccgccgcctgctctacctcgaccgcctccgcgacgactccgaggaggtccggtccggctacatcgaggagctcgcgggctccttccgcgtcctcgcctgcttcctcctcccctgcacgctcgccgaggccgcctacaaggcgtactggtacctcgccgcgccgccgttccgctccccgtggtggtccgccgccgcgtgcgccgtcgaggtcgcctcctgggcctaccgcaccgccgtcttcttcatggtctgcgtcctcttccggaccatctgctacctgcagatcctccggatgaagggcttcgcgcgcgagttctgcaggttcgccgacgtcgccgccgtgctcgagagccaccgccgcatcaggaagcagctccacaggatcagccaccgctaccgccgcttcatactctgctgcctcgtcctcgtcaccaccagccagttcgccgccctgcttgccaccaccaggccgcacgcgcagatcaacctcgccaccgccggcgagctcgcgctctgctcgctgagcctcgtggccgggctgctggtgtgcctccagagcgcggcgaagatcacgcacaagacgcaggcgatcacgagcgtggcggcggggtggcacgccgacgccaccatcaacgccttcgacaacgaccaggaggaccccaacccggacctcccccgcatcgtcggctacctggtgcccgtgaacgcctactggatggcctccggcgagtcctcgtcggactcctcctcctcctcctcctccagcgacgacgacgactccggccaccccaagtccaagtacatccctttccagaacaaccactgcttccagcagaggcaggcacttgtgacgtacctggagaacaaccgggccggcatcacggtgtacggcttcgtcgtcgaccggacgtggctgcacgcgctgttcatgatcgagttctccctcgtcatgtggctgctggggaagacggtcggcatatcctgaggcctgaaggagcttttgccctcctgttgaagctttcagctctctctctgctctgcaccgtgccgagatttttgatgatcaaagatctctgcatcgtctcatattgcttcctggattgtccaatacaaaatcgagtgcagaaattgcagataatagttcagtttctgtgccatgtccggcacaaaaacgaagcaacagttctgaagtttttagctgtatgtttttctttaaaaatttttatggttctttgtttgaggcagattctgatggagcattagttgtatgaaaaataatgggatgggatagttgtccagcttgatttgatgagattatgagagaacagtgatcgttgtatactgtataggttgatttcatgaaacgattacagtgatgttcaggttgacttttttttttcc

SEQ ID NO: 46870 - DNA, 370 bp, Oryza sativa
  unsure (1)..(370): unsure at all n locations
  Clone ID: PAT_MRT4530_49695C.1
tctattggaagaatcgcaatacgcnccgtgtccatccgttccgctccgtcgagtccctgtgagntttcgacaatccgatgcgccgatcggcggctggacgctncgccgcgcaggcgtctccaacgttcgcagcacgggcctgancgcctaccgattccgcaaggcgcgcttgccgagtgacgacgctgccgccaggcagcgacngagcacagtgtcgcgacgccgggccacaacccgcctaatattaaataaggctatgacgccaaaccgaatctctggttcagtgtcatcacgatttgttgttctgntgcttcttttcgaactggaatattnattacggttcacatgccaaaaaaaaaaaaaaaaaaaa

SEQ ID NO: 46871 - DNA, 291 bp, Oryza sativa
  Clone ID: PAT_MRT4530_49696C.1
ctaagaaagaaatatgtatgaccagtactggctcgccaaacatttgaaggaatcatatccttttatgctctttttatcttctacctggtactttttctagtatgcagaaacttaattggactaccgtactttcttgctttcctgtaaataacctagagcccactttgtgctgtccttttgtttttgcattataactaaagtttagtacccactatacttgcttgtctccaatatggtgcccaagaacttgctctgcagtttgtctgccttggctcactaatatgcttaata

SEQ ID NO: 46872 - DNA, 1817 bp, Oryza sativa
  Clone ID: PAT_MRT4530_49697C.1
atggctacgcctgggctagcggcggatgcgcggtgcggtgcgattgaccccgttgttgttttggtttgtgttgttgctaccttggcaacgcagccgaagcagatccacgagatcaaggacttcctcctgacggcgaggaggaaggacgcgaggtcggtgcggatcaagaggaccaaggacgccgtcaagttcaaggtgcgctgctccaagtacctctacaccctctgcgtcttcgacgccgacaaggccaacaagctcaagcagtcgcttcccccgggtttgactgtccaggaggttcttaatatctcgattcttcagttggaatatctgctgcttggtagacttgggtcaacacagtgcaatctgcatcctctgggtcaggaagccaatcaagcgttgcagaaagttcggaggctaccgaatgggccatgcaggaagttggtgacagatttctacgctttgcggaaggatgtcgagctggctgtagcgcgcgtcagtgaagtcaggcagtctgctggtttggatcagcttgaggaggaaatcgcttcgctcgagaagaaatctgcagatagttccttgtgggatgatccttccaaggcacaggagatacttgttgctctgacagaggtcaaagacagagtcaagcttctcaacgatttgaagttgcaggttgaagaagctgagaccattgtaaagcttactgaggagttagattccatagatactggccttcttgaagaagcctcaaagatcataaaggcattaaacaaagcactagataactttgagatgacacagcttctttctggaccttatgacaaggaaggtgctgtgattaatattactgcaggtgctggtggcaccgatgcccaggattgggctgacatgttactgaggatgtatgttaggtggggagagaagcagcggtacaagacaagagtggttgagaaatcccctggtgaagaagctggaataaaatcagctaccattgaattagaaggaagatatgcctatgggtatctctctggggagaaagggacacacagaattgttcgtcagtccccattcaatgctaaagggcttaggcagacaagctttgctggtgttgaagtaatgcctctactgccagaagagtccatggatgtagaaatacccgaagaggatctggagataagcttcactagagcaggcggcaaaggaggccagaatgtgaacaaggtggagacggctgttcgcatggtccatatacccacgggcatcgctgttcgttgcacagaggagaggagccagttggccaacaagataaaggccctgagccggctgaaggcgaagctgctggtgatcgccgaggagcagcgggcgtcggagatcaagcagatccgcggcgacgcggtgaaggcggagtgggggcagcagatccgcaactacgtcttccacccctacaagctcgtcaaggacgtccgcaccgcctgcgagacgtcggacatcaccggcgtcatggacggcgagctggacaccttcatcagagcctacctcaagtacaagctctctgccgctgctgaggagcaaagcgtcaagtgacagatttgcatccagtgtccgatgcaacaagccaacaaccaatgcttgtgctataggcgcagaattttgacgcagagcaagaaccccatcacgtagtaagattgtaagaatagcctggaattaaccgtgtgcttgtgctataggtgcagaattcgttttgcttctcaactaagcacccaaaatttattttggggcttcatgtattagtggatatattaatttcatttctacccaat

SEQ ID NO: 46873 - DNA, 655 bp, Oryza sativa
  Clone ID: PAT_MRT4530_49698C.1
cgtggtttagttgaccttctcctccccttgcgcgcgccgccctggcgtccgacttcgccgcgcgccgagccgccgcgcgtcagcctcggggccgcttgcgcgtgcccgatcgtcttggcgcgccgtcacccgtccaacgccttcaagtcgccgttgccacaccaatcttgacgacgacaaagccgggacgacctccgccgcaaggaatcgacactcgacgccgtgcgctcccatccaagccgccgccgagtgcgattttgtttctatccggggtgaatcgcgccaatttttgcattcacccctgagccagccattttcaccctcgccgccgccgcgcgtcgcgcctggattggcgccaacacgtcgccagccaatttcaaccgcggtcaagccaatccttcgccggtaagtattcgaacgtggcctcccgccactcaaattgatcttgcccaccctctcacagcctctaccgccccagccgtatccaaagtttgagctcatccatggcgatgacggtgtccgagctcatccgttcctccttgtgcgcgatcgactccacatccctccatccatcttccgccctcgccgcgccaagccaagcaccgccgccctcgcactgctctcgtagatgctctaggagccctcccctagccat

SEQ ID NO: 46874 - DNA, 835 bp, Oryza sativa
  Clone ID: PAT_MRT4530_49699C.1
ttagttgaccttctcctccccttgcgcgcgccgccctggcgtccgacttcgccgcgcgccgagccgccgcgcgtcagcctcggggccgcttgcgcgtgcccgatcgtcttggcgcgccgtcacccgtccaacgccttcaagtcgccgttgccacaccaatcttgacgacgacaaagccgggacgacctccgccgcaaggaatcgacactcgacgccgtgcgctcccatccaagccgccgccgagtgcgattttgtttctatccggggtgaatcgcgccaatttttgccgcacggttgaattgaagatagacggtggtttcccctctcacaattcaaaccattcacccctgagccagccattttcaccctcgccgccgccgcgcgtcgcgcctggattggcgccaacacgtcgccagccaatttcaaccgcggtcaagccaatccttcgccgcatagtgagccctaatcgaagccctgcgtcgagttttacctcgccgcaccaagccgagcaccgtcgcccccgcgttgctctgttctttgccgccgcgaagtttttccggccgcaatccgccgtttcaaccgatctcgccgctaggccgtccacgcatcaaattagctcctccgccgccgctcgccatcgccagagatccctagctccctctagcgccactgcaatcccaaaccctaacgccgccgaccgattttggggaacggccggaggttgaagaagagaagagagagagagagactgacaggtcttgaggattcttctgactcactaaataatattaatcaatctcaagacatcgagcaaggcaagttactatataccttt

SEQ ID NO: 46875 - DNA, 1323 bp, Oryza sativa
  Clone ID: PAT_MRT4530_4969C.1
atggatgaagtcgggggtcgatggacattctccagggcaaatgaaggctacacgagctgcggcccgatgtttaacagagaaaaaggaaagaatgtcagcgggtatgcctcaagtaacccaagttttcaactcaatccaccactggcctcaagagagttaaccagggcatacccttggtccattccaagcatgctgcttagttcacagctaccattagttggaagtcaagaccaaaatcagtatgtgtttgatcgagcatttgccacccaggtcaatgagcttccaatgctagaagaggatgtccccttttgtcacgattgtagagagcaaggacactatgccctgaattgtccatgggtatatgccaaagaagccccttcctttggtttagcagggcagacatcgctaaaccagcctcctcgcaccaagtcaagcttgcagcctagtgtacaaaggagagagcctaatggagagaatccattgaatcccgggaattgctttcctcctagcccttcgtaccacgtggggtcacgtgctaagcaagccaaaggcaagaagagtaagaatcagaagagaaaagcaccgatgcgaactgaagaagaagtacgtaagatgactattaccagcaccgaatggcctccagcagggataactattcctagacgtcaaagaggaaataccttccgaggtgcacgacagttgacccagcacctcctaagccatggtggcagagtatctgatagtgaagggtcagatcaagtctcctcggattatgaagatgagtctctccgacatctcggcgaggaagagatggaatcaaaagcatgcccccgttgtggagaaattggacacgttgctagcctgtgtttcacactctgcccttattgtgaggaagaccatccaccaggtaaatgtcccacccgcaaggtcacatgttttctgtgcgaaggtaccaaccatgtgcccaaggattgccaactcagtgtgttgttgaccaagaccgcagaaatccaacgaacaaccctacgattgtctcatcagctagtcagctccaacatcaacatcgacgatatcatccccagcaccaatgctcctcctgctgcacctgactctgcagtaaatcatagcaataataccttcaacaccaaccattctctgcaccgacggcctcagcaaagaattgtcgtcgatggaagaagttgtgtctctccccgacctactccaggccgagcgaagggcaatcaatctcaggagtgcgataccaagcagaagaccgttattcgcctcaatcagcaatcagaaggaaacttctcttgtgaatga

SEQ ID NO: 46876 - DNA, 5824 bp, Oryza sativa
  Clone ID: PAT_MRT4530_496C.1
agcttgccaacggctatagggttcgcctttttccttaggacaagatgaccaggcaacaactccgtcggtcgaacttttttgttgtaagttgccgaagtgcctgtggcatacttttgcatgtgctcgagtgcttcgactcttaccccctccaagagttcgagcaacaactcgcgcccctcttcgcccctaaagaacgtcacccttggtgagttagcccctagctctgttggggtcattgcctcatcgccatagagaagcatgaacgggctgaacttggttggtcttgtgggggtcgtccgaaggacccagagaacagatagcatttcctctggccattcgcccttcgctgccccctcaagccttttctttagtgcttctagaattttaccatttatacattcggccgctccgtttgagtgcgggtgcgtgaccgatgtgaacctgatttccaggttaagcccttcgcacatttctctgaacttgtcagagtcaaactacttgccgttgtcagtgatgaactcttttggcactccgaaacgactaacaatgcttttccatacaaacttctgtactgttgccgaagtgatcacaccaaggggttcggcctcaatccatcgagagaagtattcaacggccacaattgcgaacttgtgcccgtttcgcgccgccaggaacggcctaataatgtccagtccccatctggcgaagggccagattggtgtgatgggctgcaactcatactggggcgtggtttggcttcggccatgatgctggcaactttcgcacttcttgatttgctcaacacatacttttaacacagtgggccagtaaactccttgtctaaatactttgaaggcaactattcttgcggcttggtgcgcgccacatagcccctgctgtatttccttcgccatttcctcgccttcggcgaaagaaatacagcgaagcaagggttgaagtatcccggagcgatagaactggcccgagaccatcttatacttcgtggctctgaattgcaagcgctttgcctctgcttcgtctatcggaagccagccagtttcaaggtgcttcacaaacggggttcactagtcgtatgggtcttcgaccaatttgacctggtcgattgccaggacctccaagctgtccatgggcacgcttggtgcatacaggacctcaaaaaggatgccaggcgaatgtggaccaccacaagcggcagatttcgccagggcatttgcttcctcgttctggcctctaggtaaatgttcgaccgttatgccgctgaagcacttttctatagaccgaacggcatccaaataccttttcatcccttcttcttttgcctcaaaagacttgtcgacatggcccaccaccagcttggagtcggttcggattagcaggcgccgaatccccaatgctttcgcctttcttaggcccaaaataatggcttcgtattctgccgcattgttggttgtgtcgaactgtaaccttgcagcataccaaattggcacaccatttggcgaagtgagtactgccgcaacgcccgcccccttgtgcgaccacgaaccgtcggagtacatcacccagggctgttcaatgggctcgggttcaggggcgaatgccggtgtccattcggccacaaagtcggctagcacttaggacttgacagcagtgcgggcaacaaaatgtaagtcgaaaggggatagctctgctgcccacttgctaagccggccagtaacttctttaccccggagtatttcgcccaaagggtactgtgatggcactatgactttgtgggcctgaaagtaatgcttaagcttgagtgaagccatcaccagggcgtaagcgagcttttccatttcaatgtatcttgtcttcgctccttgcaatgcttcggagacgaaatagaccggtttttggcctgaatccgtttcttggacgagagcagcactgactgccactggcgaagctgccaggtatagtagcagttcgcttcctgatgctgggctgatcagagctggcgggctttgcaggtattgctttagctcgtcaaacactgcttggcattcgggagtccagttgaattttcccgcgccccggagggttttgaagaagggcaaacctctttcggctgcaaggaaacccaacagcttgcctgtgcgaacgccgaaaacacacttctcaggattcagtttcatacccgctgcgcacaagttgtcaaaagtctcctgtaggtcggacgcgtggtcgaaagccttgcggctttttacgacgatgtcatcgacataagcttccacgtttcgccccaattgcttgtaaaggaccttgtacaccagcctggcgaaggttgctccggcattcttcagaccgaaaggcatcctgaggtgacaaaaggtgccgaacggtgtgatgaatgctgtcttggggatgtcggccgggttcatgcgaatctgatgatagccggaatatgcatctaagaagctcatgagttcgcagccgactgtcgaatccacgagctggtcgatccgtggcaaggggaaatcatccttcggacatgctttgtttaagtctgtgaaatcgacacacatgcgccatttgccatttgacttacgcaccagcactggattcgccagccactcaggatgatcgatctcttgaatgacccctgccttgagcaattttttgacttcggcttttgctgcctcctggcgattagcggacatcttgtgtagcttctgtttccttggcttggcatctggcttgactgccaggtgatgcatgatgagatctgccgaaacacctcccacttcatcagggccccaggcaaagatatcaatgttcttttttagtacctctaggatgttcttagcttcttcttcgcccatgtcgcccctagtgatacgagctttgtggggtcggcatcatcaatctgcatcttgactatcttgccgtgaggggcgggctttggcgcgtgcttcgcccggtcatgcggttcggcctcaacattgtgcactgctctgttgattatggccaaatcgccttttgaaacagccgaaggctgaagccccttgaccacgatcactcctgccgggccgagcatcttgaacttgagataattgtgatgggaaatggcttcgaacttattcaaggttgcatggccgaagatggcattgtagttgtgtgggatgtcgacaacgtcaaacaatacttgctcttcgcgtctgttttcccccgtgccgaaggctactatcaactgtgcttggccaagaacttgaactgcttctccgccgaatcctcggagcgatgtcggtgctagggtaagggcttgggtagtcaaccccatcttggcatacgcttcggcaaagatgacatcggccgaacttcctccgtcgaccaggattcaccggacctcaaaaccagctatctcggctgagatcaccagaggatcttgatgcgagaacattactccttcggcatcttctggcccaaaaaagatttgctggttcagatacttcttgtggaaaggctgctgatggttgcttgcttgctaagcgtcgaactccttgcggagggcttgcacttcttcgacagccatcacagccttgcctgcacggtcggttctgaactttctccaggtcatgggggcttgaccttgccttggcggttgtgcttggatcgccggctggggctggcgaacaacgagaggaggtggttcggcaacttgaacttgttgttgggcttaagcagcggtgacggaagccttatcgtactcagcttgtattgcttgccgtcgcttggaatcatcttcgccccttgtgaacccgtcaatgatgcgaagtaggtgttcaagcgtctgcggctccttgttggcaatttttcttgtgagttcgccctcgagtaaaccggccgaagcggcgtttatgactgatgcctcagttatgtcttgaacttggcaccgggcttgcgagaagcgacgcatgtactcccttatcgactcccccggcctctagcgaatgccgagtagatgctgctgcgtcttcggctcctcataggttcctcgaaagttaaggacaaagacatcgtgcaattgctcccatgagtaaatgctattggctgtcaaattgaaataacaagagcgggcgataccgtctagggtgagatgtattacctttgccttggtattttcgtcgccatgagccgcttcgattgcggattcataaatggagaggaattcctttgggtcagtttcgcctgagtagcgtgggacgggtgggaacttgaactggggtgggattggacgggtcttgattcccccactcagcggtagccccttttcgccccctgccctgttcatggcaccttgctgcgggtacggcgtggcgaagggcgaaatcacggcttgcgcatgaggttgggccatggcattcggctgcccggccccgattggtgatgcttgatgagccgccatgaatgggtcgaaagttggctgtgaccatgtcatggcgatctggtttggtgcttggtttgctccgaagcctggcgttggtgcttgcggccgaacggttggcgcctgagcagcattgatagagtcgaactgtggtccttgactccacggcgaagcccccagacctggctgattcgaaggcaactaactaggcgcaccttgacttgtattcccctccgggcaggccgaaggggctgtacttgaaatgttgtgaggttggctgagctgctgaaggaaagcttggagctgcgcctgcagagccgaagccccttctaccattgtttgtggcacttggccaggcggttgaggatgtacttgggtagcgaccggttgagcttgcagttgcacatgaggggctggatgcgctgctgcggtcaatggctgcccgacgaagtacattggcgcttgcgtgacttgtggcggaaggggctgggtcggcacttgtggatagacttggggtgggacatagcctgccgaatactggaggattggtgccgaagcgaccttagaccgccttgccgcctcgtacgcttgctgctgttcttgcatttggcgaagcatgtcttggagtcgtgtcatgttctgtcgcatggcttccatgtcggcttcggtttgtgtctcggggtcagggttgacttgggcttgcatagcggcaagcgcagtttgggccgctgccggctgcgacggagcggcttggggcaccagcagttgacttgtcgaaaggatctccgccctggtctggagtgccctcgccgccgcagccgccttcgccatgtcagccgcgttcggcacctgcacagaggtagcaggggccgaaggcggtagtgatggcgcaggtgcggaagtagatggtgctcctccatcttcggcgacaggcgcccaaggctctgctccctcttcagcggccatattcgccccagcgtcgcttttctttcgcctttgaaccttctccttttacaacttttttcagggcattcgcttttcatgggtttcgctcgaaattcccaatggccggcgccagcttgtggtcgaaacgacaaatggttacccttatgaaagggacatttacatgggtacatagtgtaatagaggttcatggactcctgatgggccgttaggcgatcgtcggcccaatggcccctaggcttgatgggccgggaaaggcttcttcggccctcgcgggggcaagcttgctttggcgaagtcggctccctttgacatatactcttcgccctacatccttcgcccaagaggcctccggcttagtagagtacccgcacgatccttcgcctctcaccgtccttgttccatagtttccgccat

SEQ ID NO: 46877 - DNA, 301 bp, Oryza sativa
  Clone ID: PAT_MRT4530_49700C.1
ttcatgactacggtgaactggagcttctgggtgaggtcgacctcgtcgccggcgacctcgcgccactcgaactccctgacgaggatggtgacaaagtactcgaggtggagcagcgccagcgccatgccggggcacattctctgaccgggaccggacggacttatcactgtctacttgctgaccaagagggacacatgctggccctagccgacagagaggaaccaattatgcctgaacacttacggagagagtgagacgcttgctgattaggacgatttttgcctcctggaacatatacctc

SEQ ID NO: 46878 - DNA, 179 bp, Oryza sativa
  Clone ID: PAT_MRT4530_49701C.1
tgcccgggtacgcacgtcacgtgttcgggctgcgcactgcggggggtgtagaccacgacggtggcaggtgtggtggtgctcggggcgtaaaaaatgttagtggggttttcgtggaggctcgagacccgccgccccatgctggatccgcccttgagaacagcgaggtggaggccaagtga

SEQ ID NO: 46879 - DNA, 168 bp, Oryza sativa
  Clone ID: PAT_MRT4530_49702C.1
atggcccgtgcttacaccctagaaacgcaaacgcagcagcaacaacaagcggtcgcctctgctgctctcctagtcctccctgagcccagcttaactctctctctcttcctctgtgttgtgttcactgctgcatttgagggttcgggttcagaatacggatatgtatag

SEQ ID NO: 46880 - DNA, 2802 bp, Oryza sativa
  Clone ID: PAT_MRT4530_49703C.1
atgggcggcggggggatgcggaaggcgccgtcgatggagtggcggtgggtatccacggaggaggacgacgagggggaggaggacggggacacggtggaggcggcggccgcggccgtcggggccgtgggcaggggcgggagcttcgggtccgaggaggaggaggacgaggaggacggcggcggcggcggcgagggggagggggagggcgaggatggggagaagcagaagctgatccgcaccgtgccgtccgtcgactggttcgacgtcgagggctacgaggtctccgtcgcgcagcacatcgaggacagcgaggagtttgattttggcaggacaatgtttcttgcccttcagactcttgctgtggtgtttggagatattggaataagtccattgtatacatttgatgtcatgttcagcaagtatcccattcttggagaggaggatgttcttggagcactgtcacttgtcctttatactctaatttcgatgccactagtgaagtatgtcttagtcgtcctttgggctaatgatgatggtgaaggtggtatatttgcgttgtactctttgatttgcagaaatgcaaaagtgagtctcattccaaaccaagtacactctgagaagaggatgtcgagtttccgactcaagcttccaacgccagagcttgagagatccataaaagtaaaggagaagcttgaatcttcattgctattgaagaagttgcttctaggtctagtgctatttgggactgcaatgttcatatcaaatggagttatcacaccagctatgtcagtgctgtctgctgtcagtggcttgaaagttgggataccaaatgcctcacaaggccttgtggtgatgatttcagttgtacttcttgtaatcttgtatagtgtacagaggaatccctttcaggcttggctgtcccttgctggctgtcttttatgtgcaacagggtccgaggcaatctttgcaaatctttcctactttcctgtaagatatgttcagtcaatgtttgcgcttcttgttcttccttgccttgtcttggcctatttaggacaaggcgcttttcttattgcaaaccaaaattcatctgagcagatcttcttctcatccatcccaagtggagttttctggcctgttttcttaatagccaatttagccgcattgattgctagtagaacaatgacgacagctatattccaatgcctaaagcagtcaatagctcttggttgctttcctcgactcaagatcattcatacgtctcggaaatttatggctaagatatacattcctgtcgtgaactggtttttattgttttcctgcttgggctttattctgctgttcagaagcatatatgatgttggcaatgcatatgccatagctgagcttggggtgatgataatggccacagtctatgttacaatcataatgcttctaatttgggaaaccagtattgtgaaagtgttgtcatttgtcatcacattcctctccttagagttggttttcttctcatcgtctctaagtagtgttggagatggaggttgggctctgataatttttgcatctggtattctaatggttatgttcatctggaattatggaagcaaactgaagtatgacagtgaagttaaaaagaagctttcaaaggatttgatgagaaaattggggcccaaccttggtactattagagctcctggattaggcttggtctacagtgagatagtgaaaggagttccggcaatttttggtcattttctgattgcccttcctgcaatccactcgataatcgtttttgtatgcatcaggaatgtaccagtgcccgtggttccccagactgaaaggtttcttttccaacgtgtttgtacaaggggttatcacatgttccgctgtattgcaaggtacggctacaaagataagaaccaggagagccaaagcacatttgagcgccttctgattgaaggcctcgagaagttcatacagcgggaggcagtagagctatccctacaaagtggagacgacatcgactctgacgaggagcctccaaccccatctaggacaatcgtagcgccaaatggtagcctctactcgcttgacgtccctctcctggcagactttgtgccttcggcagaagttattcctgaggccagttgctcaacgcctcagcacgatcctgtggtggattacacacagaaccttgagctggagctcgcattcatcaggcaggccaagcaatctggagccgtctatctcattgacaaccccatcgtcaaagccaggaagaattcctggttcttcaagaagctgatcataaactacttcttcgcattcttgaggaacaactgccgcagggcgatgatgtcgatgagcattccacacacaaatgtgatgcaggtgcgcttgacctcttatgtttgattgccgaatggtaccctttccgacacccttttgttttgttcgttgctatcaagtagagataacactaactagagaagaatggcattgcaaagagaagaagagtatagttgcacctctagcattattcaggaagggataacatctgttttaggaatccacgtctcctgtaatttttgtacaattgcgaaatgtatctgcaagcaaatgttgtgtagcaaacacatcagagtgtggtgagctaacatgtgtattcctgtgtgaggaagagattcttttgccatgtactagacaaggtactcgttttgagtttttgagtaaaaattttgatatctacaagtgttaacaacaactccctagttctctccctcgtgccgattcctgcagcccggg

SEQ ID NO: 46881 - DNA, 364 bp, Oryza sativa
  Clone ID: PAT_MRT4530_49704C.1
ctctaaactctggagaaggccagccctctttgttttctcatgttacactccaaacctacccaagcccgaattgtccactctggattataggaaactttaaattcacaggcttagataagccctgagttaggccgctttgtgaaccttcattacctgaagcgtgccgggaccaatcttaccggggatatccaaaacaaatccgaacaacgaaggaattttatcaccctggatttgaacgccaacaagctaacgggaacaattccgaaggccctttccaaaaaaggttcgctgagataatgcggctcccaaaaacgagcggcctggatccttctcagggacctgcccaaacttttcaacctgaaaa

SEQ ID NO: 46882 - DNA, 314 bp, Oryza sativa
  unsure (1)..(314): unsure at all n locations
  Clone ID: PAT_MRT4530_49705C.1
cggacntgtcnggnacgcttgggctcgcnctcccaannccnctcctntttttttaanccgcatccntcccctnaggccgtaacgttccctgccaccgccctcatccctccntgcngccgcgcccgcacctntacggctctaccttngccatcgccatcatgctgcaccacctggagaccggacgccgatcaacgccggangccgacacgaccctggttcaacgnctcaccaaccgtngaccctnatggcctgaccttataaggacggcaacacgatnctaatggcctgaacgctngtccctgctnggaaaccat

SEQ ID NO: 46883 - DNA, 666 bp, Oryza sativa
  Clone ID: PAT_MRT4530_49706C.1
atcacactagcacagcgcaagaaaatggcgggtgccatgaccatgagtcgccgccgtctctcccacgcgctcctcctcgtgctcgcgatcctccccaacctggccgctctcgccgtcgccgccggcggcggcagcggaggcggtggcttcttcccgcaccggtccctcctccagtcctccagctgccagccgagcggcgccatcaccggaacgtccggcgactgcaacgcggacaacggctccgagtgctgccaggacggcgtccagtacatgacgtacgcctgctcgccgcccgtcgccgccggcggcaccggcaccgcggccctcctcacgctcaacagcttcgccgacggcggggacggcggcggcgcgccgtcctgcacggggaggttctacgacgacggccagctggtggtggcgctgtccacggggtggttcgacgggaggagccggtgcgagaaggacgtcgtcatccgggcgagcggcggcgcgtccgtgacggccatggtcgtcgacgagtgcgactcccagcgcggctgcgacagcgaccacaacttcgagccgccgtgccggaacaacatcgtcgacgggtcgccggcggtgtgggacgcgctggggctcaacaaggacgacggcgaggcccagatcacctggtccgatgcttga

SEQ ID NO: 46884 - DNA, 1047 bp, Oryza sativa
  Clone ID: PAT_MRT4530_49707C.1
atggcggacaagttacagcacacagctgatacgatgcccaatgatcttacgattgatttgttaacaagaattacagataatttttcaacgaagcaccaaattggtcatggtgggtttggaacagtttacaagggagtactagaaaatggggaagagattgctgtgaagaagctcgacataatatcacttgatgatgtgaaatttatgaatgaatttactaacctcatgagtgtccgacacaaaaatattgttcgattagttggctactgctgtgaaacaagacgtaagcttgtcccacacaatggcaagttggttttggcttatatggaggaaagagttctctgcttcgaatatttgcagcgtggaagccttgacaattatctttctgacgaatccagtggatttgattggtgcacacgttacaacataattaaggggacatgcgagggtgtaaactatcttcacaatggaccgcaaggtcatattttccatctcgacttaaaacctggcaacatattgttggacaagaacaatgtgccgaaaattgcagatttcgggctgtcaaggctatttgagaaaacactatcccatcatacaacaaaagtggttataggaactccaggttacatgcccccggaatacattgagaaaaaacatatcacggagatgtttgacgtattcagtctaggtgtgataataatagagataatggaaggacctaaggcacggtcaaaactgcttgaaatgccttcccaagagttcatcgagctcgtccatgaaaactggagtagaagatttcagcagacaacgccgacgtatacatctgaggaaataggtagtcttcaacgacaagtgaagacatgtttagaaatggcgttacaatgtgtggaagccgatcgacacaaaaggcctacgatagcggaagttgtcagcagactgaatgaattagatgctatgtttcagagaacgtcaccatcgcttttaccttctgagctgccgattgatccagcatcacctggagatcagaaagtatatatgcgcgattaa

SEQ ID NO: 46885 - DNA, 555 bp, Oryza sativa
  Clone ID: PAT_MRT4530_49708C.1
atgcagctggagatttcgccgagacagaggagccagcagcagaaggaggaggaaggcgagcaccagcagcgcgccggcgaggaggcggtgggcgccgtcttcagcattgagccgtgggtggacgccgcggcggtgctggtgccgccgcttaacttcgccgaggtgaacgacggcatcttccgctccgggttccccgccgccgacaacttcgcgttcctcctctccctcaagctacgctcgatcgtgtacctgtgcccggagccgtacccggaggagaacacgcggtttctggagcagaacggcatcaagcttcaccagttcggtattgacggcagcaaggagctgcttgtaaacatccctgaagaaaaaatccgagaagcactcaaagttattcttgacgtaaggaatcaaccggtgctcatccactgcaagagaggcaaggaatgtgcttatgtgcaacaacaaaagatcttcttttggtgcaaaaattacctgttaacaggatggattgcactgaatactcgctaccccagtctcctgtgtcctgacttctga

SEQ ID NO: 46886 - DNA, 387 bp, Oryza sativa
  Clone ID: PAT_MRT4530_49709C.1
ccatctataatacccaatcatgcggggtgttgtttgtgctatacattttgttgctgttttttttttttttgttttttttaaaagagaagaagacggccccttttactgagggcgaaccaacagaaagccccccccgaaagctaaacgcgggggggagcctttacaggtcggccaaaacagggtctcaacaccatgactagagagcctcagtttcggccccattggaaaaccctgggcggtattcgggttgaaatttaggggtgaaggccccgggctttctccccgtagggttgtgacggccgggggctcccccccgggggaagcgggaacgattagcccccccaccatctggccgggcgcgtaaaactacgcgccaaggggggaccc

SEQ ID NO: 46887 - DNA, 438 bp, Oryza sativa
  Clone ID: PAT_MRT4530_4970C.1
atgtcaccgccgtggtcacctctgggatgggaagcacgggtcacgacgcggaggacatctaagatggaagcagtggataaagaagttgcagttcattatcaatatacaaggactgtttactcttcatcgttaataattgaatgtctagtagtgctctttgcctcaggaagctttgatgaaattgctattgtcgctggtgggtgtgataagaatggacaggtgctgaaatctgccgagctgtacaattcagagactggtcattgggaaactttggcagacatgaacttggcgaggaggctctcatccagtttcttcttggatggtttctacagatgtaaggttgcttacgacattgctctaaacaggccagtagtatgtaaattgctattttttagatgggctaggcctaaagctgacaagatttacaattgggcttag

SEQ ID NO: 46888 - DNA, 165 bp, Oryza sativa
  Clone ID: PAT_MRT4530_49710C.1
caatcaagcccagaaaaaaagttcgggttactttcaattaatgtcggtcaaggctaaacttcccagacacagactctagtaaacctgctttgcctggtatgtacatctcaacttcataggatgggtaactgcgtaagtcaagcgggcaaatacgactcttgacac

SEQ ID NO: 46889 - DNA, 2598 bp, Oryza sativa
  Clone ID: PAT_MRT4530_49711C.1
atggccgtcacgcaggcgctcgcggacgcgctccgctcgtgtggatcccgcggcgcgctcgccggggcgcgcgctctgcacggccgcctcgtcacggtgggcctcgcgtccgccgtcttcctccagaacaccctcctccatgcctacctctcctgcggagccctctccgacgctcgccgattgctgcgtgcggatatcaaggagcccaatgtcatcacgcacaacataatgatgaacgggtatgccaaacaaggcagtctgagcgacgccgaggaactgtttgacagaatgcctaggagggatgtcgcctcgtggaacacgctcatgtccggatacttccaggcccgccggttcttggatggtctggaaaccttcgtctcaatgcatcgaagtggggattcgttgccaaacgccttcacattttgctgtgttatgaagtcttgcggcgctcttggctgccgtgaattagcaccgcagctgcttgggttgttttggaagtttgatttctggggtgacccggacgttgagactgctcttgttgacatgtttgtaagatgtgggtatgtcgattttgcttcaagattgttcagtcagattgagaggccaactattttctgtcggaacagtatgctagcagggtatgccaagttatatggtattgatcatgctattgagtattttgaggacatggctgaacgagatgttgtttcatggaatatgatgatagcagcgttgtcccagagcgggcgagtcagagaagcccttggtttggttgtagaaatgcacagaaaaggtgtgcgtcttgattcaacaacatacactagttctctgactgcatgtgctagattgttttctttgggatggggtaagcaactccatgctaaggttatccgtagcctaccacaaattgacccttatgttgccagtgctctaattgaactatatgcaaaatgtggcagtttcaaggaagcaaagagagttttcaattctttacaagatcgcaacagtgtatcatggacagttcttatagggggatctttgcagtatgagtgcttcagtaaatctgtcgagttgttcaatcagatgagagctgagttgatggcaattgatcaatttgcactggcaactctaataagtggctgtttcaacaggatggatttgtgccttggtaggcagctgcactcgctctgtctgaaaagtggacacaatcgagctatcgtcgtctccaattctctcatctcgttgtatgcgaagtgcggtgatctccagaatgctgaatttgtattcagttcaatgtctgaaagggatattgtatcatggactagcatgattactgcatattctcaaattgggaacatcattaaggctcgtgaattctttgatggcatggccacaaggaatgccattacatggaatgcaatgttgggggcatatatacaacatggagctgaggaagatggcctcaagatgtacagtgcaatgctaagtcagaaggatgtcactcctgactgggttacttatgttacattgttcagagggtgtgcagatataggtgcaaataaacttggagatcagattattggtcatactgtgaaggcaggtctcattttaaacgtgtcagtcgcaaatgctgctatcacaatgtactccaaatgtggcaggatatctgaggcgcaaaaactatttgacctcctaaatggaaaggatgtggtttcatggaatgccatgatcactggttattcacaacatggcatggggaagcaagctgcaaagacatttgatgatatgctgagcaaaggtgcaaaacctgactacataagctatgtcgcagttctgtcaggctgtagccactctggacttgtgcaggaagggaaactctactttgatatgatgacaagagtccatggcatatctccagggttggagcatttctcctgcatggtggaccttcttggccgtgcagggcatttgactgaagccaaggatctcattgataaaatgcccatgaaaccaactgctgaggtttggggagctcttcttagtgcctgtaagatacatggcaacgatgaacttgcagaattggcagcgaagcacgtgttcgagctggactcacctgattctggaagctacatgcttctagccaagatatattcggatgctgggaagtcagatgattctgcacaagttaggaagctaatgagggacaaagggataaagaaaaacccgggctatagctggatggaagtcgaaaacaaggttcacgtcttcaaagcagatgatgtgagccacccacaagtgattgcaattcgtaacaagatggatgaactcatggaaaagattgcacatctcggttatgtgaggaccgagtcgccacggtctgagattcatcacagcgagaagctggctgtggcgtttgggatcatgagcttgcctgcttggatgcctattcacatcatgaagaacctgcgcatttgcggggactgccacacggtgatcaagctgatatcttctgtgactgatcgggagtttgtgatccgagatggtgttcggtttcaccacttcaaaagtggttcttgttcttgcggggactattggtga

SEQ ID NO: 46890 - DNA, 204 bp, Oryza sativa
  Clone ID: PAT_MRT4530_49712C.1
atgcccgacgcggccagccttcccacaatcacaccatgcaccgctggatccgtgaagaggcgcgcccccccaaaacaactgggggatcacagggaacagcgcctccacgcacccggagccagccgcgctacccccaccgccatcgccatggaagccggcgatggtattggcggtggcgtgtcgacggcatcccggaccatgtga

SEQ ID NO: 46891 - DNA, 431 bp, Oryza sativa
  Clone ID: PAT_MRT4530_49713C.1
cttcttcttcttcttcacacaggggtgctccttctgctcttgtgctaagtagctagctcacaacagaagaggacgagaggaagcaaggcggcggcggcggcagcaacaacatatacaccgccggccgtggcgccatgggcatcctggaccacatgtcgcatgtgtgcagcatcacggagacgaaggaggcgctcaagctcaggaagaagcgaccgctgcagacggtgaacatcaaggtgaagatggactgcgaaggttgcgagcgtcgcgtgaagagcgcggtgaagtcgatgcgcggcgtgacgagcgtgacggtgaacgcgaagcagagcaagtgcacggtgaccggggacggggagcccgccaggtgctggagcgcgtcaaggccaccggcaagaacgccgagatgtggccctacgggccctacacgc

SEQ ID NO: 46892 - DNA, 723 bp, Oryza sativa
  Clone ID: PAT_MRT4530_49714C.1
atgctggtctatgaattcatcccaaatggcaccttgttcgagcttatacatggtaaatatagtagaataacatccatttcattggatgctcgtctacggattgctcaggaatctgcagaagctccagcatatctacattcatcagcatcccctccaatcgttcatggcgatgtcaaatctccaaatattctcctaggtgacaagtacatagcaaaagtgactgattttggagcatcaaggatgcttccaaaagatgaaatacaatttatgaaaatgaacatattaggtgttggaacagagctgttccaagatgttgctcaactggcaaaatgttgcttgagtacaacggggggagaacggacattgacgacagaagtagctgaaaggttaaaagcaataagaagcacctggcgtgaacaattgattgagagtgctaacggtgaaactgttcagtatgtccgcacaaagatttgccatggaatgatctgtcccctttttgttttgcctgatggtttgtcctactttcaccatggaagatcttcagagaaagacatagttggcacttcaatactggaagtggatgacttcagtgatgcagaggaagattggaaagatgctgggaggtcaagatggagagttggactgttggagactatgaagagttcctggaaaacaaccaccttttgcctctttgttacttgctcacttttgaaacttggttga

SEQ ID NO: 46893 - DNA, 565 bp, Oryza sativa
  Clone ID: PAT_MRT4530_49715C.1
aaagggggcaaacccttctttgaaagggtcaaaaaccccaaacggggggtttttaacacaaaactaacccccttttttttacctggataaaaaagggcaatttttgtgggggggttttacaaaagtaaactcaacaaaacaattttgccctggccttaataaacttggaaatcctttttttttttttttgggggggagggggaccccccccaaaccttttttttttgaggaccccagccattttcttttttttttttttggcccttttgggggggccaagtttttttttttccacctttagggcaccctttgtcttttccaatttttaaaagcctcaggatccccttttttttggggggaaaacccccccccccccttgaaaaattcctgaaaaaaggcccccttttgggggattttcccttttgggccgaccgggaaagggggaacttcccctttgggaacaacttgccctttttttatccccaaaaaagccccgttttttttttggacaggccccttggggggccctttttttttttcttggagcggccccctggtgtccccc

SEQ ID NO: 46894 - DNA, 1314 bp, Oryza sativa
  Clone ID: PAT_MRT4530_49716C.1
atgagccaccgcaggcgacgtaacgccgctggcccgccgcctcccgaaggcatcggcggctcgtccaccgcagaggcctcttcgacgggggaggagaggccggatctgccgtgggcgtgggcgctgggatcggagcgaagggtgctcgcgctggcgctggccttccgcgcggcgaacgcgctgctggtgcgcacctacttcaaccccgacgagcactggcagtgcctcgaggtcgcccaccgcatcgtcttcgggtatggccaccttacttgggagtggaagcgtggtcttcgaagttacctccaccccttcatctttgctgctctctacaagattctttcgctgctccacttggattccccatggttcatgctattttcacagcttgttaactggttcatgttcttctgtattacacggactctctcaaacagcatggagacagttttgactgttactggactttactattggtttgttgcaatagagtctgtaaagggaaattcggttgtttcaaagcagcaggctgccagcaagcaaagccctccatcaagaaaaatggctctactcatagcagccttagcttgtgctattcggccaacaagtgccataacatggctatatgttggtcttttggattttattcagatgaaatcaaaatcccggtttatttttctcgaggtcgttccgctcggggtctttgtccttgccgtgacaacgtttcttgattgttggatgtatggttcccggatcatagtgccacttaattttttgaaatttaacctcttctcttcaggaggagactactatggaacacatgtgttccactggtacttcagccaaggacataacttagctgcaatggcacaactcaagggaaaaggtcacaatgagaaaggacgactttcgaggttgaagctctctgtcattctgctcatcctaacaaatgttccaatggctttatatatgtccttataccatcaaagaggaactgaagatgctatgctttatctatcacgagaagcccatgatggaagagtaaagagtgtcctcttccttatgccttgccattcgacaccttattactctacattacattacaacctacctatgcgctttttggactgtactcctagtgaaaacaaagggaccttggatgagtcagaccgtttcctcatgaacccagcagattttgtgggcgaggtttttggaaatttatcttcgttcagtcatattgtattatttgaatctgaagaaaggcatgtcaagttgcttctgcgcaattcatttcaagaggtatacgcatttatttag

SEQ ID NO: 46895 - DNA, 2000 bp, Oryza sativa
  Clone ID: PAT_MRT4530_49717C.1
atgagccaccggaggcgatctaatgccaccggcccgccgcctcctgagggcgtcggcgactcatccaccgcacaagcctcgtcgacggagaaggagaggccggatccgccgtccgtgttgggatcggagcgaagggtgcttgcgctggcgctggccttccgcgcggcgaacgcgctgctggtgcgcacctacttcaaccccgacgagcactggcagtgcctcgaggtcgcccaccgcatcgtcttcgggtatgaccaccttacttgggagtggaagaggggtctccgaagttacctccatccgttggtctttgctgcgctttacaagattctggccctgctccacttggataccccatggtttatgttattttcgcagctggttaactggttcatgctcttctgtatcacgtgtactctctcaaacagcatggagacagttttgactattactggactttactattggtttgttgcaatagagtcttcgaaaggaactttggttgttccaaggcagaagcctgctagcaagcaaagccctccatcaagaaaaatggctctactcatagctgccttagcttgtgctattcggccaacaagtgccataacatggctatatgttggtcttttggattttattcagacgaaatcgaaatcccggtttctctttctcgaggttattccactaggggtctttgtccttgctgtgacaacatttcttgattgttggatgtatggttcccaggtcatagtgccgccacttaattttttgaaatttaatctcttctcttcgggaggcgactactatggaacacatgtgttccattggtacttcagccaaggttttccatcgatgatttggactttcttaccgttttcaatttctggaattatgaagtctcgagaatggaggcttgcaggtcttattgtctgggtattagcagtttatagcatacttggacataaagaattcaggtttgttctcccggtgcttcctttgatgtttatgttctcaggatacaacttagctgcaatggcacaattcaagggaaaaggtcgcagtgagaaaggccacctttcaaggtttcagctttctgtcattctgcttatcttaacaaatgttccaatggctttatatatgtccttgtaccatcagagaggaactgaagatgttatgttttacctgtcacgagaagcccaagatggaagagtaaagagtgtcctcttccttatgccttgccattcaacaccttattactctacattacattacaacctgcctatgcgctttttggactgtactcctaggtgaaacaaagggaccttggatgagtcagaccgtttcctcatgaacccagcagattttgtgggggaggtttttggaaatttatcttcgttcagtcatattgtattatttgaatctgaagaaaggcatgtcaagttgcttctccgcacgtctgttcggcaggttaggagattttttcactcccacttcaaggttgatagagaccttcaagtcgtcagttgttgtttattcaaagaagagtgtattgtgatcactgtggcagaaaaggctcgttagtgtactatcttgtctaacatttctaatcatgtttcaccctactttaatttatcattcgagaaatgatctatagtttgggccttggttttgatatattgattttttttcccatcctttgtgatgtaattctatttctatgtattagcgccaacttccatgttttcacaaaaaaaaaaatcatttccataactagaggtgtgaagaagttttagaggtttaacaaaacgaagacaagagacgagcagagctcctcttctagagaaactggcaccatcccaaccagctcttcaggaacaagttccattccatccatctcaaccaagtttcaaaagtgagcaagtaacaaagaggcaaaaggtggttgttccaggaactcttcatagtctccaacagtccaactctccatcttgacctcccag

SEQ ID NO: 46896 - DNA, 2237 bp, Oryza sativa
  Clone ID: PAT_MRT4530_49718C.1
cggagcaccaggcatgctgccagatgacgggagtcgttccatggatgtgcctcgcggcccccctgccgcccgcgaccctcagctcctgtgcagcttccaggatggctaagcctagatgcagaggaacatgcggcaacctcaccattccctaccccttcggcatcggtgctggttgcttctacactgatgggttcgacgtttcatgcgaggagaaccgcacctacatgcataactcaagcagcaacatggagatctacagcctcaatctgattggagggcaggctcaagtcagcaccttcatcgccgacaagtgctccaacaacacagatggcacttcaacagatggttgggtatcaacatctactgctccttttttcacattatccagcagggctaacaagttaacggtggttggatgcaatacccttgcattcctggggggctacaacgaggaagaacagaacgttggggctgggtgcttctcgatgtgccccgacaagcagagtgtggacagtagcggccagtgctccggcatgggctgttgccagacatctattgcaccaaatctcacctccttaaacgtgacattcgacagcaggttcaacaattctgaggtgaacagcttcaacccatgcagttatgccttcgttgccgagcaagactggttcaggtttgagcctgattacctagaaggtcacaagttcacagacaagtacaaaggggttcccactgtgcttgattgggttgctggaagagaatcatgtgcccaagcgcccaagaacaggacatcatatgcctgtgttagcacgaacagcagctgcatcaactcaccaaatgctaccgggtatctctgtgcctgcaacaatgggtttgcaggcaacccgtacctggaaggagggtgccaagatatcaacgagtgcgaatctccgggtcagtactgccatggaatctgcgacaacacaattgggggctaccattgctactgcgggcctgggactcaaagtacagatccaaagagagagccctgcaatccaataacagcttcagaaagagctagactaacaaaaacgtttataggcatttcggtatgcgctattatactgcttagttgcacttttgcactactgatcgaatgccagaaaagaaagctgatgaaagaaaaagaaaggttctttcaacaaaatgggggtatgctgctgtatgagcaaatccggtcaaagcaagttgatactgtgagaatattcacaaaagaagaactagagaatgcaacagacaattttgactcaagcaaagaactaggaagaggcggtcatggcactgtatacaaggggatcctcaaagacaacagaatagtagccataaagcgctcaaagattatgaatatggttcagaaagatgaatttgtgcaagagatgattatactttcacagatcaaccacaggaatgtggtaaggcttctaggttgttgcttagaagtggaagttccaatgctggtctatgaattcatcccaaatggcactttgttcgagcatatacatggtaaatacagaacaacctccatttcactggatgctcgtctacggattgctcaggaatctgcagaagcactagcatatctacattcatcagcatcccctccaatagttcatggtgatgtcaaatctcccaacattctcctaggtgacaactacataacaaaagtgactgactttggagcatcaaggatgcttccaaaagatgaaatacagtttatgacaatggtacaggggactctaggctacctagacccagaatacttacaagagcgccagctaacacagaaaagtgatgtttatagctttggagttgtgcttctagaactaataacaggaaagactgcaatttattctgaaaatactgaagaaaagaaaagccttgcatcatccttccttctggcactgaaagagaacagacttgagtccatcttggacaggaacatattaggtgttggaacagagctgttccaagatgttgctcaactggcaaaatgctgcttgagtacaaagggggaagaacggccattaatgacagaagtagctgaaaggttaaaagcaataagaagcacctggcgtgagcaattgattgagggtgctaatgaagaaactgtatgtttgcttgaaaattcatcacagtatgacccttctaccactggacgacacggaagcttgatggcgctagatatagaaactggtagatga

SEQ ID NO: 46897 - DNA, 217 bp, Oryza sativa
  Clone ID: PAT_MRT4530_49719C.1
ctgtaagatggacggcgcatttcctccagaaaagacaacctgctcgtagcgggaatgggcagtctggcggatgacagaagaaccctatgggattgttgactagaccatagtcaccagtacgacatatcattgacttcgccagtacctactctagcctgtagccctcagactgggtgctcgttagagatgtaccagagctcgagcttaaagtatatgg

SEQ ID NO: 46898 - DNA, 1528 bp, Oryza sativa
  Clone ID: PAT_MRT4530_4971C.1
atgtcatggcacaaggccggtgtcctgctgctagggggctcaatcctgcctgcctgtcccggaggttccggccgtaggtggggttggatgtttaacagagaaaaagaaaagaatgtcagagggtatgcctccagtaactcaagttttcaactcaatccaccactggcctcaagagagttaacaagggcacacccttggtccattccgagcatgctgcttggttcacagctaccattggttggaagtcaagaccaaaatcagtatgtgtttgatcaagcatttgccacccaggtcaatgagcttccaatgccagaagagcatgtccccttttgtcatgattgtagagagcaaggacactatgccctgaattgtccatgggtatatgccaaagaagccccttcctttggtttagcagggcagacatcgctaaacccgcctcctcgcaccaagtcaagcttgcagcctagtgtgcaaggtagagagcccaatggagagaatccattgaatcccgagaattgctttcctcctagcctttcgtaccacgtggggtcacgtactaagcaagccaaaggcaagaagagtaagagtcagaagagaaaagcgccgatgcgaactaaagaagaagtacgtaagatgactattaccagcgccgaatggcctccagcagggataactattcctagacgtcaaagaggaaataccttccgaggtgcacgacggttgacccagcacctcctaagccatggtggcagagtatctgatcaagtctcctcggatgatgaagatgagtctccccgacatctcggcgaggaagagatggaatcaaaggcatgcacccgttgtggagaaattggacacgttgctagcatgtgtctcacactctgccttcattgtgaggaagaccatccacccgacaggtgtccaacgagcaggatcacttgtttcttttgtgaaggaactgatcatgtaccaaaagattgtcaatccagttttctgctgacgaagaagatggccaaccaacccgccagttccaacggagagaagcatcaaggcaacacaaatcctcgccaagattacagtttcagcctaactccagtgccaggacagaggaaccaaaatgagaaaagaaaatgccgagtccgggaagatatctgttgcttcaattgtcaaggaatgggtcatttcgccgacaagtgcccaaaaccgagaaacatagctgccagcacgtcagtccacgcaactccctgcaatcagaagcttgctcctcagcgaattgtcatccatgcatcccgaagcagtcctatagcccgcgttgcaacagctccaactccagcgagtgcattaccacaaggtgtcaatgctcaatttcagccccagccatcagttgacaagacagaggccagtatcggcattgtacctttggatgttccagcacagcagccaaagaaatcaagtacaagatgaagaacccgaacagaaacatgagataatgaatgagcttgataagcttatgaaggacccatgttaa

SEQ ID NO: 46899 - DNA, 365 bp, Oryza sativa
  Clone ID: PAT_MRT4530_49720C.1
cccacgcgtccgcttttttgcatgcaaaagcatcaacaaaggacgaatatgacacgccgatattagcagaagcgcttcctcgggaagttgctgaccctttcgattatggaggagggaacataaatcctattggagctgctgatcctggcctaatttatgacatcgatccaaaggattacaacaaattcttcgcttgtcagatcaagaaatatgagatctgtaacattacgacattgccagcctatcacctgaatctgccttctatatctataccagacctaaggcatccaataaacgtacgacgagcagtcactaatgtcggggaggtggatgcggtttaccaatcctctatagaatcccccctt

SEQ ID NO: 46900 - DNA, 524 bp, Oryza sativa
  Clone ID: PAT_MRT4530_49721C.1
ggaaaatgttgtgtaagaaaacaaatgataaatatatccaaactgaacaacataaaaaatcacctgaattgttccaataagggtaggtgaatacagttttgcaaaaagaaaagtcagagaataattaaatttgctttattaaaatttcaagtgagcatactgatttctgtggcataaatttgataaattgagaataaaaatttcttacccctagataaacttggtagacaaaatcattataactcccagagtttattccttgtccattatcaaatgatacatattcataaggtattgcatatggaagtctcttcaacgcctcttcaaatacatcaattgcatacccagaggcggttatttcattggttacaggattactttccaccttcataaactcaggatacgcatttgtccgtacacctatacggagtttctttccattagtaggaatttgccatcctttgggcactgtatgtacttctcctggccacactactggattaagatcaggcacagagttcatg

SEQ ID NO: 46901 - DNA, 118 bp, Oryza sativa
  Clone ID: PAT_MRT4530_49722C.1
cggtcacactcgcggcagggaggcggttcaaccggcgacaaggcggcggttagatcggtggcgtgcaaacggtccgaccggcgacgacaggactgtcgagattttcgttgatttgagg

SEQ ID NO: 46902 - DNA, 1071 bp, Oryza sativa
  Clone ID: PAT_MRT4530_49723C.1
atggacgccgcgacaggaaccccggctgatcagagcccgaacgcgcccctgcctgtccgcgcaaggtgttcgacggaatgcgtcctggcttctgaggcgccatggctcgacgacgcgcgaggccggccgtgggcggacctcccggcggacatcctcggcctcgttgtcggctgcctccccctcgtcgaggaccgggccaggctgcgctccgtctgccgcgcgtggcgcgtcctccaccagcggtcgccgccgccgctgcccctgctcgtgatggccgacttctccttctccagcttctgcgcaggagagaccatcatgggagtgcgtggccgtgtcccgctgccggagagggagagggagatggcggctggtggcagcgtctgctgcgtgggctcgttcgagggatggctcgttggcgtcaaggccaacaaaggtcgctacttcggtgaccgccggcgtttcttgatgaacagtttctcccgggatgttatccgactcccgctaccttcgggagcctcccgctccgctgatgcctacactaggtctctccccatcatcaatggctctggtgtcttgcattgcacgatcaacgcagcgaagtgcgtgatgttgttctggaaggtcgtcttgtcctcgtcgcctgactctggctccaagtgtgttgtggccgccacctccatggtcaaggatgcagttaagcttgctctctggcggcctgggatgaagtcgtggagcgtgtgtgatgatgacaatggcttgatggtttctcgtgttgagtcttgtgtgatcaaactgcctggggtcatgggtaccgctaatgagacttggagcatagtagagtggcgcgggaaactactgatagttgtgacatactttggtgaatttgggcacaacattattgagattagagtatatgaggtggactgcagcacaaaccctgccacattcactgagatcaagagcttggatggcgactgcaactttatcagccaactcagcagcaagtttctagacttctacgataatattccccttgttgatgacgtcatggacatgaaaaatgtgccataa

SEQ ID NO: 46903 - DNA, 411 bp, Oryza sativa
  Clone ID: PAT_MRT4530_49724C.1
ggggggggtttttttttttttttttttctttttttttttttttgttggaacattgttttttttttatgaaggaacacagcattatattcatcaggccacaagaacacgagctccaccaaaccacaagtaccaggcgcccaacatacacgacggggggggggggggactaccacccaaacaacctaaaagaaacctgcgcgcacgagcttaaataaacaagtacacaagaagagacacaactcaggggataaaaagagtaaacagacgggccggggccacggcaaacccacgcgccccccccgggacctagccaggcgaagcccggacgagccagggaagaaaagccgagcacccccgcggcaggccgacccaagacgcctccgcctggttaatgggggggtgcgccgcctc

SEQ ID NO: 46904 - DNA, 870 bp, Oryza sativa
  unsure (1)..(870): unsure at all n locations
  Clone ID: PAT_MRT4530_49725C.1
agagcaagcaaaaagaaaaggtgtgaaaaaaaaaaagaaacctaataatgatgttttcctctgttcttgtttcacttctggcacgaaaccaaaactgtctactatcagctaaaagaaagctngngatattactatgtaattttattcatcaaaatggacatcatttttgtacattcttgatggaaagcattacgcaacaaaagctagcaaaactgagatatacagattaatttaagctactgcacatcacaggatgagtgaacttcgtaacttaattgatccactaattttttgcgaacgcgcaaaaggattgcacgtcaatattagttgatccactaattaatcgatgaaaattcactagcaagctgatgctgtagtaggctgcaggtatgatctcttgatgaactccaagcagtcggcaatggcctccgcctggaaagagctctcgccgccggcctccgccggcgccgccagccgccggcgccggcagtcctggctcagccgctgtgccctcatcacggtggtcgccgccgccgccgccgtcgccggcgaccacctcctcgggcagcaattgagctcctccaggcaccggagcagcagcccgacgacgccgaacagcctcacccgcagccggagcaccgagcccagccggacatgccgcacccgccgtccccggcggccggtcgccggccggcagctgatgctgatcaccttgtacttgtgagttgggaattctgaatatttttgtgcctttgttttgtgaggttgagactttgtctgatcactctcagcctcacacctctgttgcatcactatccttctggaaattgaatctgaaaaatggcaactattgctatgtgatttcgtcat

SEQ ID NO: 46905 - DNA, 534 bp, Oryza sativa
  Clone ID: PAT_MRT4530_49726C.1
cccactcgtccgcccacgcgtccgctccaaagtttacattcctgatatatagctcatcatcagttgatcgtgtccggaggtgtgagaggtcggcgatgagctccggcggcaagcaggacggtgcggcggcggcgggcgaggaggagcggaagacgtcgtggccggaggtggtggggctgccggtggaggaggcgaagaaggtgatcctcaaggacatgcccgacgccgacatcgtcgtgcttccggcggggtcgccggccggtgaccaaggacttccgccccaaccgcgtccgcatcttcgtcgacaccgtcgccggcacccccaccatcggctagcctgcctcatctgcctgccttcagcatcctgcttatcttaattaaataatgatcacatgcactcaagtgatatgtactgtgcatgttccgatcgatccatcctcatctgaatcatgttttacctacgtgttaatgttttttttcctacgaataaataaagagaccttcatttaatgcatggtagccaactacctagct

SEQ ID NO: 46906 - DNA, 1078 bp, Oryza sativa
  Clone ID: PAT_MRT4530_49727C.1
atggcctcgtccggcgaccacgcgccgcagctcagcaccgccgtcgcggtgcccggcgcgggcgcgcccgtccgcgtcgtggccgcgccgggcctcaccgaggcggatttcacgagcgcggtggaatcctcgctgttcaggcagtggctgaagaacctgcaggaggagaagggggtcctcacctacgggaggctgaacctgaggcaaatcctcatccagggggttgacatgtttgggaaacgcgtggggtttgtcaagttcaaggctgacatcatcgacgaggagaccaaagccaagattccaggaattgtatttgcaagagggcctgctgttgctgtgttgattcttttggagtctaaagggcaaacttacgctgttcttacagaacaggttagagttcctgttggaaaatttatattggaactacctgctgggatgctagacgatgaaaagggagattttgttggcactgcagtccgtgaggttgaagaagaaactggaattaagctaaatttagaggatatgattgaccttactgcattgctgaaccctgacactggatgcagaatgcttccttcaccgggtggctgcgacgaagagattgggctgttcctgtacagaggccacgccgacgaggacacccttagggctctccaagggaaggagactgggctgcgcgaccatggcgagctgatcaagctgcgggtggtgccgtacagccagctgtggcgcgccaccgccgacgccaaggcgctcagcgccatcgccctgtacgagatggccaagagggaaggcctcctgccgtcgtctccgacgacctctcgccgccgtggcagctcgtcgtcggccaacttgtaagagccagtcagctatagctagctagccgtgtgctttgtcagaacagctaatgagcagagcgagccaattactgtggagtgtgtgccttaatacaacagcaagatcgacctgtgtaaatgactaattgcatgcattttgatgtagaatatgagaaattaataaagcgtatgtaaacaccgtcagtcacgcggcaaaaaaaaaaaaaaaaaaaaaaaaaaaa

SEQ ID NO: 46907 - DNA, 375 bp, Oryza sativa
  Clone ID: PAT_MRT4530_49728C.1
aacgaacgaaaaaaaagagaacagatcagaagagaaactaatgcaacaatattagaaggcagtagccaccgtgatggttctatatacaagttttgccctggttttatccaagtatttcaaattgctgatcgtcatgagacttgcttggagccgatgatgctttcacaacctatggactgtcaacctaatagggatacatgcactgtgcatttttcaactcgcatgatgcaaattttctcaattaagttggctaaaatacatatgtatagtggcccagtacagatatatgggtacatagcagtgagagatcatcttgattcaatgcttaattatgttgtgaatcgtagcagggatgatcccatcatcgtgaagcag

SEQ ID NO: 46908 - DNA, 1283 bp, Oryza sativa
  Clone ID: PAT_MRT4530_49729C.1
cggtagacgactcccttaagggcgaaatggggaaccggaccccccccacaagttttaagtaaatagataaagattgtttgtagaaaagaagggtctctttatttattcgtaggagaaaaacattaacacgtgcgtagggtaaaaccaacattattcagatgggggatggatcgatcgaaacatgcacagtacatatcacttgcgtgcatgtgattatttaattaagataagcaggatgctgaaggcaggcagatgaggctagtagctagctctagccgatggtgggggtgccggcgacggtgtcgacgaagatgcggacgcggttggggcggaagtccatggtcaccggcgtccccaccggaaccacgacgatgtcggcgtcgggcatgtccttgaggatcaccttcttcgcctcctccgcccgcagccccaccacctccggccacgacgtcttcccctcctcgccgccggagctcatctcgccgacgacctcacacctccggacacgatcaaactgatgatgagctatcagcaattaatgtaaacttttgagagagtatatatgtagccggacgcgtgggcggacgcgtgggcggacgcgtgggcggacgcgtgggcggacgcgtgggcggacgcgtggggtcgtcttcatcatcgtcgccccgcgattcccgtgttgctttcgaaggtcggaggaggagaagaggaagaggaagaagaagaagaagggagcggagatgatcgaggtggtgctcaacgaccggctggggaagaaggtgcgcgtcaagtgcaacgaggacgacaccatcggcgacctgaagaagctggtggcggcgcagacggggacgcgcgccgagaagatccgcatccagaagtggtacaacatctacaaggaccacatcaccctcgccgactacgagatccacgacgggatgggcctcgagctctactacgactagccgacctgcctgcctgcctgccttcgagtatggccgatcgaatcgatctttaattatgatgaataattccgtcagggtttgtgtgtcttagaacatcttctggatatgatttggcttggtgtttgtgtgaacgatgtttcatactaatagaacgctactgtgagccgaatcacgttgatttgggggtgaattttttgttgcttcctgtttcctcgttggtgcttatatatctatacatatcaatccgtgccttagatcggaagattggtcgaaaaaaaaaaaaaaaaaaaaaaaaaaaaaaaaaaaaaaaaaaaaaccaacccc

SEQ ID NO: 46909 - DNA, 940 bp, Oryza sativa
  Clone ID: PAT_MRT4530_4972C.1
ttttttttttttttttaaaaaacacaattataatcttatggattaaaacttgggtggtgccacccagcatcacctccataacatggtttctgtctctgtgtttaagagaagttattagtattcatcaatgatcaatcccgttctcccaggaagtagaatgggagaactcaactctataaaaaaaacacatgtagctgttacaggatggctgcaccttctcatgaaaaataagaaacattgctaccaaaaaggaaaatgagaaggggattaacaatccgttgttattactacaaaagatacagcactgagagactggatcgaacccatttcgagcaacactgagagaatggatcaaacccatttcgagcagagcgtctgtattttcgatcatcaaccttgctggccatgcagttcaaggccgcagggagggagaggtgaagacgatcttggttacagatttatgctttcatctttcttttcttgctcttgctcttcttagatttggctttactggtggatttgttcttgtaatcaggagctttgtactccggtacatcacgaagacccagcttcgacaggacaagacaatatgaatcccagtcagttctacgcaggtacttgaggtacttcttcctcctttggaccatatcctgaagcccctttctcgaatgtttatcctttttgtgtagaacagttgacagatgcttgattttcacggtcaattgggcaatttgaactcgcgcagagccacagtcattttcagacatcttaaactcgtccctcaccctctggagctctaacttcatcttctcttccgacgacatgtggtctggatggaaatacctctctagcaactcctcctgtggaggatgctgcaagtattgcggcgttgccggcccaccaatgttcgccaaaaatgacaatccctgcatggatcttg

SEQ ID NO: 46910 - DNA, 190 bp, Oryza sativa
  Clone ID: PAT_MRT4530_49730C.1
atggaggcctctaacaagaagggcggccactacaagtggctcgatcacgatgagcgctaggttgtggcatatcactgaccttttgctccaccaactctttacttacttacaaaataagatatacccaaaattatttcattgactacaatatgattgacatcaatggaaatacttgctttctcaccataac

SEQ ID NO: 46911 - DNA, 189 bp, Oryza sativa
  Clone ID: PAT_MRT4530_49731C.1
atggagggggacccaaacgtgaaacggggcaacaaagggggagtagacgtccggggagacgagacgagcacggacggcgacaacggagaaccacggaaaacgccgctggtgggggggaacccaaaaaaggagggggaggcatcgcagccggcggccccgaaggcgagcaccgtcgggacccgggaatag

SEQ ID NO: 46912 - DNA, 4284 bp, Oryza sativa
  Clone ID: PAT_MRT4530_49732C.1
atgacgcgcccaggggaaccagccaacaggccggacagcatccagcgcgtcctgcccaggacatcggccatccgtgaggacgaaagtttcctttctcactccgcagcggtggtacaggttcctcatgaggacctcaatgttgtcgtcttcccaaaaggaggctacctggtcacctgcacctctcggtcgctcagggacatgatggttgcggcaagcccttttgctgtggaggacattgacctctcggtgctcccgtggtcgagacgcgtccaggcagagctggtcaaatggcgcttcagcattcgtgtctgctttgaaggcatccccagccacgctaggtcggcagagacagttacagccaagaacggagaacgagacagcttgcctctgcgcctggctgtgggtggacgatccagactccatcccaaggaggtgcacttcgagcttgaagaaccgctgtccccacgctccccagactcacgctgggacctggacggagaggctcggcagaggacttcccctcccaagctgctggcctacccggtgctcgtgcatctcgatcaggtgctcaacttcaacccaccgccaactgagccaacttggatgtatagtccagggagtcaggccagcggaatcatctcccctgtcttgatgacagaagaaatcccaaagcgtcatgattttatctggagcctcagcgtcaaggatggcactcttgcccctcagcctccggcttcccctagcccgggcccaggcagagatcgctcgcgctcacgttcccgctctccgccagcgagggagcgccgccgccccttgggttgggatgtccctcctgctcgcagctcagctttccccaggcgctcctcttccaggtcttcgaagaacataggtgggtcctacgggggtggtcaccgcagggcagcttgctctccggtctctcgggctgcccaatctcaaccttcccagttgcctctgatgatctccccagacaagcttgcagatttcctgtcccaggccttcgcagtggtgcagcctcctctgctcaaaactcccacgcgccaggtctccaagggaaagctcttgaagaagagcccgactcgtcttagccaggcgggccgcaagagtgctcggttggccaagaaggcagccgctcgttcctctccggccaagcaaggtgacctcgctcatgagctgctgatgaagaaggctggcctgctccctgaggacggcaagaagactgaggatgcaatggccaaatacgtcaagcttttcaagcagcctctctctcaggaggtcatggatgccttctctgctctggtggctggctgcgccattggtacaagaggaggtatcctgctggcagtgtctgactcaaaatactcgattgaaagtgtgcaaacaggtgtttactcgatcatggcaaatttaaaagaaaaagaagatggctcggcttggagcataacaggggtgtatggaccacaaccatacaatgaaaaaagagattttctggaggaactaaagcaaacaaagaacacagtaaatcaaaagtggatgatcttaggtgatttcaacctcattgtccaggactccgacaaaaataacagcaatcttaacaggggcatgatgcagtcctttagggcggctttaaacacgttggaagttattgaaataaaactaaatggccgtcgctacacctggtccagcgaaacagaaataccaaccttaacaaaaattgacagggtgttttgctcacatgagtgggaagaaaggttcccaaattgcttgctttcagctatctctacgatggtctcagatcattgtcctctgctgctaactgcaaacccttcggggcctaaatgcaaccttctcagaattcatatcaagttagcccgaacggcgaaagcactaagaaactggagcagatgcagagttaggagtctaaagttgagaatggagatagcttctgagctgatccttagactagacttagcacaggaagagcggaacctctcagctcaggagatccttttcagaagatcccttaagcagaagctcttaggtctagcagccctagacagggtgcgacttcgtcaaagatccagacaagtatggatcaaagcaagtgacgcaaacactcggttctttcaaatcaaagctagcgcgagaagaaggaaaaacttcatacaacacctcctgacagactccgggatggttcactctcatgaagaaaaaggacaagaacttttcaatgtttacaagcagcactccgctgtgatcaatccctccttacaggaacacaaccttgacctcgctgatctagaagcacctttctcagttgaagaaatcaaaagtgcaatttttcaatcccgttcagacaactccccgggtctagatggcttcacagagaatgctcttcgtgtcagtgaattcagactcataagcctcatccatgcatttgggaaactcttttcaaagctccttgcaaacaaattagctccgaaacttcaacagcttgtgtcccacaatcaaagcgctttcataaaaggaagaaacatacaggacaacttcctcttcgtcaacaacttggtcaaagagctccattcttccaagaccccggcaattctcctcaaattagacattgccaaagccttcgactcagtcagctggccttaccttcttgacaggcttaggacgctggggttcggtagcagatggctaggttggatctgctccattcttggttcttcttcttctaaggtcctcctaaatggaagagcaggtagcagtttcatgcatggcaagggcctacggcagggtgacccgttatctccgattctcttcattctagccatagacccgcttcaaaaccttcttgtggctgcacaggatgaaggcttgctgcagccccttcataggagaactgcccgctttaacatggctctatatgcaaatgatgctgtcattttcaccaggctggtcaaggatgagatacaggcagtgcaggctatccttcttcactttggacgagcaacgggaatgatcactaacctaacaaaaagtgaggtttacgccatcagatgcaaagatctagacctccaggatattctttcccccttcccagcccagttgaaagaattcccgtgctcctaccttggcctacctctgcacatcagaaagcttcggaggcttgatgttcaacccctaattgacagatttgctgctcgccttcctacctggaaaggaaaacttctcaacaaaacaggtagagcggttctaatcaagtctaccctctcagctttgccaacctatcacctcacggtgttccccctcaagaaatgggtagagaaaaagatagacaagattcgcagggctttcttatggacaggttctgagcaggctaatggagctcaggacaaactgtggcagggctcaaaccttccctgtgatgaaacagataagcaactcttcagggcctccaccatcatctccttaggaaatggtaacaaagccaaattctggcatgaacgatggctggaaggtaaagctcctaaagatattgccccatccttatttcagatcgcatccaggaaaaacaggacggttgcccaggaacttggcgataatcgctggcttcgtcagatgcggagaatgaacagcacggtccaagtcagggagttcatcattctttggcactctctgcagcaaattcatttgcaggatggcattgaggattccatatcatggagatggaccccaaatggatgctattcggctagctcggcttacaggatccagtttctaggaagtatacaggacaacagatcaactttcgtttggaaggccaaaacggaaaataaatgcaaattctttggctggctgatgattcacagaaaaatcctcactgctgataaacttcaactaaggggctgggataacagtgagatctgtcccctctgcggcattgaaccagaaacggctaatcacctactcatggattgtgccttcgcaagacaagtttggagctccatgtggaacaagcttggcctacacatgccttcaccctctctttttccggggcgtttgctagattggtgggaggcttgcaggaaggagctagttaaggaacaaagacgtaattttgatggccttttcatctacactgcctggggcatttggctgcaaagaaatggaaggattttcaatgacatttacaactcggtagctcaggtcgttaatttcatcattgctttgtgcaaagagtttgatgaagcccttagttcctag

SEQ ID NO: 46913 - DNA, 3720 bp, Oryza sativa
  Clone ID: PAT_MRT4530_49733C.1
atgtcgcgcccaggggacccagccaacaggccggacagcatccagcgcgtcctgcccaggacgtcggccatccgtgaggatgaaagtttcctttctcgcaccgcagcggtggtacaggttacaggcaatctcccagtgacgaacatgagacagatcaacaggttactggcgtccaggtttcaggttcctcgtgaggacctcaatgttgtcgtcttctccaaaggaggctacctggtcacctgcacctctcggtcgctcagggacatgatggttgcggcgagcccttttgctgtggaggacattgacctctcggtgctcccgtggtcgagacgcgtccaggcagagctggtcaaatggtgcttcagcattcgtgtctgctttgaaggcatccccagccacgcttggtcggcagagacagttacaggactgcttgatgaaggatgcttgatccaggaccttgatgagccaagaacggagaacgagacggcttgcctctgcgcctggctgtgggcggacgatccggactccatcccgaaggaggtgcacttcgagcttgaagaaccgctgtccccgcgctccccagactcacgctgggacctggacggagaggctcggcagaggacttcccctcccaagctgctggcctacccggtgctcgtgcatctcgatcaggtgctcgacttcaacccgccgccaactgagccaacttggatgaatagtctagggagtcaggccagtggaatcatctcccctgtctcgatgacagaagaaatcccaaagcatcatgattttatttggagccttggcgtcaaggatggcactcttccccctcagcctccggctttccctagcccgggcccaggcagagatcgctcacgctcacgttcccgctctccgccagcgagggagcgccgccgccccttggggtgggatgtccctcctgctcgcagctcagctttccccaggcgctcctcttccaggtcttcggagaacagagtgatgaaggatggcggcttccagctgtctcgccccccttctacatccccacaggacccgatcacccaggccacccctcttcaggccaaccagttcgtgatggaggctgaccctatgctggaggagctggtagctgaccaggcgtcccagtccgccgtgctggccttcgcggcggtgcagcctcctctgctcaaaactcccacgcgccaggtctccaagggaaagctcttgaagaagatcccgacccgtcttagccaggcgggccgcaagagtgctcggttggccaagaaggcagccgctcgttcctctccggccaagcaaggtgacctcgctcatgagctgctgatgaagaaggctggcctgctccctgaggacggcaagaagactgaggacgcaatggccaaatacgtcaagcttttcaagcagcctctctctcaggaggtcatagatgccttctctgctctggtggccggctgcgccattggtacaagaggaggtatcctgctggcggtgtctgactcaaaatactcgattgaaagtgtgcaaacaggtgtttactcgatcacggcaaacttaaaagaaaaagaagatgtcttggcttggagcataacaggggtgtatggaccacaaccagacaatgagaaaagagaatttcttgaggaactaaagcaaacaaagaacacagtaaatcaaaagtggatgatcttagatgatttcaacctcattgtccaggactccgacaaaaataacagcaatcttaacaggggcatgatgcagtttgaaaaatactggataaggctcccaggattccttgaaactgtgcagtctgcctggtcaaaaccggtccactcgcctgatgccctgaaaagaattcttatcaagttagcccgaacagtgaaagcactaagaaactggagcagatgcagagttaggagtctaaagttgagaatggagatagctactgagctgatcttcagactagacttagcacaggaagagaggaacctctcagctcaggagatccttttcagaagatcccttaagcagaagctcttaggtctggcagccctagacagggaacacaaccttgacctcgctgatctagaagcacctttctcagttgaagaaatcaaaagtgcaatttttcaatcccgttcagacaactccccaggtccagatggcttcacaggtgcttttttaaaaaatgttgggacatcattcaggaagatatcacgcaggctatggcttttgaattcagcctacattgctttgcttccaaaaaaagagaatgctcttcgtgtcagtgaattcagacccataagcctcatccatgcatttggaaaactcttttctaagctccttgcaaacagattagctccgaaacttcaacagcttgtgtcccacaaccaaagcgctttcataaaaggaagaaacatacaggacaacttcctcttcgtcaacaacttggtcaaagagctccattcttccaagaccccggcaattctcctcaaattagacattgccaaagccttcgactcaggtgacccgttatctccgatgctctttattctagctatagacccacttcaaaaccttcttgcggctgcacaggatgaaggcttgctgcagccccttcataggagaactgcccgctttaacatggctctatatgcagatgacgctgtcattttcaccaagccgatcaaggatgagatacaggcagtgcaagctatcctccttcactttggacgaacaacgggaatgatcactaacctaacaaaaagcgaggtttacgccatcagatgtgaagatctggacctccaggatattctttcccccttcccagcccagttgaaagaattcgcgtgctcctacctcggcctacctctgcacatcagaaagcttcggaggcttgatgttcaacccctaattgatagatttgctgctcgccttcctacctggaaaggaaaacttctcaacaaaacaggtagagcggttctaatcaagtctaccctctcagctttgccaacctatcacctcacggtgttccccctcaagaaatgggcagagaaaaagatggacaagattcgcagggctttcttatggacaggttctgagcaggctaatggaggccactgtctagtcaactggaagagggtttgcagaccaaaagatttagggggactcggcattactaatttggaactctttggtcgtgcactcagactgaggtggttatggtatgattggacagctcaggacaaaccgtggcagggctcaaaccttccctgtgatgaaacagataagcaactcttcagggcctccaccgtcatctccttaggaaatggaaacaaagtcaaattctggcatgaccgatggctggaaggtaaagctcctaaagatattgccacatccttatttcagatcgcatccaggaaaaacaggacggttgcccaggaacttggcgataatcgctggcttcgtcagatgcagagaatgaaaagcacagtccaagtcagggagttcatcattctttggcactctctgcagcaaattcatttgcaggatggcattgaggattccatatcatggagatggaccccgaatggctgctattcggctagctcggcttacaggatccagtttctaagaagtatacaggacaacagatcaactttcgtctggaaggccaaaatggaaaataaatgcaaattctttggctag

SEQ ID NO: 46914 - DNA, 339 bp, Oryza sativa
  Clone ID: PAT_MRT4530_49734C.1
atggatccggccatgagctcaccgaatccggccacgagctcgctggatctggcagcggcggatttggcgagcagtgacacgaccacaacggtggcggtatgcacggcaagggttcatggaaccacggttcccactaccatgggtgctcggctccgacgtggaggcttagaccacatgatagggtggaacgttgtacatggccttatatcaccacagacctacaagtttcatactcaggcaaaagcacctttctcagcaaaacaggcagaaacatacaggcaaaagcacctttcacctcatagaagcacaagacctgaaaggaggcaacttaagccatga

SEQ ID NO: 46915 - DNA, 255 bp, Oryza sativa
  Clone ID: PAT_MRT4530_49735C.1
atgggcggaggcaacgacgacaccgtcttcttcacccacctcggcggcgccgatgaggtgaatgcgacagcatcagtgacggcagtggtgctagaaaggaaggcccctcttctcccatctcaccgccgctacccctcttgttctctggccatcagacttggtggagtcgccgggccgcaccacgtcggaagggcacgaggaggcggggacatgacctctacaacatgccgctttcctcaccctaacaaaaactga

SEQ ID NO: 46916 - DNA, 270 bp, Oryza sativa
  Clone ID: PAT_MRT4530_49736C.1
tatggttactgtatgcaattcattaatgatgttttgcaatcattgtaatcatgaactaagcagaggtttcatttacatgttttcagtggtagaatgtgtatattatcatttgaagaagcatttatgggccttcttacagatataatggttctgctgctgacgctaaaacagtggattgacagtcaatagcccattagtttgcttaactgaagctacttgtgaacataacattacacaaaatagtccacacaatctggtagaggacttcat

SEQ ID NO: 46917 - DNA, 4266 bp, Oryza sativa
  Clone ID: PAT_MRT4530_49737C.1
atggaggagctagtagaagataacggatggccgctgccggcggcgatcgccagggtggtcggcaagctgcgtctccacctgggaggcagcagcgacgcccacaagtacaggggcaccatgaagatgctcgatctgctggaggacaagctcagcatcctccgcggcgagagcctgcagggcgtcgacgccgacagggaggaagaggcggccgcgtggctgcggcaggtgaaggaggccgccgacgaggcggaggagctggtcaacgccatggaggcttccgcggcggccgcagcttccgatagtagcagcctcctcctcggggtgaagtacaccgtcggcaagctcgtcagcgcgtgctccgaggtcgaatcgcttcttcccgtgccgggcctggacgaggatggactggaaaccccgggggatgacgtcgccgctttgccccctggccctgaccaaccctttgttgttgggcgagatgaggaaataggtgtcatattggagatgatactggatgatgcccgtttcgtggcggatgaatcggttgaggagagggcaagtgctgatggatcacagatttctcggaaaggatggatcatcgatgccctccggagcatagatctatctgaccagagaaaccaacctgcagaatcagcagcagcataccagaaagaaatgggcagcagagtgaaatacaccagggtgcagagcagcactgtcagttcaatgtgcaatccaactgtcattccaattgttggagtgggtggagtggggaaaacagctcttgctcagttcatcttcgacgacgaaagggtgcgggagcacttccgcggtaattccgcatgggtgtatttcactgacaacatcaggaaagaagaaccgatggcgcagatctttgtatcgatgcaacctgagcataatatgctggaccatgctttcagtctaaacagcctccgtgtccaacttcagagcgtcatagaaggcaagaggttcttgcttgtgcttgatgatgtatctgatgagatacgtgcaatgtggggcgatttaaggagtgcactgaagaagggagcacctggaagtgttgtcttagtaacaaccaatctgtatagtgtggccagctttgtgggaactacaactccagtatttttggattatctacattatgatgacctgtggaagctttttaagcatcatgcatttgccagttatcaaagtacagaagctctagaaccaattggtagaaaaattgtagataaagtacatggatctcctttggcagcgaaattcattggggcatcattaagaaattgtttggatgaagcgtattggaagagagtcttagaaagttggtggtggaatgtttcaagctgcagcttcgacattcacataatatcatctttcggaatttgtcacagtgaattacctgcatatttgaggcaatgcctggtattttgttcaatctttcctagaaattatttatttgaaaaatatgagttgatccaaatgtggatagctaatggttttgttgaactggacaacactactgttgcaagaaaactggaggatgtagctggtgaatggtttgatgaactagtcaataagtgcttcttacaaccgacagtttggaaagcttggtatattatgcatagttgggttagagactttgcaatcgccttatcttctaatgaatatcagggtgttgattgtacaatgggaaatctcccacgaagtgtacgtcacttgtccgtagatatggatgctatgaatataccatggaccgagtatagcattaaacagttgcgatcattaatattattcggtggcttccgtcataacaactctagcaaaggtttcaacaacatttacaacattttggagggcagttatgatgctgctgatagcatttctgagaggtcttataacactactgacaaggacactgctgataacatttctgagtggtcctctttcagttttgatgatggggaagttgatatcgttgctatcattttgaaaaggtattgtgacattattggtagcattctaaataggtcaacaagcttgcgcttgttgagcttatctaacttgagagcaaattcagcaacagcatgcattggtgattatccacttgaagaagatggcattgcacaatttgtggagttcaccacaacacatcagatgctgccctatttgactcacctcagatacttggatttttcacacagtgggataaccaaactccctgattcattatgtagcttgtgcaatctccaagttcttggtttgagaggttgtagattcacacaattaccaagaagaatgaactcactagttggcctacggcacttgcatgcagatgcagatacggttgctttaattcatggcattggacagcttaccaggctccaagacttatatgaataccgtgttaaagcagaggatggtcacacgttaattgagttaaaggacatgaggtatatccaagggtccctttgtatatcagatctacagagggtggctaatcgagaagaggcaattcaggctaacttaggaaggaaggagtatgttacctgtttagctctgaagtgggatagaaatcagtcttctagaggtaaatataatctatatggaaaggagttgagtcaattcgacagaggtcaaaagcagccacttcaagctagcttagttgagaagaattatacttcagatatatcaggatatctgatgaatccaccagaggtaattaaacctgatcaagacatggagatattagagtgtttgtccccaccaagaaatctgcagacgataaaattttttggctacacaggtttggcttttccagattgggtcgtacaactccggtatataaaagttattgagataagccattgtacagaactccaggtgcttcctccttttggacagcttgagcatcttaggaaactaattttgcatgagctgccctccatgaaggatgttagttctgatgtctatggaacctcaaatgtggcctttaaatctttggaaatcctgtgttttgagtctatggggaagttggaaaattgggcagattcacagaacgaagaaagcttttcaaacctgcaaaatctgcagattaatagatgtgataacttgagggaactacctttgatgtccttgggcttagctatcagaaaactctctcttacgggttgtggatcatatgctgaaacagtcttcaggtatttgcaaaaactaactagcctcacacacttgagcataaatgattgctcccagaagttaatccttccatgtcaaaacctgatatcattggagaatctgcatctttcaaattgtaaggagctatactttgagggtggaattcttcgtcttaacaaccttaaaaatctacatatttctggctgccgcaaaatcatatcgacagttgaggaagagattaaccgactgttttctaactgggaaataaggttgggcaaagaccagtcacttgttctcaaaagtggactcctcaatatagccaaagagctgggtacaaaaaggagagaactcccccttcccggttctccgcaaaaagaagaatttatgcatactttacaatatctcactgaccttacaatggataacctttcccagtcttcagatcttgataattttctttgcaagctttcagcacttcgaactctgtgtctccacaagatcgatgtgatctctcttcaccaagagaagtggcttgagcagattacatccctacaagagcttgagttctcttgttgctacctgctaaggcagctcccatcaaacttggtcactctgtcatccctgaagaagttaaatatgcagtcatgtttccaaattcactcgctaccattgaaaggcctaccaggtaacctaagagagttacaaatattaggatgctcacctatactagaggcacgatgccagaaggaagatggagagacatgggtgaagaagaagagaggggaatggcataaagagacgataaacgagtaccgacagaagaaaacatgtgagttctgggaagggtggttaaagtatgaggaagagtgggtggagagtgctacagatcatctgaacgataagggagagtggttagagaatgaagaagaggactggctgaagaataattcagatgaactggaaaataatgaagatgtgtggctcaagagtaggggcgaagactggccaaagattgctcatattccttatatccgtgtgaatggagatattatacagaatttttatctgtga

SEQ ID NO: 46918 - DNA, 3279 bp, Oryza sativa
  Clone ID: PAT_MRT4530_49738C.1
ggaattcggacaggtaccacctatcagaattcagagcactggggtttgcaactatttattggtccttctggatctcggagaaaccctccattcgtttgctcgtctctgaccaccattggttcctgaaattgagtcatggctgccaagctagctcgcctccacagtctccgcgaacgcctcggtgccaccttctcgtctcatcccaatgagttgattgcactcttctctaggtatgttaaccagggaaagggaatgctccagcgtcaccagctgcttgcggagttcgatgccttgatcgaagctgacaaagagaaatatgctccctttgaagacattctccgggctgctcaggaagccattgtgctgccgccctgggttgcactggccatcaggccaaggcctggtgtctgggactacattcgggtgaatgtaagtgagttggcagtggaagagctgagtgtttctgagtacttggcattcaaggaacagcttgttgatggacacaccaacagcaactttgttcttgagcttgattttgagcccttcaatgcctccttcccgcgcccgtccatgtccaagtccatcggaaatggggtgcagttccttaaccgtcacctgtcgtccaagttgttccaggacaaggagagcctctaccccttgctgaacttcctgaaagcccataaccacaagggcacgacaatgatgctgaatgacagaattcagagccttcgtgggctccaatcatcccttagaaaggcagaagaatatctgatgggcattcctcaagacacgccctactcggagttcaaccacaggttccaagagctcggtttggagaagggttggggtgactgcgcaaagcgtgtgcttgacaccatccacttgcttcttgaccttcttgaggcccctgatccggccaacttggagaagttccttggaactattccaatgatgttcaatgttgttatcctgtctccgcatggatactttgcccaatccaatgtgttgggataccctgatactggtggtcaggttgtgtacattttggaccaagtccgcgctttggagaatgagatgcttttgaggatcaagcagcaaggccttgatatcacacctaagatcctcattgtaaccaggctgttgcctgatgctgttggtactacatgcggccagcgtgtggagaaggttattggaactgagcacactgacattcttcgtgttccattcaggagtgagaatggtatcctccgcaagtggatctcccgttttgatgtctggccattcctggaaacatacactgaggatgttgcaaacgaaattatgagggaaatgcaagccaaacctgatctcatcattggcaattacagtgatggaaaccttgtcgccactctgctggctcacaaattaggagttacccagtgtaccattgctcatgccttggagaaaaccaaataccccaactcagacatatacttggacaagtttgacagccagtaccacttctcatgccaattcactgctgatcttatcgccatgaatcacactgatttcatcatcaccagtacattccaagaaattgctggaagcaaggacactgtggggcagtatgaatcacacattgcattcacccttcctgggctttaccgagttgtgcatggcatagatgtttttgatcccaagttcaacattgtctctcctggagctgacatgagtgtctacttcccgtacaccgaggctgacaagaggctcactgccttccaccctgaaattgaggagcttctctacagtgaagtcgagaacgatgaacacaagtttgtattgaaggacaagaacaagccaatcatcttctccatggctcgtcttgaccgagtgaagaacatgacaggtctggttgagatgtatggtaagaatgcacatctcagggatttggcaaaccttgtgattgtttgtggtgaccacggcaatcagtccaaggacagggaggagcaggctgagttcaagaagatgtacggtctcattgaccagtacaagttgaaggggcatatccgctggatctcagctcagatgaaccgtgttcgtaacggggagttgtaccgatacatttgtgacaccaagggagtctttgtccagcctgcattctatgaagcgtttggtctgactgtcatcgaagccatgacatgtggtttgccaacaatcgcaacatgccatggtggccctgctgagattattgttgatggggtgtctggtctgcacattgatccttaccacagtgacaaggctgctgatatcttggtcaacttctttgagaagtgcaagcaggattcaacctactgggacaatatttcaccacgggaggtctgccacgaggatttacgagaagtacacctggaagctgtactctgagaggctgatgacccttgactggtgtatatggattctggaagtacgtaagcacacccttgagaggcgccgaggactcgcccgttacacttgagatgttctatgctctgaaataccgccagcctggccagcgcccgtcccacttggctgtcgatggagagagcacatccacagtaatggaggggaaaatatgcatcttcacgccacggagaagccgtcagctgcattcgaatttgataattttctgtagttgtcactttggcatccactgtttgccactggatgtgtactatgtctaaggtttcagtaccttttgccgagattttgggcacgtgcttgcctcaaataaacgccggttcctggtgtttatcgttcagaattcaatgcaatgttttattgccgcgcttcctcaatctgtcatgttgaatgaccactccctagtgccctactgttaaaaaaggttggttcaaagccatggatgaacccaacatttttgttaccttgttcttttcagaatttccttaagagttgtgatagtaggcccagtgcgaccaaaatgttgggttccttgagttttcagtataaaatttctgatattaaatgcagatcttggctcagtacagagtcttgcaaaccatgtggttgcatcttttctactgctgtagtagatgaaactgaagatactacttattactctttagacaaagtttcatcatattcccaaaatcttggtctaggattgggagacatcaagaagatataaacttcacactcaggccctgtttggcaaccctgaataattttcttttgtgtaatgcaaatgcacctgtaaatttgggtgacccaaagatgccagtgaaatataaatcccatgtagcc

SEQ ID NO: 46919 - DNA, 264 bp, Oryza sativa
  Clone ID: PAT_MRT4530_49739C.1
atggagctcctccaacttctcctggaagataatgtggcctttctggaggatgatgtggacaccgtttccattcaagatgagataatgaatgatgttctccaaagggaggtggtggtggtggtgcaggaaaagatggacaatcaggggattgaggtggagatggagttggcaaacattcttttgggagaggtggaggagggggaggtggtggtggtggaggaggaggtgcggtttttatatgggatagttgatgtaaagctgtaa

SEQ ID NO: 46920 - DNA, 897 bp, Oryza sativa
  Clone ID: PAT_MRT4530_4973C.1
atggttcaacagtgtgaagcctgtcaattccacagtaaacacacaaagctgccagcgcaagcactccagactatccctttcacttggccgttatcgtgctgggggctagatatactcaggccattcccacgaggacagggcggctacaggttcctattcgtggcgatcgacaaattcaccaagtggattgaagcgacacccacgggggaaatcaaggccgacaacgccatcaaattcatcaaagggatattctgcaaattcggattgccccaccgattactgcatcaggctgggagtcaagatctgcttcgcctcggtttctcaccctcagagcaattgacaagtcgagagggcaacggcataatactacaaggaatcaagacccgcgtctacgacaggctcatgtcacacgacaagaattgggtcgaggaacttccatcagtactatgggccgtgcgtaccacaccgacaacgtccaacaaggagacacccttcttcctcgtgtacggctcagaggcgatgctccccaccgagctacgacatcaaagtacacgagtacagaagtattccgatgaggatcaggaagagcagcgatacgacgatgtgaatctactcgaggaacatcgcgaacgagttgccgttcgagcagccagctaccaacaagcccttcgccgttaccacgagaagcgcatccgagcacgcatgctttcgatcggcgactacgtcctccgacgggttcaaagccaagcagggcgcaacaagctctcacccaaatgggaaggaccgtacacgatcacgcaagttttgcggccaggtgcattcaaaatcgcagatggcgatggtcgcgagttggcaaattcctggaacattgatcaattacgtaaattctatgtataa

SEQ ID NO: 46921 - DNA, 679 bp, Oryza sativa
  Clone ID: PAT_MRT4530_49740C.1
gatcccccgggctgcaggttggagtctatcaggcaggaggagaggaggtgtcccgcctcgtcgaggccatcgccacgacatcgcctgctacagccagcatcggcatgacccagacgctagcggcgctcaataacgacatcatcgcgagggcggtgttcggcggcaggtgccaacagcaggactacgttacctccgtgtgctcaaagtggtggcgacgctggcggggtcgttcaacatggttgacctgttcccgtcgtcgcgtctggtgcggtggctgagctgcgtcgagcgccgcctgagggagcaccatgcccagacggtaagaatcgtggattcaatcattcaggaccgcaaggagaacgaggcgagtgcctcccctggcgccagcgctgaggacgacgataacgacgacctgctcgatgtgctcctgaggctacaaagggaagacaacctcaccttccctatcaccgcggagatcatcggcgccctcatctctgatatttttggagctgctacagatactacaggttccacgcttgaatgggctatggcagagctcatgaggaatccaatgacgatggagaaggcaaaacaagaagttcaaaacgcacttggccaaggaagagccatggtcaccggtgctgacattggtgacctccactagctacagatggtcatc

SEQ ID NO: 46922 - DNA, 858 bp, Oryza sativa
  Clone ID: PAT_MRT4530_49741C.1
atggtctctttgggaaacctacgcgatctgcacggtgacatcgtcgagagggcaacactggcgcgagatctcttggtacccatcacgagccagctgatctccgagggtggggatatgcacagcctccatcgtcgatgcgttctggcccaaggtctcgattttattttccagaaactcgatgacctgcaggcggacatggtggcgttcggcgccatcgaggcgatcaccttgtgcgtgatactagacaacacggtgattgtcttcagggacgaagacagcgtcgcgatcgcggtccataggcaggaagaggcaaaacacgggctctactttgcggttccgcctctccacctcgctcttccaatatgtttcatcaaacccgaaattatcgaggtcgctctatatccatcacccccatcaagcgaaggaaccatagggccaacatatgacgcagaagctagcgcggcaagagcaatggtggagctaaacatcgggctctgcacaatatcaatgccgttgtggatgcggccgaggcatgtgattgtgtccaacgagaacctgaacctgctgagtcctcctacgacgacgaccactcgccatggagatggaggtcaagggccatcacccaagaccattattgacaccgagtttgtgctgtccaccaagtcgacactctacgggccgaggctaggaacggacggtcacctgtggatggatggaggcactatcactcgctatacagggtacacagaaatcgatggagcatccgtacgagttgttcaattgtctccaccaaattattggatggcgatctcggagccaatgaagatggtggcaaatactaactccgacccaatataa

SEQ ID NO: 46923 - DNA, 401 bp, Oryza sativa
  unsure (1)..(401): unsure at all n locations
  Clone ID: PAT_MRT4530_49742C.1
gaaaccaaataagttggccaatctcatgttacttggccgntaatactagtactactccgtcgagtacacaatgaatgattcactgctatctagtttgtggttctaataaatcgaatacattatactcttcatatgttccttgtataaacctgtttgtttgtggttctgtgaatcaaatgccatatacatgacattcgtgtttgtgctcctcatcttgcaatttcatagcaacatttttctactcagtatgcctagttgtcatggtgttttcacttgctgaattgcttttctacatatttttggctcttcttgtactgtatgttcagacttgcctttaacatggataattgaagtattgaactaacatgaaaaatgtgatgtcctatgcttcttgatcaaca

SEQ ID NO: 46924 - DNA, 273 bp, Oryza sativa
  unsure (1)..(273): unsure at all n locations
  Clone ID: PAT_MRT4530_49743C.1
tgcgcctccgccgccgccgccttcttcgtctgctgagttcgtagatcagctcgagctcgccgccatgtcgtccagcgaggtcgcctgcacgctngncgccctnatcctccacgacgatggcatccccatnacctcttgagaagatcgccaccctggtgaaggcggtcaacatcaaggtcgaggcctactggcccggttctnttngtcaagctcctngaggcaaccggaagcgtcgantgaacctgaatncttgttncgtggggattcttgngt

SEQ ID NO: 46925 - DNA, 273 bp, Oryza sativa
  Clone ID: PAT_MRT4530_49744C.1
atgatggttgtgacggttggaatggtcggtaataccctccaaccatcattggggcttcatctcaaccgtccagccaaaacctggatccaacggaggcgagggaggttaggcccggcccaaccagcccacctttcggctggcggcctcctctgttgctactttatgtagacttgtgaattttgggacccaatttgacgtgttaattctgagttcttggcctattcatgcataagtctgattctcgacatcgtccgattgatttatcgcctgagt

SEQ ID NO: 46926 - DNA, 1326 bp, Oryza sativa
  Clone ID: PAT_MRT4530_49745C.1
atggcggtggcggtggcggcggcggcggcggtgagcaggcaatggacgagggtgcggacgctggggcgcggggcgtccggggcggaggtgttcctggcggcggacgacgcgtcgggggagctgttcgccgtcaagtccgtgggcgcggcgggcgcggcggcgctgaggcgggagcagggggtgatggccgggctgagctcgccgcacgtcgtcccctgcatcggcggacgcgtggggcgcgacgggtcgtaccagatgttcctcgagttcgcccccggcgggtcgctcgccgacgtggcggcgaggtgcggcgggcggatggaggagtgcgccgtcggggagtacgcggtggacgtggccagggggctcgcgtacctccacgggatggggctggtgcacggggacgtcaaggcgaggaatgtcgtgatcggcggcgacggccgggcgaagctcgcggacttcgggtgcgcgaggtgggcggattcgggccggccgatcggcggcacgccggcgttcatggcgcccgaggtcgcgcgcggggaggagcagagcccagccgccgacgtctgggcgctcggctgcacggtcatcgagatggccaccggccgcgcgccgtggagcgacatggacgacgtgctcgcggcggtgcaccggattggctacacggaggccgtccccgaggtccccggttggctgtccgccgacgcgaaggacttcttggccaggtgcttgcaacggcgccccattgaccggagcacggcggcgcagctgctagaacacccgttcgtcgcctccgccgccggcgacggcaagccggaggccgcgaagtccaaatgggtgtcccccaagagcaccctggacgccgcattgtgggagtccgacaccgacgaggaggaagacgacgagctgtcgcagagcacggccgagaggatcggttcactggcctgcgccgcctcgtcgctgccggattgggactccgacgacggctggatcgatgtgatctccacccctaccgaagaatcctgcgagaccaccacctcgccggccgacgaggagacgacgactgacctcaacggcgacatcagaaccgcagaattcgagcttccccacattgacgtggacagcggcaatggcaacaccacccacaatgtgggagaagccaatgctcagcacattatttccccttcgaatttagttttcgatcaagtactatgtaaaacaccattttgtaacaaacacattgcaattgaattcataccatgttttctcctcacaaatgtttttctccccctttcgctgctctgttcatacgctcctcacccttag

SEQ ID NO: 46927 - DNA, 249 bp, Oryza sativa
  Clone ID: PAT_MRT4530_49746C.1
atggggccgaaaagggttcggccgaaccccaccagggacctaaccgattggctccaaaatcgcaggggaacctggaacaactacaaggggttgagcccatacaacgtttaccccttccattgtgtattcttccaccggaatgagttgattccccgcaattttcatttttcttcattctcctgctccttcaaagttcatgttctagtttctgatggcccaatatgctctgtgctcgagctctacgggtag

SEQ ID NO: 46928 - DNA, 483 bp, Oryza sativa
  Clone ID: PAT_MRT4530_49747C.1
aagggggcgattgccccgcttctttctccccccgggggaaagggcaggctctgcaaaaggtcgtttaagtgaaagcctttttggaaagactgtggttttcgatggtgtcccttcgcccaggacatattgatcattccacacattatgctgtcttgaagaaagcagagcgtgaaggatgccaatatatcgcatcagacacgctacgcttcgtcaccacttgcagggaaaactcagtatcgtgccgccgtgatgtagtggctgagcgtatcgcatctcaaggacaagcccgaacctcaaagacacagggagagagccgtccttcactcctagattcacccaatactaccgattatcgatggagtcgaaacgagacttcaggagtaagtattgaaaatagtatcgcgtagagtaaataaacccacaagtagacactggtgtgatctatcaatacagtacgaataagttacattctaaaaaaaaaaa

SEQ ID NO: 46929 - DNA, 941 bp, Oryza sativa
  Clone ID: PAT_MRT4530_49748C.1
ttcggcacgaggaaacgatagacgcggaatccccagttccccacccccaaccctatctccaactcctagccgccgccgtgctcttctcgcgactccgcgagccctagccgcgcctcaccgccgccgccgcccgctcgcccgcccgacgaaacctgcacgtcgactccgcgcttgtaagcgctccggcgagcgtctggtttgagggttccttggcgcctgtgcgtgccggtggcagtcctgagcgccggtcaactctcagccgtctacatgggctcggcggccggcgccgggtgcgtcggtggccgcgcgcgtttgtcgccgtccatccatggatgatccataccccgggctagatgatccgtccggagccagatcgacttgggacttggccgtagacggaagtttgccggtctatcggcgctgactcggtctcacggccaaggatattatcaggatgatctgttgaaatcggtggctggctcagctccctataggcgagacgatgccaggggcttcggctggcaccgttgccggcggttgcatccgccgcaaatcggctcccggcgatggtattgcggtgatgagtttaacggagaagactagatctaagccatctggactacccgcccggtctacccctctctgccgagctaaccgtagaagggagattcagttccagtatttggcaatgcactcctactcaacaagtcgcagggtcatacgtttcacaatttgggttcgacgagatgatgttctccctttcatctggctatccatgttatcagccatggcaggaggcgttgtgctcaagttttctacgtgtttattattacaatatatgtatttttctcatcttcttcagaagaaaatttatcgactacactaatggtaatgggtgacactctgtttgggtctactgtggaatttattgttttgatgat

SEQ ID NO: 46930 - DNA, 471 bp, Oryza sativa
  Clone ID: PAT_MRT4530_49749C.1
atggcgccaacgctgccgtcgtggtggttgctcttcctcctgctcctcggagttggcgccaccgcggcggccagaggcagcaagaagctgactcccccggtgtcgacggcgtacgagtggccggagcggttccacgcggtggtggtgtcgatcaacctgaccaaccacgaccgcggcggcgggcggctgcagctaatcgagatctactacgactggccgcatggccgcgaccttaacatcgtcagggaccagctctccggcgatccaccgctgtacaacgtggagtgggtgaatggcacctcctacctcttcgacaccgccgcctccagctgccgcaccttccagttccccgtcggcatcctgcctcgatcgggcgtgacaccgtggacgccgacgtcgccactggccgccccgtccgctggatattcaacggcaatacgcggcatgtgctcgtgttcgaagccggtgtaa

SEQ ID NO: 46931 - DNA, 1143 bp, Oryza sativa
  Clone ID: PAT_MRT4530_4974C.1
aaaaggttttataaaaagaaaaaccctaaaataagtccttttcccccccttcctctcttgggccggcccggcccaactccctccctctctctcctctcccccgcggcccatcggcctcctccccgcgcgcgcgccgctgacgggcgggcccgcccgccaccctcgctgacgggtggggcccacctgtcatcgcctacctcgcgccgcgcccgccgccgcccgtgccctagcgccgccgccgccgccgaatccgccgcatcccgccgtccccgcgcgccataaagagggggaaatcactccccgtgattccctccctctttccccccactttcccctctctctctccctcggattcgctcggatttaatcccgcaaagttcgccggcgcatcaatggagcccgagatcgccgcgccggtttccttcctccccggccgccctctctccctcccgtccctatataattgttccccgtgcctcactcctccgtttccgccactcgccgctcgctctttccgtcggattcgtgctcgcgccgttgtactctctctccgccgtcgccgccgagctccggttcgccgccgtcgtcgctccggacctcctcccgtctcggcgtcacctccttcggcttcgccgcgtccccgtcaacctcgtccaccccttcgtttcgcccgccgaccgtcggagcgccgccgtcctcgtcgatccgaaccgcgccgccatcttcctccgctccgatcgtcgtctccgccgccctcgtcgtcccggggtgagccgaggaccgcccgttcgcttcccccttccctcctctctctcgggtgccgctccgccgcgccgttggtcgccggcggcgaccatcggggcgcgggcgcgccgcctcccgtcggccgtgccggcaaggccgccttcgggcgcgccccgcggctgccaggtggggcccggccgtcagccgcccgcgcccgcgggtgcggctgacgcgtgggacccacggcgccggccggcgtcagccgcgtgcgcccggtccaccgtggaccgagaggctgacgcgtgggccccactcccgtggacccggtccgcgcgccctctctcccggctgacgcaataaatccgatttttaattaaaatttaaatgaagaaattcgca

SEQ ID NO: 46932 - DNA, 410 bp, Oryza sativa
  unsure (1)..(410): unsure at all n locations
  Clone ID: PAT_MRT4530_49750C.1
aaccagaaccgaacagagagaacccaaagaacngcacgaaccaagaaaaagagaagagaggggaattcccaggcgtacacgggcgccaaggacatgagggtggacccgatcacccaaagagccgaggccgaagagcacgggacgcgcgggggctgtggtgaaaacaacgcaccaactccccaccaccgagcgcggactaacgagcgcctacttcacgaacttccctcccgcgcatccgctagccagacaccaaaacggtccaggacaccacgcgcaaccgggacgggcgcacaaatactctcaaggaggacaagaggcacagcaagttcgacctgacgaacgagaacaggcccgacttcagcagcggcaaagggctgcccgaataggaggccacccaagcccacgacccc

SEQ ID NO: 46933 - DNA, 1892 bp, Oryza sativa
  Clone ID: PAT_MRT4530_49751C.1
gatcaccggacgcgacatctacgacgtgctggcggcgatcgtgccgctgtacgtggcgatgttcctggcgtacgggtcggtgcggtggtgggggatattcacgccggaccagtgctccggcatcaaccgcttcgtcgccgtcttcgccgtgccgctcctctccttccacttcatctccaccaacgacccctactccatgaactaccgcttcctcgccgccgactcgctccagaagctcgtcatcctcgccgcgctcgccgtctggcacaacctgctctcccgctaccgccgcaatggcggcgccgccgcgtcgctcgactggaccatcaccctcttctcgctgtccacgctgcccaacacgctggtcatgggcatcccgctgctccgcgccatgtacggcgacttctccggctcgctcatggtgcagatcgtcgtgctccagagcgtcatctggtacaccctcatgctcttcctcttcgagtaccgcggcgccaaggcgctcatctccgagcagttcccgccggacgtcggcgccagcatcgcctcgttccgcgtcgactccgacgtcgtctcgctcaacgggagggaggcgctgcaggcggacgccgaggtggggcgcgacggccgcgtccacgtcgtcatccgccgctccgcctcggcctccaccacgggcggcggcggcggcgcggcgcgctccggcgtgtcccgggcgtacggcgcgtccaacgccatgacgccgcgcgcctccaacctcaccggcgtggagatctactcgctgcagacgtcgcgcgagcccacgccgcgggcgtccagcttcaaccaggccgacttctacgccatgttctccgggcagcaagatggccagccagatggctagccccatggcgcagcacggcggcgccggcggccgcgcccagggcctcgacgagcaggtcaccaacaagttcgcctccggcaaggccgccgacccgccgtcgtatcccgccccgaaccccggcatgatgccggcgccaaggaagaaggagctcgggggctcaaactccaactccaacaaggagctacacatgttcgtgtggagctctagcgcgtcgccggtgtcggaggccaacctccgcaacgccgtcaaccacgccgcctccaccgacttcgcctccgcgccgccgccggcagccgttcccgtcggcggcgccactcccaaaggggtgagtggcagtgtcacgccggcggcgaagaacggcggcggcgagttggagatcgaggacgggctgaagagcccggcggcggggctggcggcgaagttcccggtgtcggggtcgccgtacgtggcgccgaggaagaagggcggcggcgccgacgtgcccgggctggcggaggcggcgcacccgatgccgccgacgagcgtgatgacgcggctcatcctcatcatggtgtggcgcaagctcatcagaaaccccaacacctactccagcctcatcggcctcgtctggtccctcgtctccttcaggtggaatatccaaatgccttcaataataaagggctcaatatcaatattgtcagatgcagggctaggaatggctatgttcagcttaggcttgttcatggctctgcaaccaaagatcatttcttgtggcaagaccgttgcgacatttgcaatggcagtgaggttcttgactggtccagctgttattgcagctacttccattgccattgggctcaggggagtactcttgcatgttgccattgttcaggcagcacttccacaaggcattgtcccgtttgtgtttgccaaggagtacaattgccatcctcaaatacttagcacagcggttatttttgggatgctcatcgcgcttccgatcacgatactctactatgtgcttcttgggatatag

SEQ ID NO: 46934 - DNA, 258 bp, Oryza sativa
  Clone ID: PAT_MRT4530_49752C.1
ttgcaaatgctgatgagcgtcttcgtcattatcatcggttgctacactgctattgactgcatcaccgacatcgtcatcttcatcaatatcctttatcgttgggcgccttcatcttcattgctcgctgacctgactgctgccgactggtttcttcgccttcatagttgtgcaacttcatcacttttgattggtatcactatcttcactaccaccaatatttttgccacttctgcctcagttactcaactttttaggagt

SEQ ID NO: 46935 - DNA, 3555 bp, Oryza sativa
  Clone ID: PAT_MRT4530_49753C.1
atggctgagttgaggttactcaccttcaaagttgagcatctactggaggagttgagatgggaggctcagcacaacaaggctttggttgacgggcacaggaacaggatgatgcgcaacatgtatattccattagttcttcctcgaagcatgaagaggaagcttaaaatgatcaccggccaacttaatgcactaggtgcagagatcaatggcttcatcaaccacgtgccattggtaatgcaaaataatattgtgggaagggtgcatgagaagcaagagataaagcaaaaactattctgtctggacagatacaagcatgaaggcctcaaggtcctatgtgtagttggcattgaaggagtgggaaaaactgccttggttcaattaatctttgatgaagtcaatgtgaaggaatatttctcattgtgcatatgggtgaatgtatctcgccaatttgatgcaatgagaatcacaaaacggattattgaggttgcaacctgtgagccattggagacacaaatggatcacaaggaagagaaggagttgcaatcctacctccagaacattttacatgaaagaaggtttttgctcgtcttagatgatgtttgtgatgagaacaccaatggctgggaagaactcagaacctcactggcatctggagcatcagggagcacggtcattgtgacgacccgtgaactttgtgttgcaagaaccttagaagcacctgcatctggcatcattgagctgggaccaatgagtgatgatgagatatggtccataatgaggcagcgaatgttatgtggcctagatgacaaacccgagctcatccaggttggtcaatccctcgtgcaaaagtgtcatggaattcctctagctgctgtaacactcggggatttgctgagaaagaagggaacctctaatgaatggtctagtgtcatagaagctgccaatgaatggttggctcttgcagaaagcgatatgctgaccacgacggcaggtgtagcctcggtcgcacttcagatgagctatgagcacttgcaaccagacaccaagaggtgctttgcattctgtgctttatttcctgaagcttttgaagtggatggtgatatgctgatccagctgtggatggctaatgatatggtatggtacgatactgaaggtatgggggcttggatgttagataggctacagtcaagatcatttcttcaagatgtcagtcaaccttacaatggagtaacaatctataagatgcaccctcttgttcatggcatagcaacgtcagctgctggaaaagagatccgaatcctacatcaaggccaccaacttacagaagtgatgccagagctccatcacttgtcagtggttggttcagggttagatgttgatatgattctacccaatgcatggggtatccacacactgttgtcacaaggagaaggatgtcgaataagtgtgtctaatcctgatttttggaaatccaactccttgagagcgttagacctgcatggtctcttgtccgccagtgttccatttagttgccaagatatgaagcatctcaggtaccttgatctgtcaagaagttggataacgtcgcttccagaggactttttcatgatctataacctgcaaactctgaggctctccgattgtttttacctaaagcaacttccagaaaacatgaggtttatggagaatttaaggcacatttatatcgatggctgcttccgattagaaaacatgccgtcaaatatgggacaattgcagaaccttcaaacactgacaacttacatagtgggcaatggtgatgggtatggaattgaagagatcaagagcatggatctcggtgggcggcttgaaatatataatctgaagaacgtgagggacaaatcaaaagccgaggccgcaaatttatctctaaaaacaagaatgtccaatatgttgttgtgttggggtatgtttaggaatgacgaggtaaatgcatacaatgccgaggaagtgatggaggctcttagaacccctatgtgtgtacagacactcaaggtttggcgataccctggtagcatacttccaatttggtggccaggtcaaactcttgctaatctggttaaactaaccatcaaagattgcgcaagatgtaagaggcttcctcctgtgcagtattttccatcacttgaggtcctacatcttgaaggaatggacagtctcacacttttttgcgacaatgtatcgatggacaacattgaggtcagctattatcgattcttctggaggttgaagagtcttatcctgtgtgatatgccaagcttggaaaagtggcaagaagatgaggtgatagaagtattcacaattccagtgcttgaagaaatgaaattgatcaactgtccaaagttggtgacaattccaaatgttcctatgctcagatgttttattgtagaagggcaaaacaaacaacagttatattctctggcaccatcgtcgtccaaaagtaaaggtccatcgtgcaggatttacatggcttcaaacgctggcaagaagctcattcagatcgatgtgagctctgatacggtgtgcccatggtgctttgtcgggaaaaagaacctcgagaaagctatggagcaaaacaaggacaagtttgatttcgaggtccgctggcatccattctttttaaatccgaatgcacctaaggaaggcatcaagaaatctgattactaccggatgaagtttggccctattcagtttgagcatgcaactgctcgtatgacagagatatttagaggacttgggatggaatatgacatgtctgggttgactggaaatacaatggacagccataggctcataactcttgctgggcaccaaggttatgacaaacaaagtgctcttgttgaagaattattccaaagttacttttgccatggaaagtttattggtgatcggcaagttctgctggatgctgcaagaaaggtgggcatagaaggagcagaagaacttcttcaagattctaacaaaggagtcgatgaggtcaaggaagaactcaacaaatattcctctggaatttctggtgttcctcactttgtgataaatgggaaatttcagctcagcggcggccagcctccaaatgcattcacaagggcttttgatgttgctgcaaaagatggggctcaatgattgtgcgtgtgggaaacacttataggttacttaaagcatgtgcaaaatagaataaaagctggtttgcaggaaagaataagagttgctgatatatggttgctacacggtaggtacttgaatctattgtaatctgatgatgataatattctacatttttaacagctgtatatagccatgaaaaattgagaacgctgtgaagaaaatacatgtcctaagtgtatgcacgcaccggcttttttttttttggctcctgtgaaaattacggctgctccagttgcaccttgcccttgctgtaaaagtaaaaggtctcatctttcttgcttctgtaaaaggtctcatctttgctcttctgtaataatttcgaccaaggtatctgaccttgtgttgccgttc

SEQ ID NO: 46936 - DNA, 774 bp, Oryza sativa
  Clone ID: PAT_MRT4530_49754C.1
tcctttttatctccagatttatcaatttaaaacttgtatgtttggtgggctactttctgttagccacttccctcatgtgtaatcttttatctcagaatactgcttcttgagctctggattgttaggatcaatactgacagcaaattcagcatctgtgccatccattgcttccttaagcttcccaagttcttttcttgctgtaattctgcgtgagtatgctttaacatagcggtcatcaagattcagagcttcagtgcaatcattctctgcctcttcaaaccttcttagtttaagatatgccatagctctatttgcaaaagcaactgctgaaggagacagtccgatacttcttgagtagcactcaatagcctgggcaaactttttctgtttgaaatactcattaccctgttccttttctgatgcggcatcaggcattggctcatcatttaagtagcttgagtagttcgcataattgtcgtaccgatcacccagatttcctggggaagctcctgaagacccgtatgtccttgccctagcttccatatccccaagtcgcctcttgctacacctcgccggcgtcgcctcccgcggatgatccaaccggccgcaggagcagcggtgctaacgccgaggaggagctcctcggccgcgcgcgtccgaggcggcgtggcgggggagagggcccggccggagcgtgcctccggctcaggcagggaatcgagagagagggtgggaagcggcggcggtgacggcgttgtcccgcgcgccgacggc

SEQ ID NO: 46937 - DNA, 1588 bp, Oryza sativa
  Clone ID: PAT_MRT4530_49755C.1
gaactcggcaaccctggccccaggggcacatatgcatcaagaatatgaaggtacagccttttcagccagcaaaggtccatgagcttcacaatcgcatgctttgatggatgtttctgagacaactttataacttccaccattaattgactaccccccacactgagtttagcatttcatttctacaggaaaagggtgttacacaatatcaattggctagagcgtaaaaggtttctaacgagctgtctcagcatcagcatcattaatttgaagtgaacatgttatcctgcaatccttcctgaatatatttggctcgaagttgcctgagggcttcaacctgatccgctgatgcagtttcagcaaggaatatttgatcccagaccttccgtaattcagatttatgcatggatgaaaggcacatgattatcaagtcaaaacggggaacttttgccaaattctccaaaatgctaacagctaacattgtgtcctcccggaaaattgaggttgtgcacttcacgatatcaatcagaaaagcagctgaaagtgcattcttgaaaatctctggtaggcttgatggtggaattgactttaataactgtgtttgcttggcagtgtcattagagagagctctccaagaaacctcaaaatcatatgctgtttttggtgtcttcacactttttacagtgctggccatataccgtgaagcagcacgagatgcaagatcttgtattgatgcttctggtccaggcttctgtttagcatctcgagatggctgtacggtactgtctttgaagattactccagatccacctttggatgtaccatctgctttctctctaatctccactgcaactctactaggcggatcaacttccatgaaactgtccttctgggaactacttggtgcatgggaagtgtcctttttatctccagatttatcaaatttaaaaactgtatgtttggttggcttacttctgttagccacttccttcatgtgtaattcttttatctcagaatactgcttcctgagctctggattgttaggatcaatactgacagcaaattcagcatctgtatggacctgcttgtcagtgttcatcaagacaacaattaagctaaaaaaggaaagactggtggccaaaaataggataccatccattgcttccttaagcttcccaagttcttttcttgctgtaattctgcgtgagtatgctttaacatagcggtcatcaagattcagagcttcagtgcaatcattctctgcctcttcaaacttattaaataatggttccagaatagagatccaactaaggtttttaagtatttgccttcttagtttaagatatgccatagctctatttgcaaaagcaactgctgaaggagacagtccgatacttcttgagtagcactcaatagcctgggcaaactttttctgtttgaaatactcattaccctgttccttttctgatgcggcatcaggcattggctcatcatttaagtagcttgagtagttcgcataattgtcgtaccgatcacccagatttcctggggaagctcctgaagacccgtatgtccttgccctagcttccat

SEQ ID NO: 46938 - DNA, 509 bp, Oryza sativa
  Clone ID: PAT_MRT4530_49756C.1
ggccgcgggttttttttttttttttttcttttttttttttttttataaaattagaaggcttaactgtgttgttcgtgctaaacacatcactgtgggaacagctggatcaacagcaccccttgtttacacaacggacacaggaaggatgcaagcccaagaaaaaacaggcaccgactgtgttcgccacacagataaacagagccagctggcgcacacaaccagtgatcacaccgcgttggcaggatgaaacagtacaccagtgctacagataatgacagtttgaacctactcactggacctactacatataacagtgcacaagatctcaacaccatgcgtttgcaggctcaggcgtgccatcagggagatatggccacttactttgccgccttcagtacagcaataccagtaaggaacacgccctagatattacactaccaaagaatttctacacctcaactgttaggggcacaaaagagagctatgctcgccggacatgacccgcccgc

SEQ ID NO: 46939 - DNA, 410 bp, Oryza sativa
  Clone ID: PAT_MRT4530_49757C.1
atggcgtctccgattcttgtggcgtttctcctcctgggcttgtacgcggtcgtctcagtcgattcctcgcgtcccatcgagggtggcgtggagacgatctggaccgcggcggcagcagatcagggagacggcggcgtggcgaggtcgtctttgccggagaggtcaatgatagcggtgatgcctcgtagacagccggtgagggcgccgccttctccgaagccgagcatggcgatgacgtcgtacatgccgccttgctccggcggcgtccccggctcccctgcccccggcgtggcgtcatgctcttcctgtagtttgtcggcctgatctacgcagcttgggtgtcctccattgctcatactcttactattcggaccttgtgtgttgagacaaccatatgaggtggagtccat

SEQ ID NO: 46940 - DNA, 163 bp, Oryza sativa
  Clone ID: PAT_MRT4530_49758C.1
atgctaacgtcgagctcccagtcacctgccagtgaagtgggcaccccattggccacccatgcgcccccaacttaccctgttggtggtgggatggggaggggatcgagagtgggggacaacggcatagagggttgcgtcgccacccaacaaggagcgaccggag

SEQ ID NO: 46941 - DNA, 344 bp, Oryza sativa
  unsure (1)..(344): unsure at all n locations
  Clone ID: PAT_MRT4530_49759C.1
gcggcacaggcgtgcgtcacagccaccagcaacccatccggctgccatgctgncccgtgcggtctgccggacatcggttccgtatgagctccaggctctctgtcgctctgcgtacgtgcatcagtgtcgattgtacatacacacacacctagccaaaacgtgaatagtagatacgtgttgccgagagattttnttcttgtactacgcagcaatgcaactgtagtagatacatgtgttctgtaaatacatgcatgtacacatctctgntaattaaccatcattttcccttctttttcgaacgataattaaccgtcattttcttcttccttaaaaaaaaaaaaaaa

SEQ ID NO: 46942 - DNA, 1267 bp, Oryza sativa
  Clone ID: PAT_MRT4530_4975C.1
ccgggctgcaggaattcggcacgagggcaggacactggtccatttcctccagtttcatttctagtctctaccatctgatctcctcttgcagctcgtcagttcgatacgacgcatttcgcggatcggtggagctctgtcactgtgccttgtgcatgcgtttgcattgtgcgcggacatgcgtggtggcgcctctctccggttgaggtggccggcggctctcgtcgccgtcgtagctgcggcagtgacggcggcggcggcggcggggcatggcgaccacaatttccaccgggactttgacgccgtgtgggggaagggcaatgcgaggttccgggacggcgggcggatggtggagctgacgctggacgagcagacgggggcgcggctgcagtccaaggagcggttcttgtttgggaggttcgatctcgagatcaagctcgtcaggggagagtctgcagggaccatcacttccttctatatctgcagcggcggcgcgcggcacgacgaggtggacttcgagttcctgggcaacgtgagcggcgagccgtacctgctgcacaccaacatcttcagcgacggcaagggcgagcgtgagcagcagttcgtgctctggttcgaccccaccgccgacttccacacctactccatcctctggaacccacacaacatcatactgtacattgacgggacgccgatcagggtgttcaagaacaacgaggcgtacggggtgccattcccgacgcggcagccagtgcacgtgttcgccagcatctggaacgcggaggagtgggcgacgcagggcggccgcgtcaagacggactggtcgcgcgcgccgttcgtcgccacgtaccgccgctacaacgtctccaacgcctgcgtctgggacgccgccggcgccggcgcctcccggtgcgccggcggcggcggcgggtggatgaggcggaggatggactggtggagctggatgacgctcaactgggtgcggatgaactacatggcctacgactactgcgccgacaggaagcgattcccgcaccgtttccccgccgagtgcatcatccccatcggtagaacgtgaggcgtcgtacgcgacgtcgactccatgatgattccatccgtcgtccagcgatctgtaggctcgtacttgtgttttgcagtgaggggaactgaatgaataatcgtctcttcttgatcttttaggtttgggttgagttgtgcagggtaatgtggaaagtctcaactcgttccagaatctgtttttttctttctt

SEQ ID NO: 46943 - DNA, 825 bp, Oryza sativa
  Clone ID: PAT_MRT4530_49760C.1
atgtactacccgagtaatatccccaagcgcaacatgccaacaagcactgtccacaagtggatcagaaccgtgggagctccaatcggacgggcgacgcagggccgaggttttgactccgaccacccacggccggggcccaaacgccgcacagctgccatgtgcagaggcccgctgctgcccccgccgagacaacacgcgcccgaacccaaccccatcatccatccgccgatcgagtcatctactagccccacaggccacagctgggacggcggcagcaacagcgacaaggccgccaccgagatcgagcgaagcgaacggagtttacaagatggaatcgatcaaatcgatctcatcccgtcggcatcggcgctgactgaggaggagtgtggagcgacattggtagcggcaacaccgtcgcgcctccgcattgggttcggctctggtgccggtgccggcccccgccactcccttacctactcctcccctccctcttgccccagtccactcgcgccgccgcctccattcgcgtccgccgcccctcagtcagcgtctccattcgcgccggcggcccacgctgttccctcactgctcctcctccagtccagtcgcgtcgctgcctccattcacgtccgccgcccctcagttagcaccgtcccaccccgcctagcccgtcgaccagtggctctgccgcctccgtcgcatcaaggcggcgggggcgcgaagaaggccgcccgcagcgggggaggcgccgcgacgaacacgcggatcaccggcggcagtggctgcggctggggggcggcgatccgtggcacgaactctagttga

SEQ ID NO: 46944 - DNA, 437 bp, Oryza sativa
  Clone ID: PAT_MRT4530_49761C.1
ttgttgttttttttttttttttttcctagattggtcccatttttttttatttcaacttggggagggcatagacaaccactttggcgggctattagggggtacaataaattgaccacacttgcccagaggagcccatcacattgtccccaaatgtttggtttttccccccaacctagccatttgaaattggttccaacacgctttgactaagaccacaagcccccctgggcactcgggctgatatgttaagaactcagctgtccagtgccacaactggaagctttgttgaagttctacagaatggttgccaacgattaacaggtcttataccgtggcctaaaacaagcaggttcttcgtgttaaaccacatctgggaagcgttgcatgctaattttagcctaggattttccaaggaacaacgggacgcaggtcattga

SEQ ID NO: 46945 - DNA, 525 bp, Oryza sativa
  Clone ID: PAT_MRT4530_49762C.1
ctatagcgggttttgggctttgcatttaggataagacgggcttaaacacgcgaacgagccgttggctcggtggttgggccgctcggtggagcgcccaccacccgcgttcgagcgccactcgacgcgggtttcgcactggggttttattcccctttccttctgttgcagcctcacacgtggatgtgccacattggtcagggtgacatgccatccctggcagaacgaggggcgctcgtgccggtgcggcgggggcggcggcggctgcgcgtacggcggcgggtacatctgcggcggcgggtatccgtacggctgtggcggaggagggtacgggtgcgcccccgggtaccccatcggcggcggcgcctgcggcgggtactgatggtgttggtggtggaggtggtggtcgtcgacgccaacggccttcccgtaggcatccatcggcggcggcggctgcggcgggtactgatgatgttggtggtggaggtggtgatcgtcgacgccgccggccttcccgtaggcatccat

SEQ ID NO: 46946 - DNA, 319 bp, Oryza sativa
  Clone ID: PAT_MRT4530_49763C.1
agacaagagtcagggatgggggcagcctaaaaaggactgtatactccgtgatgccgacaatgtcattataaatgttgctttgtggggagacgggcacaagctttctgcagagaagattatcaatctagcaagaggccacaaatagtagcttcttgccccttagagcgtataaaatctcttcttgaccttctcatgtttagttgtccaagcattctcagctgtcagaagcgcctcatcctgatcactcctctgtgcgtctgaaagtgtctgatagccccttatagcaagcggcatgttagtggaggcctggccctcccaa

SEQ ID NO: 46947 - DNA, 395 bp, Oryza sativa
  Clone ID: PAT_MRT4530_49764C.1
attcccccaaaaccctagcggcggcggcgcgcgctcccctccccacctccgccgccgcggcgtcgaggcagcaccggagggcgatggcgtcgacggtgctggaggcgacgcgggcgaagcacgaggacatggagaggctggagcggctggcggtgcgggagctgcagcgggagcccgccaacgcgcgcgaccgcctctaccagtcccaccgcgtgcgccacatgctcgacctcgtcatctccacctccggcaagctcgtggagatcattgtacggacaaaggaaaatgcagagaagaagctgactctcacatatgaagaaatggaagcagaacgagaagaggaagaagtgcaagctgatagtgaaagtgatgatgaagaccaacaaatctacaat

SEQ ID NO: 46948 - DNA, 299 bp, Oryza sativa
  Clone ID: PAT_MRT4530_49765C.1
tcgcgatctagaacgcggtgcgtgatattttgggtttcataaaatgggatgtaatcaaaagctcagagtaggtagacacaccgggtttcaaactcatggaagctatttagacacaaacacaattttttgggttgaggataaaccttgattggagtaagctatttttgttacacgcccgggtctatggaaaggctaaaaacttgtgggtagttccttggaaccgagtaacaagatttccttgtggggggctggtaaatcaaattcgtgttagataaccacaggaacgattaaacatactg

SEQ ID NO: 46949 - DNA, 1959 bp, Oryza sativa
  Clone ID: PAT_MRT4530_49766C.1
ttttttttttttttttttttttttttttttttttttttttttttttttttttttttttccgtcactttgtttttttaaccctggattgtgcaaacagtataccagatggtcaaacagggtacagggatatagtgcaatataccatgtagtagaaaagaaacatttgagcaatggagtacccatggtgctacaagtatcgagtgctacaactacccagaggtcaacgaagttcaatagaacaaatggccaaccacttcagcagcagcccataggggccaaaatgttaggatcgcatcagggattctaaatcaggccctggcgctgcagatcagtgtaggtcttcttgttgtagatatttccctcctgatcttcgtactcttcttctaggtctggccgccacttgttcagcccttgtcgttgttgaattttctcccagagttcttttgcctcctggatggatgtgatttcattgaagttcttagtattaggaattccaagacagcgcatcccgtgctgatggcgccactccttgaaatgccgctcataagcccgtcgcccccagtagctgtggtttccacatatctcacatttgaattcctgaccaagaccatggagcttatatagccaatagggtataggtttgccgtcccaacccatcggcaacttaagaggattgtagatttgttggtcttcatcatcactttcactatcagcttgcacttcttcctcttctcgttctgcttccatttcttcatatgtgagagtcagcttcttctctgcattttcctttgtccgtacaatgatctcatctagtagctcacaaaggcgcctcatctttacttccattaaagcaatttccttcttcaaattatccttgaaattgttaccattagaagtagcattggagacagaactgtgtgaacctttggcaaaatgcttacgatccaattgttccaagggtgtatgcttcaacaagaaaagtcgctcagcacgctgttgaacagtaccaccactttttaatccacgagcagctaaagcctctttcaacttttctgggcccagctcaacaagctcttcaacagtggtatagtaatcaaggtctattactgactcttgtgcagattctttctctgggtccttgctctcccatccaggcacttcaccattgatccactgttcttcaaactcgctttccaactttgcaaaaatcttctcaatgtcttgcaatggttctgtgtgatacagaaatgatgtcagatactccaaaatatgctccaggtattctctgtattgcctggaggttttcagattttgtgccatcttctccacatgagaaaaggtgccaacatatgctgagtattccattggagttccaaacttggaatttatgaactcattgtaaagctcatgcaagtccaggtatcggccaaaagcttcctctccagtgaattcaatagccggttcctcctttagtagctcttcgaaatcatcagttgcactaacgaaacgggcagaaggattacgcctatggtaatcacggatctctttgagcctgtcatagaactttggaaagatttcagcttgcactgtggaactaagatggttggagatctcatccttcctagcattatccttgtcctcgtagatttccacgagcttgccggaggtggagatgacgaggtcgagcatgtggcgcacgcggtgggactggtagaggcggtcgcgcgcgttggcgggctcccgctgcagctcccgcaccgccagccgctccagcctctccatgtcctcgtgattcgcccgcgtcgcctccagcaccgtcgacgccatcgccctccggtgctgcctcgacgccgcggcggcggaggaggggaggggagcgcgcgccgccgccgctagggttttgggggaattttttcgcggtcggtgacgttagcctcgtgccgaattcctgcgcccggg

SEQ ID NO: 46950 - DNA, 1106 bp, Oryza sativa
  Clone ID: PAT_MRT4530_49767C.1
atgcaggaccacgtcgtcgtgcagcagaggagcggcgaccagccggcgccgtcgtgcgacatcgccgccgacgagatcccggtcaacggccacaagccggggagggccgtcacggcgtcggtctaccgcgccaagatcgccggccactcgcgcgtcctcaccgtgtcgtggtcgcgggacatgctgtcgcactccttcgccgtgtccgtcaccggcgtcgacggcgcctccgcggagtgcagggtggacctccgcccctggcagttctggcggcgcgcgggttcacgccgcgtcgagctcgccggcacggcgccggccacggtgcgcgtcatgtgggacctccgccgcgcgcggttcggcgcggggctccccgagccgaggtcgggctactacgtcgccgtggaggccgcgggcgaggtggtgctggtggtcggcgacatgcggaaggacgcgctccggcgcgcgtcgccgcgcgcggcgcccgcggcgtgcgacgccgtccccgtggcgcggcgggagcacgtgttcgggaagcggcggttcgcggccaaggcgcggttccacgaccagggcaccgtgcacgacatcgcgatcgagtgcggcggcggcggcgagggcggcgacgcggacatggagatgacgatcgcgatcgacggcgaggaggcggtgcaggtgaagcacctgcaatggaagttcagaggcaaccagtccgtcaccttcagccgagcaaaggtggagatctactgggacgtccatgactggctcttcagcgccggcatgcgccccgccctcttcatcttccgccccatcgtcctctccagcgcctcggcgcccgccgccgccatgctcctcgacggctcgccgccgccgccgccggccaccggcttctgtctctacctctacgcctggaagctcgactgatccattattgagctagctagcttctttcattggcggctggctctgataccatgttgattagatcggggattcttgatcgaaacgaaaatgcgaacttgtgagccaaaggggaggaggagtaagaatttttttcgattttgtataatttttttgaggaaggaaggaaacataataattggatataa

SEQ ID NO: 46951 - DNA, 355 bp, Oryza sativa
  unsure (1)..(355): unsure at all n locations
  Clone ID: PAT_MRT4530_49768C.1
cggacgcgtgggggcggcggcggaggagagcgaggcgcgtatgcggtcgttcgttgtcggtttgacggaggataatgcgcgggagctgcccgcaaggatggtgtatacagatagcttccaccacnccatgttccagttcgacatcgacttcctcctcgcacgctccgactaggcgcgccgatggcgtcgccaccggaggagggagatggagcccacagctcgcgacgtcttcgtgatggcgtgtatattacatccgcggtgggattcatctctttgcgtaggaaatttacaataattctaaaaggatcttggttttaggattgataccttgcttccattcatctctgcttttttt

SEQ ID NO: 46952 - DNA, 157 bp, Oryza sativa
  Clone ID: PAT_MRT4530_49769C.1
tgtacctgcaatgctgccgctgcggatgccaagatcaggaaggttctgggctgccttgaagaggagtactgcatcgagaaggtggagtacgacgagaagaacaacagggtgatcgtgctcggttagttcgactctcatattcttgttcaatattatt

SEQ ID NO: 46953 - DNA, 473 bp, Oryza sativa
  Clone ID: PAT_MRT4530_4976C.1
ccgacctcgtccacccctccgtttcgctcgccgaccgccggaacgccgtcgaccccgtcgacccgagccggggggccgccttcctgcgctccggacgactttttcgtcgtcgccgtcgacctaaggtgagccggggaccgccgccccttttcccccttcccttcccctctctcgggcggcgctccgccgtgcctatgggcgccgccgccgaccataggggcgcgggcaccgacttccgccggctgcgccggcttggctgccctcgggcgcgccgagtggttgccgcgtggggcccggccgtcagccgcccgctccctcgggtgcggctgacgcgtgggacccacggcgccggccggtgtgagcccgggtgcacccggtccaccgtggaccatgaggctgccgcgtgggccccactcccgtggacccggtccgcgcgccccctcccctcggctgacgcaataaatccgttttaa

SEQ ID NO: 46954 - DNA, 920 bp, Oryza sativa
  Clone ID: PAT_MRT4530_49770C.1
ccgtacctccggcccaagtacattcatccggcccagcttcacgattcccttctcctcgaggcgagagccgagcaaaagccgcacctcgtctcctccgcctcgcgacttcgcctcgccggcgccgcggcgattcccccacacggcaccaccaaatccgccgccgccgccgccgtcgccgtcgccgccgccgcttgcaccggttgctccgggcgggtgtcgggatgctggcgagggtctcccgcctggggctccatgccctgcgccgcgccactgcgccaggtcaaaattcactcgcttcaaggaggcacgaagcagaagctgttacctctcatgtgaaccatttggggaagactttcttctgttcgaacacaaatgctacatccagtgataggagcagcgagtcagaagctaagatatctgtgacttttgttgataaggatggcgaggaaaagcttgttaaagtacctataggaatgtcaatgctagaggcagcacatgagaatgacatagaacttgaaggggcatgtgagggctctcttgcatgttcgacatgccatgtgattgtaacggatgttgactactacaacaaattggaagatcctgtggatgaggagaacgatatgctggaccttgcatttgggcttacagagacatcccgtcttggttgccaagtgattgcaagccctgagcttgatggaatgcgattggcactgccatcagctacgagaaattttgcagttgatggtctcgctttcgctcctcagatttgtcctatgaatattggtcataatggtatgacgcttactatcgctgacagcaccccaattgtggacgtgctggctttattgtatccacgagttgattttaatgttgatttggctagcaaaggttctggcattgttgatgacaatctcatctag

SEQ ID NO: 46955 - DNA, 690 bp, Oryza sativa
  Clone ID: PAT_MRT4530_49771C.1
ttttttttttttttttttttattttactaagataaaagctcacaatcgtttataggtgatggcgtcaatttgtacaaatatcccatttaacagaagcataatcacagtttacacagtatgggccttttgttttcaggtatgagatcgagaactgggttttatttcgaaatcgcttttagaatcatgtactcctagcaaattgatccctttcaagaaagcccgtgtttgaacaagggtggccttttcctagaactgtaatcaagttacgaaaatctctcccaaaaaccatgaaaaaattcagaagagaagaaaaaaagaaaagggcaaagttaccgcaacttggatctcagcaagataattgtgtcatcaggaggccatggccatgatagcaacagcctcacatgtaatcaggaagataacgcagtatttcttgaaaagcatcatcgatccacttgattcacccaactcacacacaaaccacaaacctcacataaaaaacaacaataaccaaaaaaacccagatgtatcaactactgctgacggatttcagatcactactccccccccgcccagatctgatcctgctggattgctcagagagattcagatacaaaggggaaaaaaaacagcgagtctcagatctacttgcggcggcgaaggctcgggaggggatggaggctagggtttctc

SEQ ID NO: 46956 - DNA, 663 bp, Oryza sativa
  Clone ID: PAT_MRT4530_49772C.1
ttaccacacgataaccgtgcttaccgctagagcgcggtaacctgaccccggtggtttgggaaaccctgccgggctctcaaacactacgtggttagggatacaagtggacgagcaaacgcaatattttccggatccacggaagctgttgccaacgagcaagatccactcactcaatggagcaagtggagggcgtcgagccataccagctgtgatagtccgcgagtgtggatgcgccaaccagccaacgagcatcgaggtcgagcacgtcctcaccatccacggtagcaataaccacgaccccaagctcgaccaaatccaggaggaagaagagagagggatgaagaagggctcaatgaggatacccagctttggacaatcaagggacgagggcgatgttgccttcgctaccatcatcttcctccttttctccttgttctcgcaagcgttgtcttcctcaacggctgatgcctttctcccagcaccaacgcgacaatccttgttctcgcaagcgccattttccccaacggttgtcgcctttctcccagcattgacacggcaatccttgttctcgcaagtgtcgtcttccccaatggccatcgcctttctcccagcaccgacgcgacaatccttgttctcgcaagtgtcgtcttccctaatggccat

SEQ ID NO: 46957 - DNA, 780 bp, Oryza sativa
  unsure (1)..(780): unsure at all n locations
  Clone ID: PAT_MRT4530_49773C.1
atggtggagttggcggtgggcagtggcgaccagctgcaagtttgtcaaagtatcaagaacatgaattttgctaaaacagacacgcgatccaaagtagaaacgtacgtcgacacgtttggagcgaaaaaaaaaagtacacgctcctccgcagcggaaaaaaaccccaagccccgcgacccgcgccccgccccgcgcgtcccgcgtcctaggcgcccctcgaccgcgccgcctcctcaccgccctcgaccacagtcgccccgcgcgccctcgaccgccgccgcctcctcgccgccccgcgccgcctcctctctgccctcaaccgccgacgccccgcgccgcctcctcgccgcacccaactccggttgcgccgtagtgtccaccgccgccgcccgccgcatcgtcgtcctccccatcacccgccaccaacgcctactccgtccacccgccaccgacaccgaatcctccgcccacccgcaaccgccgccaacgcccccgccgctgagtcagctccagatccgctgtcgggctgactcctcctcctcctccctgtcgcggacgccgccgccgccgatgcctactactccgctccgagccccatctagcgaacagagcagggatgggaggggcgccgtcgtcctactgcatccttggtgatggacttgataaagnttggagatcatctnagtgaacgggaggatgctgatctctataggatnggattactggtgaataattggagataataagganctatnatgatcttttgtgatcaaaagccat

SEQ ID NO: 46958 - DNA, 263 bp, Oryza sativa
  Clone ID: PAT_MRT4530_49774C.1
atgggggtcgtcaaatcgctagcaaccgtgttctcgatggagtcggatcaactaaagggaatttatccagaagagtccgggttcaagaaggatgcggcatggcagaaagtttctttcctgtctgacaaggacttgtatcaacccatgggcaattgtatcatctacgtcggcgtcgttcaaggctgcatcagtacattcgacctcttggattgctctggtttggatgctattatcggcatcgactggaactactccatcggctt

SEQ ID NO: 46959 - DNA, 192 bp, Oryza sativa
  unsure (1)..(192): unsure at all n locations
  Clone ID: PAT_MRT4530_49775C.1
aaggcaaaagattggtgcattnttttgctcgcgtttgtgtgcgtgttgtgttgtttcatctttcttgaaaggangaaagatgccgatgaattgtgcatgtntcccntntgnggnatcgttgattgtgcngtgngnntgatatgctnntgnncaaaaaaaaaaaaaaaaaaaaaaaaaaaaaaaaaaaaaaaa

SEQ ID NO: 46960 - DNA, 183 bp, Oryza sativa
  Clone ID: PAT_MRT4530_49776C.1
agtaaagtccatcaccggtccctaaacttgtaccgatgtgtcatcccggtccccaaactcgcaaatcgaccattcaggtcgtcaaacttgttcgactgtgtcatcccggtccctaaacttgcagatcactcgtttttgtcctccaacttattcagttgtgtctccccggtccctaaataagac

SEQ ID NO: 46961 - DNA, 515 bp, Oryza sativa
  Clone ID: PAT_MRT4530_49777C.1
ggcccaaaagccgaattttttttaggggttttaaaagcgaaggccaaaccccaaaaatgctcattgcagtccaagacttaggggggatcatttgccgcataacaacccaatcctgattggttgaacatttaacatcccggaccccctttttaccccaaatccttaaacgggcaaccaactgggccccccttaattttttttggggaccatggaccaaaaacctgtgcctaaaacaacttccttaagcgggggggtttattagggaaccccccttttgggaaaacggccttgccattagggtaatccaccaggcctttaaatgggggtttgcctccaacacggatgcggggggggtagcccccaagcatacagggccagccacatggtttagggccccgaccctgatgtagtctccagccaggttcttgcactttgtgaggggccccttgtacacctccaacaccttttttagtttttaaagggtttcctcaacaactttttcgggggggggggcc

SEQ ID NO: 46962 - DNA, 489 bp, Oryza sativa
  Clone ID: PAT_MRT4530_49778C.1
gagcaactaacttcaaaacatgtagtccgggagagaagaaacagctacagagaaagtaagatgctgggagattacacagcaaactaaacagctctggactacttttaagagagttctaaagacaaaattgttcttgcactacagattacatgagaaaaatggatacagattattcttttttttctataatgatacataagtgatggacaataagaggccttttcccatcacattttatctccaaagaatgctcctgagcaaaactaatggcccagaaatgccaacaattttcaaagttacaagtgtggtggtgtggcttggcaaaatcaaccgttgacatatgcgcccagtttcttcttcacaaatgtaccattttttccacaactctgtatagcttgatcaacaatttggtatgctgattcagatgggggttatttaccagccgatagcatcttttgaagctgaatcacctgctgttgttgctctact

SEQ ID NO: 46963 - DNA, 379 bp, Oryza sativa
  Clone ID: PAT_MRT4530_49779C.1
cggttaattacatccacaggagcgagcctatggaacacctccgattaagctgcgctttgtgatcgtcgtcttcaaagttatttgctcgccgaaggttgagctttgtttcgccaaaacccggtcacagtacactaccatcacgtcggtgtgcggagggaatttggtgaagcgggtgacctttgcctcgtcggtgcccagtcatgtaccccggccttcatcaaacatggattttgtggttgcttttgcctcgtcggtgcccagcaacggagatgatgccgggctatgcataatatctgcacagcactacggcgttgttgtgttatcttggataagcagcttgacggagaacgagatcagcttgttgttgaggactcgccga

SEQ ID NO: 46964 - DNA, 1403 bp, Oryza sativa
  Clone ID: PAT_MRT4530_4977C.1
tttttttttttttttgtcacctcccctcatgtataggagagagctttatagtaatgacaacttagctcaacagggtacataattaagctactaacattagcagatagcaatacaccacaaaacaaactaaatcaaacgccacaccctatgtccccaacaatggaccattcattcctctgtagtctgccagaaaaaataaagaagaaaaggcgccaggttcaacaagtcaacgactgagtgaggcatcatcttctttttgctccagcaagcctgcacttgatcactcaacgttacctctacaaccacctgtgtatcaatcacttcatctaacattatgccacccaacgtattttgcctattccacaccaccaaagattccttttcctcagggtaatcacgacttcagaaagctcaagctttgtactctgttacatgcatccacttggttgatgaccatttgtttcctttgatgacaggacaacccccatgcaaacttaaagggtctagagtggcatctggtttcatgctccaaaaaagaagcgcatctcccatctttggtttgacagcaaggccctttctggcacactctgaaagttcattataccatggtaatgaactgctgttcacatttgcatcagggaaaatagtctcacccccttcttcaacatcagatagatacatcagaagagtagccattctctgaccaccattcttggtgttgtactcatcaagaaaatagtcaaagtgaggctcgtacttctgcccgacttcatagtgcagaacttggagtccctctccatgttccataggaatgaaagtgtagtctgctatcctcttttcaatggcccgaataaccttgtctcgtcccctttggagaaacatgcctgaacttgtgcgtaccctgctgtccttgcttttaccagtagtgctatcaacaaccgtggatttgaccatgtgaggcttggccaatccaatcaagtaatcacactcttccttggacaggaaattgtgatagacgaaagccctgggctcccatgatatgacttccgtccattgtgctcctcgttccccaaggccctcgctaaggtcgcggcgggcgcgggtgcgcgggggccgtggatcggcgggctcggcgtctcccccggcggcggcggagtcggtggtggcggcgttgggggcggagaccgggagggagaagacgccgaaggcgatgagggcgaggagcaaggcggaggcgaggaggagggcggcgagggcgagggccaagggcgaggtgcggccgccgcgggtggggaagacgcgcggcgggcggatcccgcgcatgagcgggcgggagggcgccatggttgagtgcctcccgcaatggaagggagggagagagagagatctcccgcgcgacgcga

SEQ ID NO: 46965 - DNA, 379 bp, Oryza sativa
  Clone ID: PAT_MRT4530_49780C.1
cggttaattacatccataggacgagcctacggaacacctccgattaagctgcgctttgtgatcgtcgtcttcaaaattatttgctcgcccaaggttgagctttgtttcgccaaaacccgatcacaatacactaccatcacgtcggtgtgcggagggaatttggtgaagcgggtgacttttgcctcgtcggtgcccagtcatgtatcccggccttcatcaaacatggattttgtggttgcttttgcctcgtcggtgcccagcaacggtgacaatgccgggctatgcataatatctgcacagcactacggcgccgttgtgttgtcgatgacaaatagcttgacggagaaattatgttgatgaagcgcggctcgacggaagg

SEQ ID NO: 46966 - DNA, 164 bp, Oryza sativa
  Clone ID: PAT_MRT4530_49781C.1
cccgtacaaagctggcacgcattgcgcagcttggcccgaacaccggccagcttgcaaacacaactccggttatcatgaagggctgcgagcctgcgactgcgagcctttttccgtgctggctgggtttcctccatgaacacgacgccgagaagtttgattttcaa

SEQ ID NO: 46967 - DNA, 505 bp, Oryza sativa
  Clone ID: PAT_MRT4530_49782C.1
gacccacgcgtgcgagagaactagacctattgctaaggcatccgccggatggtgaggcgctccatcaagagcatgcccattcagttggagaggggctagtccaggccgatgagccaacattacgagcagtaacgcacgctacaactgaacaggtactacgtgatgcggtagcaatgctatgactactacgaggagatggcgcaacaatatcataggaacgctatgagcatcatcatgcagagtatcatccagcaagagctgcttgatgctggctgtgttgacgagcaccaagctcaggtctacgcccacgtggatctctagtgtgacctccatgtgtctagtctaccgtaggaacatgcagactccatgcagagttcctactgatcattgcagatcttggtagtgagtactatcatgtatatatacctggataaatgaagtgtcacacattatcgtgagagtcatgtaataaaatgggcaatagtctttggctgttcgtatgaat

SEQ ID NO: 46968 - DNA, 722 bp, Oryza sativa
  Clone ID: PAT_MRT4530_49783C.1
ctgcaggaattcggcacgaggctgcaagcctccttccgttgcaagccatggcggaagcgccaccgccaccgcggccgccggcctcctcgtcggcggcggcggaagcccgggtgctccctcccacgatgctccacgcgccttctccgttgagcagccgacgcgcgagcagggcggcggcgggggggcgaggcgggagggggaggaggaagggaggggcgccgattccggcggccggggcgggaggaggaggaggagggagcggggtggacaggctcgccgatgcggtgaggttgatcgggagggacgtggaccccggggtcgccggcgccgacatcctggagctagccatggcgaaggggcccatgttctcgtggctgagctactggccggaggaagggtaccccaaggaggaacacccctactgatgcatcccctcttcgcagctacaataataggagaattggctactgaggcaaagaaaggataaaatcaggtactttgacccttgtttctaccatctgcatttgccaagtgatttctcctcaaggcatcggaaattcggttttgtccatttgttagttggcgatggaagcaaaggtagtttgtcatttagtcaaatggttaagttagttggcgatggaagcaaaggcagtttgtgtttagggtctctgtctgttttggccgctcgcgtcagagccgtgcacagaaaaaaaaaaaaaaaa

SEQ ID NO: 46969 - DNA, 904 bp, Oryza sativa
  Clone ID: PAT_MRT4530_49784C.1
ccggccggacccaaaaccggccatacataggcacgtagccgcatcgaaccggatccgatccgatccgacccaaccgcgaataccttctcgtcgaagaagcatcgaatcgatcgagagagaccgcgtgactcatccggccgggaacttcccacactttaacaaccaacctcaactcaactcaacttctacctttcacttcccatctctccaacaaaccatcaagatgcacttcactaccttcctcactaccgttgtcgccgctggcatggcttctgccactacctacaacgctgccgctgtcagcagcaacaagaacatcaacggctccgctctccaggcctccaagagcggcttcgctctcaagctcaagaaccaaggcgccgcctgcgacaggggcctcaaggagaaccaagtcacattcagcctcaacaaggacggcgagcttaacctttacaccttccagaactctcaggttgcttacgtcgaccgctccggtatgggccagggcaagctcggctacgccaccattgccgacaagggcctcgttatccccaagaacggcgagacaaagggctggaaggttgctgccaacggcgacctcactttcgatggcaagggtctcatcgcttgcccttacgacggttcttactccctctgggtcagtgctggtgtcaataaccccggtggcaacaaggactgccaggctgttactattcgcgccaagaaggatgacaaggccgttgcctgtcaatactccgtctaagagttagcccaacagtttcatgagttgacggacatactttgattcttactacattattctcattatcagttgaggggagcatcatgttctctacatttgtagaaatctaatttccatctgattaatacatatacatattgc

SEQ ID NO: 46970 - DNA, 588 bp, Oryza sativa
  Clone ID: PAT_MRT4530_49785C.1
gtggcagcggcacgcgcggtcgccggcgacggcaaccggcggcgaccgacggcaagcggcggcacgcgacggcaccgcggctagcggcgccaccgtggcgacacggcaccgcgacgcgacggcggtgcacaagtggcgagcggcggagagaaaggagaggaaggggagggccttactgacgatgaacgagggcgactagtgatggagggaggtcggcgaacagcgggcagcgtcgggagagacatagggaacacgatgagagaggttagagggagagagggagtccacggcgcacagcatagccggccaaaggcgatggtaatggagatgctcatcgacgcttggggagaggcgggctccggcggcggactttgacggaggaggggtggacgaggtggacctcgaccacgcgaacccgacggtggcagtggtgcggtgcggcggaggccctagcggtggctagaggtggccggagtagtggaagaggcggcggcggatgggtgcacggtgcgggagcggtggagagcttgggagatggaggtggagagagaggcaggatttggaattcgaatcccggccatctcgggg

SEQ ID NO: 46971 - DNA, 524 bp, Oryza sativa
  Clone ID: PAT_MRT4530_49786C.1
tgcctgcctccggggctgttccccgccagcgtcaccgccttctccctcgccgccaacggcagcctcgccgtcgacctcggggggccctgctacgcccactacgagtacctcacctacttcgagccccgcgtcactggggtcctccgctacggctccctcaccggcctctccggggtcaaggtccgccgcttcctcgtctggttcgacgtcgtccgcgtcaaggtcgacctcccgccgcccccgcgctacgtctacctcgacatcggctggatcacccgcaagctccccgccgacgagttcgagtccccccacgagtgcgaggactccaagaaatgccgcctctcgtccgcgctcgccacggtcgccgcgtggttccagaacttctttgcccagttttaggggatggagaagggatttggtcttgtgacagtgttacatgagcttcgggccttcacgagtgtagtgattgccagcatccaactacagaagaataagcagtggttgagatatttctctacagcttt

SEQ ID NO: 46972 - DNA, 1678 bp, Oryza sativa
  Clone ID: PAT_MRT4530_49787C.1
atcagctaaaatgttctatgaatctttaatcacctcgagcatcatgtcagtttacttgctattagtataaaatgatcactacttaacaggtgtaattgcatttgaatcatggagcacgctccagtatcatggatcaaaatgaccaataaatctccacaagatcatgtgtctctcgggcatgagcaaatgtgcatctaagacaatatagaagctgtagagaaatatctcaaccactgcttattcttctgtagttggatgctggcaatcactacactcgtggaaggcccgaagctcatgtaacactgtcacaagaccaaatcccttctccatcccctaaaactgggcagaaaagttttgatatgatgaaaaagttgtaagtttggactgggcctttctcctgtctggtgatggcgacatcttcctcctgatggccaggaccggaactgcgggcgtgggcatggcgggcgtcgggcacttgcgaggagggcgctggagacggcgggcagcaacgaggtcgaaagggggaggagcccgtcagacctggaaccacgcggcgaccgtggcgagcgcggacgagaggcggcatttcttggagtcctcgcactcgtggggggactcgaactcgtcggcggggagcttgcgggtgatccagccgatgtcgaggtagacgtagcgcgggggcggcgggaggtcgaccttgacgcggacgacgtcgaaccagacgaggaagcggcggaccttgaccccggagaggccggtgagggagccgtagcggaggacccccgtgacgcggggctcgaagtaggtgaggtactcgtagtgggcgtagcagggccccccgaggtcgacggcgaggctgccgttggcggcgagggagaaggcggtgacgctggcggggaacagccccggaggcaggccgtagcgcgggaggatctcggagagcgtcgcgttcttgtgcggcggaggggaggaggagggcgccgccgggggctcctccgccgcggcggcgccgccgaggaggaggaggaggaggaggaggaggggaggcggcatcggtgaggaggctttgggaggagggaaacaacgaggcaggcacacgtttctcgcgagagtttgctctgccacgctggtcgctgggttaacagcgatggctgatggtggcagccaggtgggactttgctcgtgagaaacttgagtagttgagtagagaggagggggaggctagaggtgaaggatgggaggaggaggaggaggtagagtgtgccggcgactgctcacatgctcgatgttggcaaggttggtttggggaagatccgggtgagtgcgagcggcggctgaggatgaggataggaaggttgaagaggaggcggcggcagggctccgatggggcggaggcctcatggacgcggtggccctcaacagcgagctcctggatgtcgggttgtcgagggagccaggcaatcgatggaaatggtgcattaggagacgagtcctggaggcagcggctcccacatgcgaagacgtcgagaaagcaggcggtggtggcaatcgtgtaaggcggaagcaaggtggcgcttggcgctgtgctgctggaaagtagcgaaggactgaaaggggatcgatctaatccagacggacccgaccccgttgaatggttaattgaaccaatgagtggttt

SEQ ID NO: 46973 - DNA, 1527 bp, Oryza sativa
  Clone ID: PAT_MRT4530_49788C.1
atggccgatcgaatcaccgttcttgccattgccctcctcgttctgatcttgtcgccgcaaatggctgtccagggcaagcctgcagctggcaacaccgcgagcccaaggccgaagcagcagcaactcgggaacttcttcaagaagcacgggtcggacatcgccggcctcttcccgaggcatcgcaacggcggatcatcaggtagctacagcggccaggccgtgccggccgacggcggcgaaaacggcggtggtggccagagccaggacccggcgaccaacaccggcatgtacgtgttgagcttcagcgtcggcacgccgccacaggtcgtcaccggcgtgctcgacatcaccagcgacttcgtgtggatgcagtgctcggcgtgcgccacctgcggcgccgacgcgccggcggcgacgtccgcgccgcccttctacgccttcctgtcgtccacgatacgcgaggtgagatgcgcgaaccgcgggtgccagcggctcgtcccgcagacgtgcagcgccgacgactccccctgcggctactcgtacgtgtacggcggcggcgcggccaacaccaccgccgggctcctcgccgtcgacgcgttcgcgttcgccacggtccgcgccgacggggtgatcttcgggtgcgccgtcgccaccgagggcgacatcggcggcgtgatcggactcggcagaggggagctctcccccgtctcgcagctccagatcggcaggttctcctactacctcgcccccgacgacgccgtcgacgtcgggagcttcatcctcttccttgacgacgccaagccgcggaccagccgcgccgtctccacgccgctcgtcgccagccgtgcatcgcgcagcctctactacgtcgagctcgccggcatccgcgtcgacggcgaggacctcgcgatcccgcgtgggacgttcgatctccaggcggacggctccggcggcgtggtcctgagcatcaccattccggtcaccttcctggacgccggcgcgtacaaggttgtgaggcaggcgatggcgagcaagatagagctgcgcgccgccgacggctcggagctcgggcttgacctgtgctacaccagcgagtcgctggccacggcgaaggtgccgtccatggcgctcgtcttcgccggcggcgccgtcatggagctagagatggggaactacttctacatggactcgaccaccgggctggagtgcctgacgatcctgccgtcgccggccggcgacgggtcgctcctcggcagcctgatccaggtatccttattgtcatgtcgcagacgtgcagatttcaccaaggtggttcattttgacaatgtctcgtctggattgggcgggaagttgttcaccgtttggcgctcagaatttggggagacgggaggtctagggattgcttgggaaggactaaatctcggcccatcatgggctgctaaaatgaaccgaaactacacagagatgggctttgtcaaacatggaccaagagatttacgaacaggttcaggagaaattggcccttga

SEQ ID NO: 46974 - DNA, 370 bp, Oryza sativa
  Clone ID: PAT_MRT4530_49789C.1
tggatatttcacctaaaccgagcctatcaaaatgttttagcatctcattgatatattccatatgagtgggacattcagtccaccattctgcaaatagaaaagtagtgcctctctgaattatgcactcaactcaaaagatcaactgccgagcgaaatatttatcggagaaaaggtgaaagacttcaacaaagtttataactttttaaaaactccatgaaaaaatatctagttgagtggaatttgattatgtcaaggcatttttttgaagaccataagaggctcatagtataactggtgactgaatgttcttgccgtgttgagatagacaatgtctcgtgcgacagggcatctgtcatccgggttgataggg

SEQ ID NO: 46975 - DNA, 2191 bp, Oryza sativa
  Clone ID: PAT_MRT4530_4978C.1
aatactcaagcttgcagagtttcttcgcgtgaggccacctgttttctctagcaccactaatcctgtcgaagctagtgattggttgcacgccatagagaagaagttggatctgctccagtgcagagaccaggagaaggtctcttttgcgtcacaccagctgcatggccctgcttcggaatggtgggatcactcctgccttaacaggactactgctgaacctatctcttggcttgagttcaccgctgctttgcgcaagacgcatataccatcgggagtggtgtccctcaagaagaaggagttcaggtcgctcacacagggttctcgcacagtcacggagtatctgcacgagtttaatcatctggctcgttatgctccagaggatgtgcgcaccgatgaggagcgccaggagaagttcttggaaggacttaatgatgagctttcttacccactcatgactggagattatcacgatttccagaagttagtggataaggctattcgtcaggaggacaattataatcgcatggagcagaagaaacaccggattgctcacttcaaggcacagcagggaaatagtcagaggccgcgtattgcttcgggacccctgtccatgccacagggagacccaggacattatgctgacaagtgtccgaagccctgccgcgcgaaggtcgtccctgcccagaacaactcctccgcaccagcagccaaggctcgtgtcaaccatgttgctgctgcagaagctcaaggtgctccagatgtgattttgggtacgttccctgttaactcagttcctgcaacagtgcttttcgattctggtgctacacattcgtttttatctatgagttttgcggaaaatcatgggatggaggtagaggagcttagacgtcctttgatggttagtactccgagtaaccaagcactctcctcacaacgtagcccctctgtcagaatagagatccgaggtgtacctttcctggccaaccttattctgttagaatctaaagatcttgatgtcatcctagggatggactggctagccagatataaaggtgtgatagattgtgccaatagaaaagtaactctcaccagcaatgatggtcaagttgtaactgttcatgcattgccctctgaacctcgaaggtcaagtctaaaccaaataactttggaagagattcctatagaccgggagtaccctgatgtgttccctgatgatttacctggtatgccgcctaaaagggatatagagttcagaatagatctggtgccaggaacaactccgatccataagcgaccatatagaatggcagccaacgaattggcagaagtcaagaggcaagtagatgatttgcttcagaaaggatacatcagaccgagttcatctccatggggagctcctgttatctttgtagaaaagaaagaccatacccagaggatgtgtgtggactatcgtgcacttaacgatgtgactatcaagaataagtatccactgcctagtattgatgatttgtttgatcaacttaaaggtgccaccgttttctccaagatagatcttcgatcagggtatcaccagttaaggattaaggaggaagatatacctaagacagcttttactactcggtatgggctatttgaatgtacagttatgtcttttggacttaccaatgcccctgctttcttcatgaacttgatgaacaagcatgaagaacatcttcgtcttgcattagagaagctgcgagaacatcagttgtatgccaagtttagcaaatgtgaattctggttgtctgaagtaaagttccttggtcacgtcatctcagcaggaggagttgccgttgatcctagtaatatggaatctgtaaccaactcgaaacaaccgaagacagttacagagattcgcagtttcctaggtctcgcaggatattaccggaggttcatagagaatttttccaagattgccaagcccatgacacgactgcttcagaaggatgtgaagtacaagcggttagaagaatgtgagcagagttttcaagagttgaaaagtcacttaatatcagctcccattttgattttgcctgatccaaagaagggtttccaagtgtactacgatgcatccaagcttgggctaggttgtgttctgatgcaagatggaaaggtggttgcctatgcatctcgtcagttacgtccgcattag

SEQ ID NO: 46976 - DNA, 354 bp, Oryza sativa
  Clone ID: PAT_MRT4530_49790C.1
atgggcattgttcagcctctagtcaaacttgatttgaaagcagtttcaatttcacgcagaagggaaggaagaggatcgatggatcgggtgacgaacctgtacctggagaacctgtgcataatgcaggagaacgagcggctgaggaagaaggcgcagctgctggacaaggagaacaaggcgctcctcgccaagctcaagctcaagaacaacccctccaccgccgccgccgccgccgccgcctcctcgccgtcgtcccagcagcagccagacgccggcgcctcggcggccgccagcgtcgtcaaggccggcgcggcggcgccgtcgtcgtcctatggcgggaagaagaccaagtga

SEQ ID NO: 46977 - DNA, 2574 bp, Oryza sativa
  Clone ID: PAT_MRT4530_49791C.1
atggcggagagcaagcggttcgatacacagagcccaggctgccttgaaggcctgttcaacttccttgccctgaaccagcggttgcaaatgccgaaggcgattgcgtaccgaaagcacaatgaaggaagtagtaatacacttagtgtgaaagttccaaagcccaaaaaccgctcggagaacgatgagtctgttccgaaggggactaattctccaaaggcaaaggtcggcacatttatatggaggacactaatgttcaagaagaaaacactcaagaaagatcaaaagaagagcgactcaccagccaactccccatcatcatcacgtttgacacgctccagatcaattcatcattcaaaatgctttgaatatgtggttccagatgagctggcttctcaataccataccatgattgaatcaagctccaatgaggtggattcatttcacagtgcaccaccgttggtgcaggagagtcctaaagttcccaattttcaagagtcatgcaaatcttctggtgccaaacatagtttcaatgcagaagcaccctgtgaaactgtacctcagagcagtaatgatgaaactgaagccgcctctaagcagaagagtcgtgatgctgcaacacatcactcgaaggagttcatggatttccttgaactgttcaatgcgcacagggagctatttctcaaaattcttcatgatccttcattattagtaccattggaaaaccaagatcaagaagcttcctccagcggtgcagtgccactgaacaaatcagattcgttcccaaggccaggaggatcatcagggaaacgtaaccctatatttgatcggaatgacagtgagaacaatagaaggtcagaaatccaaaagtcaccgtctaggttgaaatctgacattgaaactgctaaagttattggtacaagaatgcctgatggtgttgaaggctcatcggtttcactcacagaatcaaaaagcctgaggaaatctggaaccacttcaaatcgttttaaagttattcgtaaaaagattaaagctgctgtaaaggagaaccggaaagagcttgctcggattaccaaggatggagtttttcataaactgccatatggacaaaagatggctgggttcatgaagagtccctccacagacaagtatgtccaggaggagaaacaaatgcgaaaatcatactccattgcagaatcaatagacaagtattcaacactctatgaatcaatatcaagggaccccaagatttctccagaaagaccaagtacaatgtttgaaggtgatgcaaagttgaaagacaagaagccaccactttctatgaaaagaatagcttctcttccagaaatgagattatattcacctcagcgagatgttttatctgaagtttcagattcccagattgtgcccaagactcacgatctggaatctggttgcttctcttcacaacaaactgatcccttcagcatctgtacagacggaagtttctaccctgacgatattacagaaagaacagcagatatttacagcgaacataattatggagaaagtgctttacttggctcactggaagaggatttgcgcagtatacttcgaagtccaagtttaccttctgtggctcaatctttctcccatcgccgcatcaatagtttaccttcttttgatcgttctttcttccaagatcgtgtcactaatgttaccgagcattctatagcagattcagagccgacgtttgaacatatgcagcttgaggatgatgactggttggtgaagccacctcatcctccaggaccatatgatgctagtttgaaggatgatgagtggttggttaggccacttaagtcctcaggtgttgacactattgatcatgaggatgaagagtggttggtcagtacatcgcagctgcccggtggcaatgctgctgatttcgaggatgaagagtggctggtcaagccagtgcagtcgtcgagtgccgatgctttggattcagagttccagtttatacatgaatttgctgaagatgcaggttccttgcacatttatgttaatgacaagaatgaagccgatttccattatgtcaaggacatactcaaaaaatccggattcagctgcggggaggccgactggtatgcttccaatcagccactcagcccagtgatatttgaggaagcagaattctcgtgccaggaaacatacaccgcgaatgatgacccccacagtgtcgtcaggcgcatgcttctgttcgatctcatcaacgaggtcctgatggatatctatgattcttccttggtcaccggcccatggcactcgcgcttcgactcgcgtaccaggccgatacccatggggtctcatgtcctaggggaggtgtgggggaaggtgagctacaacctgagcctgcaatggaagccggacctgacagtggaggacgttgtggcgcatgatgtcatgatgaaggacaggtggatgaaccttgtgtatgacgcggagtgtcttgcgctggacctggaggatatggtggtggatgaccttctggatgacattgttcttcagatagtgttgatttccattgacgcgtaa

SEQ ID NO: 46978 - DNA, 522 bp, Oryza sativa
  Clone ID: PAT_MRT4530_49792C.1
aatccgattcaactatttctaaggtttatttctatatagactctgatcttttttctccgattaatgtgagaatttctagacctgaaaccaactggaggctttttttctattcctttaataagttaatagatgtttaatcgtcatagtaataataaattataatgctaataataaaaagatccattttcaaaaaaagatcaaagacagactgacacagatagatagtactactccagattgaattgtcctttctttctttcttccacttttttgtttattggattgatccttcatacacgttttaactgtttaatacatacatgcaggtcgctctctccagtcacttcaatcttttagccattttattggaagcacctgcaatcggacatccgaattttgttgtaaaaatcgagtgttgtttcagtacttgtaaaaagaatgtttcatcactagcttacacatatttcagactatcactactaggaaaacggttttttaagccaaaaaaaaaaaaaaaaaaaa

SEQ ID NO: 46979 - DNA, 330 bp, Oryza sativa
  Clone ID: PAT_MRT4530_49793C.1
atggcgcgtggccacgaactcggagatcacgcgccggtgacgttaacgaaggcgaccatcctgttgagcaactccttggccttgccacaggtggaagacttggccctccccggctgtctccagcacctccaccgacgcgtcgcccttcgccgcggtgttgatgtgaaaacacgaggcctgggagatttgcttaactccagtgcatgtccaaaactcgccttcagatatgctagcgtgccagttgatttgatcctgcaatcaataagaaacaaagacagagaaattgcggttaaatccataaacgatagccgattggctaggtgccgatga

SEQ ID NO: 46980 - DNA, 651 bp, Oryza sativa
  Clone ID: PAT_MRT4530_49794C.1
gcaaaaacgagagaaaaatagccaccacgaacccttcctcccccactgtctcccactttttcacgttttccggcgagcgcggcggctagccatggatggcgtcggcggcggcggcggcggcatcctgtcgtacgagaagctggaggggtacgcgatctgggtcggggccagcgtggcgtcggccttcttcgcgtccatggagagctgctcctgcatccacgtccacaccgccgacgacgagggcgacgactacgaccccgaggaggccaaggaccgccccctcatgctctcccgcccccaggccctccccgagtactactacgaccgatccgcctcctccgcctccttcgccaagatgtgatctcatctgctgctcccttctctgatccgcttcttgattagtttctgcgtgttcgtgtgatctgtggatgcgtgtggttcaattggcgttctttcggtggggggcattcaagaaaccatcgtccctgcattgtgcggtgtgtttgtgttcataaagtgtgtgactcgaatagcttatggatttgtgattgtaattctcttgagttttttttttggttcatctgttctgtacctgattcctgatttggtcgtataaagcatcttgttctataaaaaaaaaaaaaaaaaaaa

SEQ ID NO: 46981 - DNA, 1535 bp, Oryza sativa
  unsure (1)..(1535): unsure at all n locations
  Clone ID: PAT_MRT4530_49795C.1
tcctcctcttcctcctcctccgnctcgtctcggctcgcgcaggggatcccccgggctgccggcccgtctcggccggcgctagggtttactcctcctctccttcctcctcttcctcctcctccggctccagcggcgggcaggttgcgggggcgtgggggcggcggcagtgggtaaaatggcccacgacgcgtcctcaccgtcgaccgcgcgcgacgtgaagaagaagcggataagggggaatcggtcggcgaaggcgaagcagagcaagctcgacgtgcggccggagcagtagctgacgcaggtcgacgttcggcgggagcagtggattggtctggtgaaggatgggaaggaggtgaaggctgtggtatcccctggagcagcggcaggagccaactccgggtcgccgatcctcgcatccccgcaccctccactccctcgccggcgtgcagagatccggacgagggaaggggatccagaggatttcaaggaggattcagttggcgctagccaggatgttggtagcagtgatcatgagtctccgttgcacagccctgtctcctacaaccctcctattggctgcttgcagcagaagcactgctcgggcaatggtggtggccgtagcttcagcagcggcagcagtgcttggtccagctctcggagtgtgactgattctgacgatgacactggtggtagccccgagaatgatgatgatggagttttggatgattgggaagctgttgccgatgcactctcagtggatgacaaccataatcaccaggatccagtgccggcagatccaccagttgtacctgcatcttgtccagtgcccgctaatgcagcaacaaggcaagaaccaatcaagagtagtacaagagcttggagcccagatgatgcattccgtccacagagtttacccagcctctccaaacaagtcagctttccagctagcatgggtaactgttgggtggcaatggggataggatctgcacaaaagggagtcccctcaaagccgacatcctgccctatatgctacgaggaccttgatccaacagattcaagcttcctcccttgcccctgcggttttcatctgtgtctgttctgccacaagagaattcttgaggcagatgggcgctgtcctgcctgcaggaagcagtacatctcagcttcttcaggtggagaaacggttggaagtgaacgtgagatggggaatttacgtctgtcccgttcttgtagtatgggtccaagatactaagatggcagggttatgacctagttaatcatcacagttcttctctatgcatggtactgtttggtatgttacctacgtttgccttttcatataaagaaatgtgaatatcggcataggctgtttaatcgtaatagaaagttccccagtaatttgttgacttttgatgagtttgctttgtgtatggtgaatatgttgctgagaggaccctttgttattcatggtgtgggagtctataaataatagctatacagggtgtttgatgtcgaataaaaaaaaaaaaaaaaaa

SEQ ID NO: 46982 - DNA, 541 bp, Oryza sativa
  Clone ID: PAT_MRT4530_49796C.1
tctcacaaagtgggagagagagagagagagaggggatggaaatggcggatgagctggggcacttgctggtgttcgggttcctcttcaacctgggcgtttacatggtggcgccggcgatgaccgacgtgaccatggacgccctctgccccggccaggacgagtgctccctcgccatctacctcaccggcctccagcaagccgtaagctacctaccttagctagctcatcatccatgcatatcatgattcatcatctgttcaatttcgatctcttcagctgtaaatgatccatgatatgcatccataatccatctatccatccatccatccatatcatcattttagaagttaagctcaaatcaatcgataattttttttaaggaaaaacagcatgagactgtgctttttcattatatatagcgagagaaaaataccgcccctaagagcaagaaaggggaaaagctctatagtgtgaggcaaaaggtcacgtaaacgctttgcagatcaattgatatttgctcgtgttgacatgatcatatata

SEQ ID NO: 46983 - DNA, 319 bp, Oryza sativa
  Clone ID: PAT_MRT4530_49797C.1
ctccgttggggcaaggaccccgcgggcggcgggggggggctacccgcccaagccgcggcagacccaggagcaggcgcggcggaagaagacgtcgcgcgcgcaggaaggcatactcaagcacatgctcaagacgatggaggcgtgccgcgcgcaggggctcgcgaacgggaacaacccggagaagggcaagccggagagcggagccaccgacaacccccgaggctggcggaaggagaaggcccgattcgaccggaacggccccgccgccatggacaagaaccaggccgaaaaacgccgaaccgggccggaagagcaagcc

SEQ ID NO: 46984 - DNA, 423 bp, Oryza sativa
  Clone ID: PAT_MRT4530_49798C.1
atgtcccccgtatcaggcggagaatggtgctgggccccacctgggggcgctgaaccatcttgcttccggttgaaggcacggagggcggcagctaaatctacccgcatgcgaaaatattttcagcgtaaaaaaaattggctgcccccagccctacccgccgccgccctcccctccgaccaccaccaccacgagctgtgccaccacgatggttttgagagggagagggagggaaagggagctgcgcgcgccacaagctcaccgcgccagcccgccgccgccgctggccctccccacgacgtagttggatccgagaggggaggggaggggaggggagggaagccgccgtccgaatctgggagtgggagtgccatcgccgccgccaatgatcgcgtcgcctcagccgccgccctccccacaacgtag

SEQ ID NO: 46985 - DNA, 194 bp, Oryza sativa
  Clone ID: PAT_MRT4530_49799C.1
cccacgcttcctttatatatacatcaatatcactttactcatttacccaatctatcagccaagtcatgtttaacttttctacttcccccaacatcatccactcactcccctaactccataaatatctttctacaatacttatccaataattacaaaaatgttatttttttccttctctttatctcacttaactt

SEQ ID NO: 46986 - DNA, 612 bp, Oryza sativa
  Clone ID: PAT_MRT4530_4979C.1
agactgaaaaaatataataaattcgcaaacaatacatcatgtctgcacctggattgtatgaccacaacccagcagcaccaccaccgacagaaaaaggcacaccaaaatcatgtcacctcccctcatgtataggagagagctctatagtaatgacaacttagctcaacagtgtacataattaagctactaacattagcagatagcaatacaccacaaaacaaactaaatcaaacgccacaccctatgtccccaacaatggaccattcattcctctgtagtctgccagaaaaaataaagaagaaaaggcgccaggttcaacaagaccatctccaaaaacacggtatggacaagtaaacccccttgcttagtgcctctactatatattctcagagagcaaagaataccaccggtgtggatctctaaagcctacataactgccatcctggaaagtgccccagtcaatgctttatatagggtccatctttggtaatcacgacttcagaaagctcaagctttgtactcacggacatgcatccacttgggtgatgaccatttgtttcctttgatgacaggacaacccccatgcaaacttaaagggtctagagtggcatc

SEQ ID NO: 46987 - DNA, 4480 bp, Oryza sativa
  Clone ID: PAT_MRT4530_497C.1
tttccatgcggttgccggcggagaggctggaggaaggggaagagagcaagcgccaaagcaccaatgctttcgcctttttcaggcccagaagaatggctttgtattctgccgcgttgttggttatgtcgaactgcagccttgcggcatattgaatcggcacgccccctggcaaagtgagtactgtcgcagcgcccgtccccttgtgcgaccacgagccgtcggagtacatcacctagggttgttcgacgggctcgggctcagcggcaaacactggtatccattcggccacgaagtcagttagaacttgggacttgatagcagtgcgagtgacaaaatgcaagtcgaagggagatagctccgccgcccatttgctgagccgcccagtgacttccttgcctcggagtacttcgcccaaagggtattgtgatggcaccgtgactttgtgggcctggaagtagtgtttaagcttgcatgaagccatcaccagggcgtaagcaagcttctccatttcaatgtatcttatcttcactccttgcaaggcttcggagacgaaataaactggtttctggcctgactctgtctcttggacaagggcagcactgactaccactggcgaagctgccaggtatagtagcagttcgcttcctggcgccgggctgatcaaagcgagcagactttgcagatattgctttagcgcatcgaacgctgcttggcattcgggtgtccaggtgaattttcccgtgccccggagggtcttgaagaagggcaaacctcattcggctgcaaggaaacccaacaacttgcctgcgcgaacgccgaaaacacacttcccaggattcagtttcatacccgctgcacgcaagttgttgaaggtctcctgtaggtcggacgcgtggttgaaagccttccggctttttacggcgatgtcgtcgacataagcttccacgtttcgccccaatttcttgtaaaggaccttgtacaccagcctggcgaaggttgctctggcattcctcaggccgaaaggcatcctgaggtgacaaaaggtgccaaatggtgtgatgaaggctgtcttggggatgttggccgtgttcatgtggatctagtgatagccggaatatgcatctaggaagctcatgagttcgcagccaactatcaaatccacgagctagtcgatccgtggcaaggggaaatcgtccttcggacatgctttgtttaaatatgtgaaatcgacacacatgcgccatttgccgtttgacttccgcaccagcactggattctccagccactcaggatggtcaactcaggatggtcaatctcttgaatgaccccagccttgagcaatttttggacttcggcttttgctgcctcttggcgatcagcggacatcttgcgtagcttctgtttccttggcttggcatccggcttgactgctaggtgatgcatgatgagatctgtcgaaacacctcctacttcatcggggcctcaggcgaagatatcaatgttcttcttgagtacctctaggatgttctcagcttcttcttcgcccatgtcgccccccagcgatacgagctttgtggggtcggcatcatcaatctgtatcttgattatcttgtcgtgtggggcgggctttggcgcgtgcttcgcacggtcatgcggttcggcctcaacattgtgcactacttatggccagatcgccttttgaagcagccaaaggctgaagccccttgaccacgatcactcctgtcgggccgggcatcttgagcttgagataattgtggtgggaaatggcttcgaacttgttcaaggttgcacggccgaagatggcgttgtagttgtacgggatgtcgacaacgtcgaacaatacttgctcttcgcgtctgttttccgccgtgcggaaggctaccatcaactgtgcttggccaagaacttgaactgcttctccgctgaaacgtcggagcgatgctggtgctggggtaagggcttgggtggctaaccccatcttggcatatgcttcggcgaagatgacatcggccgaagtccctccgtccaccaggattcgccggacctcgaaaccagctatctcggctgagatcaccagaggatcttgatgcgggaacattactccttcggcatctcctggcctaaaagaaatttgctggttcagatacttcttgcggacaggctgctgatggttgcttgcttgctgggcgtcgaactccttgcggagggcttgcacttctttgacagccatcactgccttgcccgcacggtcggttctgaacttcctctagatcatgggggggggcttgaccttgccttggcggttgtccttggatggctggggctggcgaacagcgagaggaggtggttcggcaacttgaacttgtgcttgggcttgggctgcggcgacggaagccttatgatactcatcttgtattgcttgccatcgcttggaatcctcttcgccccttgcgtacccgtcaatgatgcaaagtaggtgctcaagcgtctgtggctccttattggcgatttttcttatgagttcaccctcgagtagaccggtcgaagcggcgtttatgacagatgcctcggttatgtcttgaacttggcaccgggcttgcgagaagcgacgcatgtactcccttatcgactcccccggcctctggcgaatgccgagcagatgttgctgcgtcttcggctcctcataggtgcctcgaaagttaaggacaaagatatcgcgtaattgctcccatgagtaaatgttattggctggtaaattgaaataccaagaacgggcaatgccgtctagagcgagatgtattacctttgccttggtattttcgtcgccatgagccgcttcgatcgcggactcataaatggagaggaattcctttgggtctgtttcacctgagtagcgtgggacgggtgggaacttgaactagggtgggattggacgggtcttgattcccccactcagcgatagccccttttcgctccctgccctgttcacggcaccttgctgcgggtatggcgtggcgaagggcgaaatcatggcttgcgcgtgaggttgggccatggcattcggctgcccggctccgattggtgatgcttgctgagctaccatggatgggtcaaaagttggctgtgaccgtgtcatggcgacctggtttggtgcctggtttgctccgaagcctgacgttggtgcttgcggccgaatggttggtgcctaagaagcattgatgaagttgaactacggtccttgactccacggcgaagctcccagacttggctgattcgacggcaaccaactcggtgcatcatgacttgtattcccctccgggtgtgctgaaggggctatacctgaaatgctatggggttggctgagctgctgaaggaaagcttggagctgcgcccgcagagccgaagccccttctgccattgtttgtggtgcttggccaggtggttgaggttgaacttgggcagcgaccggctgagcttgcagctgcacgtgaggggccggatgcgctgctgcggtcgatggctgcccgacgaagtacattggcgcttgcgcgacttgtggcggaaggggctgggtcggcacttgtggatagacttggggtgggacataacctgccgaatactggaggattggtgctgaagcgaccttggatcgtcttgccgtctcgtatgcttgctgttgttcttgcatttggcgaagcatgtcttggagtcgtgtcatgttctgtcgcatggcttccatgttggcttcggtttgtgtttcggggttagggttgacttgggcttgcacagcggtgagcgcagttggggccgctgccgactacgacggagcggcttggggcaccagcagttggcttgtcaaaaggatctccgccctggtctggagtgcccttgccgccgcagccgccttcgccataccagccatgttcggcacctgcacagaggtggcaggggccgaaggcggtagtgatggtgcaggtgcggaagctgatggcgctcctccatcttcggcaacgggcgccgaagtctctgctccctcttcggtggccatatccgccctgacgtcactttcctttcgccttgtaaccttctccttcacgaccttcttcggtggcattcgctctcaatggtttcgcttggaggtccccacgatcgacgccagctgctgtcgaaacgacaaatggttacccttatgaaagggacatttacatgggtacatagggtaattgaggttcacaggcccctgatgggccgtcgggcgatcgtcagctcaatagcccctagacttgatgggcctgaaaggcttcttcggccctcgcgggggcgagcttgctttggcgaagtcgtctcccttcggcatatactcttcgccctgcatccttcgcccaagaggcctctggcttggcagagtacccgtgcgatccctcgcctctcgccgtccttgttccatagtcttcgtcat

SEQ ID NO: 46988 - DNA, 147 bp, Oryza sativa
  Clone ID: PAT_MRT4530_49800C.1
ctcacgcatacggtagatcatagccaccgttcagctgatatagaccgtgtacgccacctccgcccactccaaaaaggggtcattcgggaccataacatccatcgccatcggctttattgagggggctaacataatcgtgggcggtcc

SEQ ID NO: 46989 - DNA, 126 bp, Oryza sativa
  Clone ID: PAT_MRT4530_49801C.1
gaatggacttgtccatattattcgtcactggctggggggcagtcctagtttagtatagtagtttagggtaaggtagtgtagcatccggggcagctgcaacatgtgtcgtgtgcttggcacacgcca

SEQ ID NO: 46990 - DNA, 287 bp, Oryza sativa
  Clone ID: PAT_MRT4530_49802C.1
ccaacccttccaaccaaaaaggccagcaatttctccaacaagaagaagaaaaaggagcctgggcctctagaaccttcagggcccgttccccaaaggaggattccaactccgccttcaataaggcattaaccttggaattgaaaaacgcatccttatttggtccctgggtggcggccccaacttgggttgttggccgtgtctttctttggcttaaggctatttttaattacacctaaaaagcttttatattatcaaatacttgcttcgttggtttttttataattgtt

SEQ ID NO: 46991 - DNA, 307 bp, Oryza sativa
  unsure (1)..(307): unsure at all n locations
  Clone ID: PAT_MRT4530_49803C.1
agatggcaaatgacgcctgtagagaagactctcaaagcagccattgctgttcgtttttganagaatggtgggaacttggaggatggcatgatgcatgcttttgtagaagttggaactgnacatgcntcaattatcccagtnaaaaaagttactttttttaaggaagtctnaaaagtggcttgaattgtttgggagtnattggagtaaacgcttgtacaagtcactgtgagggtacaaagtctgagctaaattatttggaaggttnacaaaaaagggtcgataatcacttccacaaaaaaaaaaaaaa

SEQ ID NO: 46992 - DNA, 1436 bp, Oryza sativa
  Clone ID: PAT_MRT4530_49804C.1
gtttgcctaaacagttttgggcggaagccgtttccactgcttgttatcttatcaatcgatcacccagttatgccattgataagaagactccaattgaggtatggtctagttccccagcaaattattcagacttaagagtatttggttgtactacttatgctcatgttgataatggtaaattggagcctagagctattaagtgcatttttcttggttatccgtctggtgtgaaaggctataagttatggtgtcctgaaaccaaaaaggttgtgattagtagaaatgttgtcttccatgaatcagttatgttacataacaaaccttctactaatgttcctgttgagagtcaggagaaagcaagtgtgcaggtggagcacttgatcagttcagggcatgcaccagaaaaagaagatgttgctattaaccaagatgcacctgttattgaagattcatattcttctactattcagcagtctccaaaacgttctattgcaaaagaacagcccaaaagaaatattaaacctcctcgaagatatattgaagaagcgaacatagttgcttatgctttgagtgtggcagaagaaattgaagctatatatttgcttctttatgtcgatgatatgttgattgctgcaaaagacaaatcagagatagcaaagttgaaggcacaattgagtagtgaatttgatatgaaggatttaggtgcagcgaagaaaattctcggtatggaaattactagagaaagacattctggcaagttatatcttagtcagaaaggttatattgaaaaagttcttcgtcgtttcaatatgcatgatgcaaaaccagtgagtactcctttagctgcacatttcagattatcttcagatttatatccacagtcagattatgatattgagtacatgtctagagttccttattcaagtgcagttggttcacttatgtatgccatgtttgggagatctagagatggacttgttggttatgtggattcagattttgctggagatttggataggagaagatcgctcacaggttatgttttcactattggaggatgtgctgttagttggaaggcaagtttgcaagcaactgttgccttatctactactgaagcagagtatatggctatttctgaagcttgtaaaaaagctatttggcttagaggtttgtacactgagctttgtggagttacgtcttgcattaatatattttgtgatagtcaaagtgcaatatgccttacaaagtatcagatgttccatgagagaacaaagcatattgatgtgagaaatcactttattcgaggtgtgattgctgaaggtgatgtcaaggtatgcaagataagtactcatgataacccagctgatatgatgacaaagccagttcctactactaagtttgagctttgctcaagtttggttggtgttacagtatag

SEQ ID NO: 46993 - DNA, 265 bp, Oryza sativa
  Clone ID: PAT_MRT4530_49805C.1
gagctatcatcagatcaatcagcaacttcagaacaagctgttacccaagcacatttattgatatggtacaaaggtagatccactgattaaaagctgcacatcccattgttagagcaaggcctgcaagttcattcatcttctgaggtaacatcagattggtcagcctcttcttgctttggcacaggagagacaattgcggcccagcaaaaagaatgaccggtccttcaggcggaggaaagttgcaccggagttgcctgaaacgcac

SEQ ID NO: 46994 - DNA, 2343 bp, Oryza sativa
  Clone ID: PAT_MRT4530_49806C.1
atgtacctgttatatattgaagattcagattcttcaactgttgagcactcaccgaaacattctattgcaaaagataatcccaaaagaaatactagacctcctcgaaaatatattgaagaagcgaacatagttgcttatgctttgagtgtggtagaagaaattaaagaatcgtacttggaaattggtgaaattgtcaaagtagaagaaacctatccgttgcaagtggatattcaagaaaggaaggtatatctccaagtgatgaggcaggacaaaaagcaaggtcgtgatgttgagtacttgtctagagttccatacttaagtgcagttggttcagttatgtatgccatgtttgggagatctagagatgggcttgttggttatgtggattcagattttgctgcagatttggacagaataagatcgctcataggttatgttttcactattggaggatgtggtgttagttggaaggcaagtttgcaagcaactgttgccttatctactattgaagcaaaatatataactatttctgaagattgtaaagaagctatttgtcttagagtgatcattgccggtcggcgcccgtggctttttccctggattagtggcgttcgcgaagaacccaaatacccaatggggactgaacctgatccaatccaacaagattcgcctgcacctccacgtccgaccccggcacctcaagctacgcctccacctgctattccagaatccggaccaccgccacctcctgcaccagacatgccacctccacctccgaccccggcacctcaatcttcgcctgcaccgccacctgcaccagacatgacacctccacctggacctggtccggcagcagcaccttcgccacattctcctagtcctagcaacgcaccttgggtcgcacctgcggcggatattccgcccccgcccccgccaccgccaaatccacttccggtcattatagctgtaacagtcccggtgtgcatattatttatggccatccttctctacgtatacgtcaagtgccgcagaaaaaggatggcccttagcacgaagcatcaacatatcaaagccgccgccacacacgagagcgagcctaacgagcttcgtgacgctgaagccggtgcgctcgagccagtggcgtcgtccgccggaccaaaccacggtaaagagtacggcggcgacccagcagccgccgccggaccaaggcagtacgaatatggcgagcgagtggtgtccgacggcccgaggcacggtgcagcgtacaacgagctcgttgccgctggaccgaggctgtacgagtacggcgagctcgcggccgcgacgcgtgatttcgcggaggaggagaagctcggccggggcgggtttggcagcgtctaccagggccgcctcgccggcggcgtcgaggtggccatcaagaagttctcgtcggactcgtcgtcgcagggcaggaagcagttcgaggccgaggtgaagatcatcagttccctgaggcatcgcaacctcgtgcgcttgttaggctggtgcgatagctccatggggctcttgctcgtgtacgaacttgtccagcacggtagcctagacaagcatatctacaacgccgacaagccattaacatggtcagagaggtataagatcattcttgggttaggatcggcactacgctaccttcacgaagagtgggagcaatgcgtcgtgcacggcgacatcaagccaagcaacatcatgctcgactcgtcatacaacaccaagctaggtgacttcgggttggcaaggctcgtcgaccacgacaagggatggcagacgaccaaggccgtgctcggcactgccgggtacatagacccagagttcatcaccacgcgccggccgagcgttcagtccgacatctacagcttcggcatcgtcctcctcgagatcgtctccggccggccaccggttctcttgcaggaaggcgcgccgccgttcatgctgctgaagtgggtgtggagcctgtacggccgaaacgcgatcctggacgcggcggacgagcgcctctgggccgccggtggcggcaaagaggacgacgcgcggcagatggagcgcgttttgatcgtcgggctgtggtgcacacagcctgacatggcggatcgtccgtccattccacaggctatgcacgtcctgcagtccgatgacgcgaagctgccggatctctggccgcagatgtacatggcctcgccgtcgccggcgaagaacttcgcgatgggcgagtaccgtctctccggcgtctcgtccttcacgagcagcggcgtcccctcgtcggctaccagtggcacgacacggtcgtctggctcgtttgcgtactga

SEQ ID NO: 46995 - DNA, 451 bp, Oryza sativa
  unsure (1)..(451): unsure at all n locations
  Clone ID: PAT_MRT4530_49807C.1
gtctcacaccatgtggcatcttgcttaacactggtcttgtagacatcagcaacggcagcatacaccagcgagatactttgccctgtttggcttaattgctctttgtggaattgccacgtactgcgatcaccactatgctgtttctcccaccaacattcgccatgggcaccatggatccgtgtgggggtgcatggtgtcctacgtcgggcctgggtggctccacggccatgttcatgtcccagccaatggcgctcctgccgcagccatgttgcatgccgctacaaggcgtgatgcctgagtgccactgtggcaccagttgccagatgatgcggtgcatgcttcaagttatttgcgctggactcgggccgcgtcagatggtgaatttggcgttgcttttgcctttcttgtgcttcatggccccggtctactnccaactttttttctgtggttg

SEQ ID NO: 46996 - DNA, 661 bp, Oryza sativa
  Clone ID: PAT_MRT4530_49808C.1
cggcacgagggagaactagtctcgacgagaaataatgaacagtaatttaatggaaaagaagaaaacatagaggcgcagtactctgcagttaacaacgtagcacgctcacttcacattatcggcttattgtcaccctgaaacaatctttcactctacaacatctaggtatggactaatgatgaccagctaaaaaaattaatggctgtattgtacaaattaagatccgagatcttggtatgagatgcttgtatacattgtaagaccatgagaaaaccgaaactgaactctcgtcaggcataatcttgcagtagagacacttgttggctgacgataacccaaggccatgaccaaaaaacttcgacaggttccatcaaaggcattaacaaagtcaaagctacgtacttgctgctgcagtggtttgcccatcaggctgagctggtgctgaggaggtcccagaatcatcgttcgccactggaggtggtccgttagctggggtcccattgtcggtggctgttgtccccgcgctctcgtcgatcgactgctttctttcgatgccttccgattgcttacgttcaatggctccagactgtttttctctcaagggcgtgcctgatggcctccgttcgatggctgatcccctggagctggtggaccttgcgca

SEQ ID NO: 46997 - DNA, 102 bp, Oryza sativa
  Clone ID: PAT_MRT4530_49809C.1
atggccgggaagaaattgacaatgcaagagatggaggaggtacctgacagtgactgccgtttcaacaacctgcactttcttgggagggatggtgtaatctga

SEQ ID NO: 46998 - DNA, 584 bp, Oryza sativa
  unsure (1)..(584): unsure at all n locations
  Clone ID: PAT_MRT4530_4980C.1
actccgtttttncctgacnaccagagtctttcacccccctgcctntttctcccgtgtctcaagcgtactccccgcgtcatctcccctattggtatatgcccccctccgttccacccatgcttccccatccgtatctcacagcctttcctgccttaattcctatgtttgtgcatccctggccattcatctattctttcaaatgcacgtctgccagttcccgctactctgcccatgatcgcgcgcatgtctcacttccattctcccgaccactgtggtctgcttaatccactgacttctcttcacgtatattgcatacgctgcgtcatttcctacctctcaccttataccttgcgtcaagtatgtacctttccttctttctatgttccgtgtctctccgctgcaccgtccatgtatgcctgtccgtgtattcacacccatccttgctntaagtcatggacttggccaacctgtccactccaccccacactctgtctggcataagccacaccaaatggcagtaagcgccacgcgctatgcgttacagcacatactaccagttagcaagcagaccctaagcggggggg

SEQ ID NO: 46999 - DNA, 2451 bp, Oryza sativa
  Clone ID: PAT_MRT4530_49810C.1
tcacaccgtctttagggacatctggtgggccccacgctggtcttcacggacaggcacctcctcgtcgtccaggacatcgccgcggtgctcttcccggccaccgagcgcgtcctcggcagggccgacgacctcgtcctcctcgtcgtgtccctgcccgccaagctcacggcgcgatcgacggcctcgaggccttcgtcgccagcgccgtggggcacccgctggggcacggggcacggcggtggtggcggccgagcacgggggagctccccatcccatccactgtctttcgcttcgcctagctcgccctccgctgctctgcccgcggccgcgctcgcccgccgcccctccgccgccgcgctcgccctccgctgctttgcccactgttgcgcttgcccgccgccgctcctctgccgcgctcgcatattgcacggcccggctgtcgggccgggccggcacgggcacgaccctagtcgggccgggccgtgcttgggccgggccaaaattgcgggcttcgtgccgggccgtgggcctcgggccatatggccatctatacccggcgtatatgcgtatgagctactcctatgggctcggaaggaactcgagaacttggaggtcgtcacggcggacgacggcggcggtggcggtggcggtggcaacaacgtgcatggcgacaaggctcccgttgacggcaaaggagaggcagcgactccggcgaaacgcgccgacgtatcaggtggccaagaatgcggcgtggtccgcgtggaggatgtacagcgggtggagacgccagctggagagatcacgaatgccatgaaggacacggagatcatgaagaataaggaccaggagagaggaggcagcgagagggaagaagaggagaccgttgccatggccggcacggggagcagggaggaagcattgctggttatcttcgatacagcatggcaacaggggaacctccttatcggcgggagcggcgggacggcgggtgcgcttgcactaactcgtggccatggcgggtcagggaggcaggcgacgccgctggtcgctgggctgtggcggcggatggagtcacgtcgtcgaggcccagatctgatcgtttcaacccacggccaatctacgaatgacaaatgtgcgccagagtgccagtctgccagacatctccaatccttttccccgtggctatgctcaactacccgcgacggcggcagctcctctccctcccacctgcgggtcgccgcacgccactccctcccgctggtccccccggcgtgcgctgcctcatctcccaccggccgccccgacgagctcgcctcctccctcgcggcgacggacagcgcatggctggcggcgggcgacggcacgcgaggcgcctggggtggcggcagccatatctctcttgcgcacgctcgccgagccgtccgccgcccttctcctcgatggccaccggcgggagaagagggatcgaagccgcgcgcctctccccgtccctcagtcgccgcggccctcctcccgtcgtcctccccctccgccgcaccctctcgctcccgctcccccgcgccgccgactctacttcctcgccaccgcggccgggacggccgcaccgacaccctccccttgtcggagctccgcaagcgccatggcggctccgctgtttctggtggtggtggtggtggtggtgaggacaaaaagctccacttgctccgttgcctcctcgcacgggccgatgtcgccatcgaccccacgcgccgtcgcctgccaccagccatgcgctgtccgtcgccgctccgcccgccccgtggcctgccgccaccgccgctccgccgcaaggacgagggagagccgagaggaagaagaggaagagccaagagtggagaaggagaggtgaggggagccggcgagctcagcttggggggcggcgggagcggcgtcatcagcgtcgctccgcccaccgcccgccgccgctccatttcgccgcgctgccgctccgcttcctcccgtcacccaccgcccgccgtcacttcattcatcgctggccgctgcgccgcttcgctccgtcgccactccgctccatcgccgctccgcccgtcgccccctcagcaccgtcgctcgcccttctctcctggcagtgttcagccaccggctgttcttcggagttcagaggatgctgaatttgctgatactgatcaaagttggagcaccaactacagacgagtaccaactgtcccgatcaagtactacggacgaaatagatttgcagatccactaacatcgatcaggatgctgccggccggcggcgaccgtgatgacgcaagggaggatgccggagacgggagtggagacaagcgcttgcgagccaagcaggctgcggaggaggcgacctgcatcgcgcgcgcgctagctgtctcttccgatggccccggccgtaagcaggaggccagcttggactaa

SEQ ID NO: 47000 - DNA, 684 bp, Oryza sativa
  Clone ID: PAT_MRT4530_49811C.1
atgcggctgcgcagcctcctgcacacgcttgcggccggaggagtgcttgttgtggggctcggagtggctggtgggagcgcggtggcgcggagaccgcatcctctgccgttcggcgatgggcggcggtggccattgtcccggttctactgctccaagggcgggcggcgttcggctaggagctgcgacggccgccgtcttcgctccctgccacggccgcgtctccgccgctcgccgttgtcgccgctccagcgacggccgagctgtcctggccggaggagcgaatgggcgaagcaactttcccgctcccgacggggattggccatggcgaacggcctgtggggcgagcttgggcaggcgttgagggaggcgcagctggtccgcgtggacgcgctggggctggtctccatggtcgtgcaggcggcgcgccgttgggacgcgtgccggcggctggggcagcacgtggagctcgtcggcggcctgctgcgggagctcgagctcgccgagctgatgcggcgggatgccaccaggcggcccctcgagcggctccacggcgcccatccactgacgacgcgcgctcgttcttaccgcttgccgccggctgaaggggaagaaggggagagaaagagagagaagggagagagggaggaagaaggaaaaggactgacatgtaagccccacacctaa

SEQ ID NO: 47001 - DNA, 2029 bp, Oryza sativa
  Clone ID: PAT_MRT4530_49812C.1
atggatggcggcgtggtggggattggagtggagactgctggactgccgcaataccgttataacccctcctccatcaccacccagtccggccaccgagcaccaacccagtccgagtccgggactgttgttgctgacggcagcgagctcggcgccctcgatgggaagcaagccgtgcccccctcccccgcggccgccatcgggtttaagcccaatccggatatgggacatctggtgggccccacgctggccttcacggacaagcagctcctcgtcatccaggacatcgcggcggtgctcttcccggccaccgagcgcgtcctcggcagggccgacgacctcgtcctcctcatcgagtccctgcccggcaagctcacgacgcgatcgacggcctcgaggccttcgtcgccggcgccgtggggcacccgctggggcacggcggtggtggccggcgagcacgggggagctccccatcccatccactgtcttccgcttcggcctagctcgccctccgctgctctgcctgcggccgcgctcgccctccgctgctttgcccactgctgcgctcgcccaccaccgctcctccgccgcgctcgcatattgtgttttagtggctggttgcaggaagcaggaactcaagaacttggaggtcgtcacggcggatgacggcggcggtggcggtggcaacaccgttaccgtgcatggcgacaaggctcccgttgacggcaaaggagaggcagcgagtccggcgaaacgcgccgacgtatcaggtggccaagaatgcggcgtggtctgcgtggaggatgtacagcgagtggagacgccagctgcagagatcacgaatgccatgaaggacacggagatcgtgaagaataaggaccaggagagaggaggcagcaagagggaagaagaggagaccgtcgcaatggccggcacggggagcagggaggaagcattgctgaatcccaggaaccaagcgcttcgtccccaatcccaagggcgcccggggtttgaggcggagcggggaggaggaggtcctccgaagatcaagtgcttcaagtgtggccgcgaaggccatcaccaggcaacatgccctaaccctcctctctgttactcttgtcacaacactgggcacatctctgctcattgtcctatgaatctgatgaagagaggtgttaaactctgtggatttggaatcccagggcatggtttctatagccttcaagttgagatatctgatgcagaggttgctagagctcctgtgagaggtattctaacagtaatccttggtgagggttcagtggtaaaaatagttactgaattgaaacatttgtttgtgggactaaactgggaatggaaagtgaagcaactaaatgacaaagagtttttaatcaatttcccttttgatgaggttagaagcaaaatctcaacatgcaagtgttttgactttgagacctctttgattaaggcaagtgtggtagagactggaatgactgaggaagccgtggatgaattggttgctgtgtgggtgaaaatatttgggattccaaaaattgctaaaacagtcaattggttgcttcactcaattgctgccattgttgaactggtgggggagtttgaaactatggatggagctagcttaaggagagatggtcctgtgagagtcagggtggcgtgcaaggatcctagggagttacatttctcagttcatgtttacatcaacaaggtgggttacatgactaagtgggaaccagagggctacccaccatatgaaaacagacagatgccccctgatgatgatggtggtgatgataaagatgataaaaatgatgaagagttgcaagaagacatgaaccttgatgatgaatttaagaatcaaaatagccctagagggagacaactcagagatgctgacagtaatcaggggaataggtttggggcctattctgcccccctgcatacaaagggaaatcacatgggacacaggggtgtagtatcaagaagctggtatctaagaaaagttccctactga

SEQ ID NO: 47002 - DNA, 3558 bp, Oryza sativa
  Clone ID: PAT_MRT4530_49813C.1
atggcgagtttgaagtatgatctaccgctcctggatcgagacacaagattctcactttggcaagtgaagatgcgagccgttcttgcacaacaagacctcgatgatgcgctttctggatttgacaagaggacacaggattggtccaacgatgagaagaaaagggatcgtaaggctatgtcatatattcatcttcatctatctaacaatattttgcaggaggtgcttaaggaggagacagccgctgggctgtggttgaagctggaacagatatgcatgactaaggatctgaccagtaagatgcacctgaagcaaaaattatttttgcacaagttacaagatgatgggtctatgatggactatctctccgctttcaaagaaattgttgttgaccttgagtctatgagggatactattctttatagccgtgatactctaactttgaaagaagtttatgatgctctgcatgccaaagaaaagatgaagaagatggtaccctctgaaggttcaaattcacaagcagaaggcttggttgttcggggcatgcaacaggagaagaacacaaagaaccaatcaagagataaaagctcaagtagctaccgtgggagatcaaaatccagagacaggtataagtcatgcaaatactgcaagagagatggacatgatatctctgagtgttggaagctgcaggacaaagacaagagaaccggaaaatatgtaccaaaaggtaagaaagaagaggaaggtaaagccgcagttgttactgatgagaagtctgatgtagaattacttgttgcttatgctggttgtgcacaaactagtgaccagtggattcttgatactgcatgcacctatcacatgtgcccgaatagggattggtttgccacttatgaagttgttcaaggtggtactgttttgatgggtgatgatacaccatgtgaggttgcaggtattggaacagttcagatcaagatgtttgatggctgtatcagaacattgtcagatgtgcgacatattccaaatttgaagagaagtctcatctctttatgtactcttgattgcaaagggtacaaatattccggtggagacggaattttgaaggtaattaaaggctctcttgttgtgatgaaagctgatattaaatctgccaacctgtaccatctgcgaggtacaactatattaggtaatgttgctacagtttctgattcattatctaattccgatgctactaatctttggcatatgcgtcttgggcatatgagtgaaattggtttggcaaaattgagcaagcgaggattgctagatggacaaagcatcaggaagctcaaattttgtgagcattgcatctttggcaagcataagagggtgaagttcaatacatctacacatactactgaagtttggccttatttcttgaagcacaaatatcaagcttttaatgtgtttaaagagtggaaaactatggttgaaagacaaactgaaaggaaggtgaaaatcctccgtactgacaatgggatggagttctgttctaagatatttaaatcatattgcaagtctgaaggcattgtttgcctaaatagttttgggcggaagccgtttccactgcttgttatcaatcgatcacccagttatgccattgataagaagactccaattgaggtatggtctggttccccagcaaattattcagacttaaaagtatttggttgtactgcttatgctcatgttgataatggtaaattggagcctagagctattaagtgcatttttcttggttatccgtctggtgtgaaaggctatcagttatggtgtcctgaaaccaaaaaggttgtgattagtagaaatgttgtcttccatgaatcagttatgttacatgacaaaccttctactaatgttcctgttgagaatcatgagaaagcaagtgtgcaggtggagcacttgatcagttcagggcatgcaccagaaaaagaagatgttgctattaaccaagatgcacctgttattgaagattcagattcttctattgttcagcagtctccaaaacattctattgcaaaagataagcccaaaagaaatattaaacctcctcgaagatatattgaagaagcgaacatagttgcttatgctttgagtgtgacagaagaaattgaaggtaatgccgaaccttctacatattctgaggctattgtttctgatgattgcaatacatggataactgctatgcatgatgaaatggaatcacttgaaaagaattatacttgggaattggtgaagttgccaaaggagaagaaacctatccgttgcaagtggatcttcaaaagaaaggaaggtatgtctccaagtgatgaggcaagatacaaagcaaggctagttgctaaaggttatagccagattccaggtattgatttcaatgatgtcttttcccctgttgtgaagcatagttcaattcgcactttacttagtattgttgcaatgcatgattatgaactagagcaaatagatgttaagactgcatttttacatggggagttagaagaggacatttgtatggagcaacctgaaggttttgttgttcctggaaaagagaacctagtctgtaggttgaagaaatctctttatgggttgaagcagtcacctagacagtggtataagagatttgactctttcatgctttctcagaagtttagaagatccaattatgatggctgtgtttatctcaaagttgttgatggtccaactatatatttgcttctttatgtcgatgatatgttgattgctgtaaaagataaatcagagatagcaaagttgaaggcacaattgagtagtgaatttgagatgaaggatttgggtgcagcgaagaaaattctcgttatggaaattactagagaaagacattctggcaagttatatcttagtcagaaaggttatattgaaaaagttcttcatcgtttcaatatgcatgatgcaaaaccagtgagtattcctttagctgcacatttcagattatcttcagatttatgtccacagtcagattatgatattgagtacatgtctagagttccttattcaagtgcagttggttcacttatgtatgccatgtttgggagatctaaagatggacttgttggttatgtggattcagattttgctggagatttggataggagaagatcgctcacaggttatgttttcactattggaggatgtgctgttagttggaaggcaagtttgcaagcaactgttgccttgtctactactgaagcagagtatatggctatttctgaagcttgtaaagaagctatttggcttagaggtttgtacactgagctttgtggagttacgtcttgcattaatatattttgtgatagtcaaggtgcaatatgccttacaaaggatcaaatgttccatgagagaacaaagcacattgatgtgagatatcactttattcgaggtgtgattgctgaaggtgatgtcaaggtatgcaagataagtatgatgacaaagccagttcctgctactaagtttaagctttgctcaagcttggtgggtgtgacagcatag

SEQ ID NO: 47003 - DNA, 3249 bp, Oryza sativa
  Clone ID: PAT_MRT4530_49814C.1
atggcggtacgggcgacggcgaggcttggtcacgcactctcgcatatgtcaggaggaaacgacagcttacccatctgtagacggaggcgaaaagcggcggcggacgcaaaccgccgcattaaccggagctctcgccgggaagagtgtagcagcaacagcaagcagcagctaatctcgccggaagaaaaaccaaagccagaggcgacacgggagtcgtcgtgcttcggcgacagctcggtcggcatcgccgccgccgccgccggtgactctgggcgcggcggcgcgctggatcgcaagctgcaggcggtgaccacggcggtgtacggtgcctcgttgcactccgggaaggagctcctcatccgggtcacgtggacgccgaacgctgccggagccaccggcctcgccgtcgccttcgacgacgcgctctctccgtcgtcgaggtgcgcccaccatgtgctgcacaagaagcgcgggagcaggtcctcgctaccaccaccggcacggctgtgggcgtccactagaacaccgccgaggccacgattaattcccatggcgagtttgaagtatgatctaccgctcctggaccgagacacaagattctcactttggcaagtgaagatgcgagccgttcttgcacaacaagacctcgatgatgcgctttctggatttgataagaggacacaggattggtctgttgatgagaagaaaaaggatcataaggaggtgcttaaggaggagacagccgttgggctgtggttgaaattgaaacagatatgcatgactaaggatctgaccagtaagatgcacctgaagcaaaagttatttttgcacaagttgcaagatgatgagtctgtgatggaccatctctccgctttcaaggaaattgttgctgaccttgagtctatggaggagaagaacacaaacaacaaatcaagagataaaagctcaagtagctaccgtgggagatcaaagtccagaggcaggtataagtcatgcaaatactgcaagagagatggacatgatatcttcgagtgttggaagctacaggacaaagacaagagaaccggaaaatatataccaaaaggtaagaaagaagaggaaggtaaagccgcagttgttactgatgagaagtctgatgcagaattgcttgttgcttatgttggttgtgcacaaactagtgaccagtggattcttgatactgcatgcacctatcacatgtgcccgaatagggattggtttgccacctatgaaactgtgcaaggtggtactgttttgatgggtgatgatacaccatgcgaggttgcaggtattggaacagttcagatcaagatgtttgatggttgtatcagaacattgtcagatgtgcggcatattccaaatttgaagagaagtctcatctctttttgtactcttgatcgcaaagggtacaaatattccggtggagacggaattttgaaggtaactaaaggctctcttgttgtgatgaaagctgatattaaatctgccaacctgtaccatctgcgaggtacaactatattaggtaatgttgctgcagtttctgattcattatctaattccgatgctactaatctttggcatatgcgtcttgggcatatgagtgaaattggtttggcagaattgagcaagcgaggattgctatatggacaaagcatcgggaagctcaaattttgtgagcattgcatctttggcaagcataagagggtgaagttcaacacatctacacataccactgaaggtattcttgattatgtgcattctgatttatgggggcctgctcgtaagacatcctttggaggtgctcgttacataatgactatcgttgatgattattcgcgaaaagtttggccttatttcttgaagcacaaatatcaagcttttgatgtgtttaaagagtggaaaactatggttgaaagacaaactgaaagaaaggtgaaaatccttcgtactgacaatgggatggagttctgttctaagatatttaaatcatattgcaagtctgaaggcattgtgcgtcactacaccattcctcacacacctcaacaaaacggcgtagctgagcgtatgaacaggacaattatatcaaaggcccgttgtatgttgtctaatgcaggtttgcctaaacagttttgggcggaagctgtttccactgcttgttatcttatcaatcgatcacccagttatgccattgataagaagactccaattgaggtatggtctggttccccagtaaattattcagacttaagagtatttggttgtactgcttatgctcctgttgataatgattcttctactgttcagcagtctccaaaatgttctattgcaaaagataagcccaaaagaaatattaaacctcctcgaagatatattgaagaagcgaacatagttgcttatgctttgagtgtgacagaagaaattgaagagcaaatggatgttaagactgcatttttacatggggagttaggagaggacattaatatggagcaacctgaaggtttttttgttcctggaaaagagaacctagtctgtaggttgaagaaatctctttatgggttgaagcagtcacccagacagtggtataagagatttgactctttcatgctttctcagaagtttagaagatccaattatgatagctgtgtttatcttaaagttgttgatggttcagctatatatttgcttctttatgtcgatgatatgttgattgctgcaaaagataaatcagagatagaaaagttgaaggcacaattgagtagtgaatttgagatgaaggatttgggtgcagcgaagaaaattctcggtatggaaattactagagaaagacattctggcaagttatatcttagtcagaaaggttatattgaaaaagttcatcatcgtttcaatatgcatgatgcaaaaccagtgagtactcctttagctgcacatttcagattatcttcagatttatgtccacagtcagattatgatattgagtacatgtttagagttccttattcaagttcagttggttcacttatgtatgccatgtttgggagatctagagatggacttgttggttatgtggattcagattttgctggagatttggataggagaaaatcgctcacaggtgatgtcaaagtatgcaagataagtactcatgataacccagctgatatgatgacaaagccagttcctgctactaagtttgagctttgctcaagcttggtgggtgttacagtatag

SEQ ID NO: 47004 - DNA, 264 bp, Oryza sativa
  Clone ID: PAT_MRT4530_49815C.1
atggcaggagcaaagcgctcacatgactttttgccccactctgccaacccctccccacccgacgtgaccgcccctgagcgtgagcctttagtgcatcttagggctcaagatcaggtttcaaccgggtgcaacttcaaattggtgctgctctcctccaccggcaataatggccccttcaatcctccaccagccaatgtcttttcaaactcaagtgcggtgaagactttcaaaccaaccgatggtacaggtgcaggaggcaaattg

SEQ ID NO: 47005 - DNA, 3012 bp, Oryza sativa
  Clone ID: PAT_MRT4530_49816C.1
atggcgagtttgaagtatgatctaccgctcctggaccgagacacaagattctcactttggcaagtgaagatgcgagccgttcttgcacaacaagacctcgatgatgcgctttctggatttgacaagaggactcaggattggtccaacgatgagaagaaaagggatcgtaagactatgtcatatattcatcttcatctatctaacaatattttgcaggaggtgcttaaggaggagacagccgctgggctgtggttgaagctggaacagatatgcatgactaaggatctgaccagtaagatgcacctgaagcaaaagttatttttgcacaagttgcaagatgatgggtctgtaatggaccatctctccgctttcaagaaaattgttgctgaccttgagtctatggaggtaaagtatgatgaagaggatttatgccttattctattgtgttcattgcctagctcatatgcaaacttcagggatactattctttatagttgtgatactctaactttgaaagaagtttatgatgctttgcatgccaaagaaaagataaagaagatggtaccctctgaaggttcaaattcacaagcagaaggcttggttgttcggggcaggcaacaggagaagaacacaaacagcaaatcaagagataaaagttcaagtagctaccgtgggagatcaaagtccagaggcaggtataagtcatgcaaatactacaagagagatggacatgatatctctgagtgttggaagctacaggataaagacaagagagcaggaaaatatgtcccaaaaggaaagaaagaggaggaaggtaaaaccgcagttgttactgatgagaagtctgatgcagaattgcttgttgcttatgctgattgtgcacaaactagtgaccagtggattctggatgctgcatgcgcctatcacatgtgcctgaatagggattggtttgccacctatgaagctgtgcaaggtggtactgttttgatgggtgatgatacaccatgcgaggttgcaggtgttgaaacagttcagatcaagatgtttgatggttgtatcagaacattgtcagatgtgcggcatattccaaatttgaagagaagtctcatctctttatgtactcttgatcgcaaagtgtacaaatattccggtggagacggaattttgaaggtaactaaaggctctcttgttgtgatgaaagctgatattaaatctgccaacctgtaccatgtgcgaggtacaactatattaggtaatattgctgcagtttctgattcattatataattccgatgctactaatctttggcatatgcgtcttgggcatatgagtgaaattggtttggcagaattaagcaagcgaggattgctagatggacaaagcatcgggaagctcaaattttgtgagcattgcatctttggcaagcataagagggtgaagttcaacacatctacacatactactgaaagtattcttgattatgtgcattctgatttatggggcctgctcagtggaaaactatggttgaaagacaaactgaaagaaagatataccattgataagaagactccaattgaggtatggtctggttccccagcaaattattcagacttaagagtatttggttgtactgcttatgctcatgttgataatggtaaattggagcctagagctattaagtgcatttttcttggttatccgtctggtgtgaaagactataagttatggtgtcctaaaaccaaaaaggttgtgattagtagaaatgttgtcttccatgaatcagttatgttacatgacaaaccttctactaatgttcctgttgagagtcaggagaaagcaagtgtgcaggtggagcacttgatcagttcagggcatgcaccagaaaaagaagatgttgctattaaccaagatgcatctgttattgaagattcagattcttctgctgttcagcagtctccaaaacgttctattgcaaaagataagcccaaaagaaatattaaacctcctcgaagatatattgaagaagcgaacatagttgcttatgctttgagcgtggcagaagaaattgaaggtaatgccgaaccttctacatattctgaggctattgtttctgatggttgcaatagatggataactgctatgcatgatgagatggagtcacttgaaaagaatcatacttgggaattggtgaagttgccaaaggagaagaaacctatccgttgtaagtggatcttcaaaagaaagaaaggtatgtctccaagtgatgaggcaaggtacaaagcaaggttagttgctaaaggttatagccagattccaggtattgatttcaatgatgtcttttcccctgttttgaagcatagttcaattcgcactttactcagtattgttgcagtgcatgattatgaactagagcaaatggatgttaagactgcatttttacatggggagttagaagaggacatttatatggagcaacctgaaggttttgttgttcctggaaaagagaacctagtatataggttaaagaaatctctttatgggttaaagcagtcacctagacagtggtataagagatttgactctttcatgttttctcagaagtttagaagatccaattatgatagctgtgtttatcttaaagttgttgatggttcatctatatatttgcttctttatgtcgatgatatgttgattgctgcaaaagataaatcagagatagaaaagttgaaggcacaattgagtagtgaatttgagatgaaggatttgggtgcagcaaaagaaattctcggtatggaaattactagagaaagactttctggcaaggatcagatgttccatgagagaacaaagcacattgatgtgagatatcactttattcgaggtgtgattgctgaaggtgatgtcaaagtatgcaagataagtactcatgataacccagctgatatgatgacaaagccagttcctactactaagtttgagctttgctcaagcttggtgggtgttacagtatag

SEQ ID NO: 47006 - DNA, 339 bp, Oryza sativa
  Clone ID: PAT_MRT4530_49817C.1
aaaactaaacacatatattcttattgtatattttaaatacaagcccgccccccaaatcatcaatcactctccacttccacacacctaaatttctctataaccagtctctcaagagaaatatcacattattcttcccttttccacattcggcatcacaaaataacaccaatcttaataatcacacaacccacatataaataaaatttaacatataccactaataacaacactttacatgcaacaatcaattaccaccacctactcttcaagttcccccccttctcgaatggacacaccactttataccacatgcatgcatataatcattttcaaatcatt

SEQ ID NO: 47007 - DNA, 3366 bp, Oryza sativa
  Clone ID: PAT_MRT4530_49818C.1
atggacagcacagataaaataatccatgagtggcattttactgggttaaagaagccgatgttggatgagcagcacgtgtcgtcgtgttcgtcgttccgccgaatcaaatctgttctgcacgctacccgtcgactccgagtcggcctcgtcccacgcctgagcgagaagatcaaagcagcagcagccgcccaggcgaagcagagagaaaccaggaggaggagcagcgtccataccatccagcagcacgcgtcccgaggagaaaaagaaaatagggcagccgcctgcctgcctgttcacgtgatttttattcacgttgaattgctacacgcacacaagcttgtgtaccaggaagtttcagatctacgctacatgcacacagacagtgcacctagaggattaattctcatggcgagtttgaagtatgatctaccgctcctggaccgagacacaagattctcacattggcaagtgaagatgcgagccgttcttgcacaccaagacctcgatgatgcgctttctggatttgacaagaggacacaggattggtccaacgatgagaagaaaagggatcgtaaggctatgtcatatattcatcttcatctatctaataatattttgcaggaggtgcttaaggaggagacagccgctaggctgtggttgaagctggaacagatatgcatgaccaaggatctgaccagtaagatgcacctaaagcaaaagttatttttgcacaagttgcaagatgatgagtccgtgatggaccatctctccactttcaaggaaattgttgctgaccttgagtctatagaggtaaagtatgatgaagaggatttatgccttattctattgtgttcattgcctagcttatatgcaaacttcagagatactatactttatagccgtgatactctaactttgaaaaaagtttatgatgctttgcatgccaaagaaaagatgaagaagatggtacccactgaaggttcaaatcacaagcagaaggcttggttgttcggggcaggcaacaggagaataacacaaagaaccaatcaagagataaaagctcaagtagctaccgtgggagatcaaagtccagaggcaggtataagtcatgcaaatactgcaagagagatggacatgatatctctgagtgttggaagctacaggacaaagacaatagaaccggaaagtatataccaaaagtggattcttgatactgcatgcacctatcacatgtgcccgaatagggattggtttgccacctatgaagctgtccaaggtggtactgttttgataggtgatgatacaccatgcgaagttgcaggtattggaacagttcagatcaagatgtttgatgtctgtatcagaacattgtcagatgtgcggcatattcgaaatttgaagagaagtctcatctctttatgtactcttgattgcaaaggatacaaatattccggtggagacggaactttgaaggtaactaaaggctctcttgttgtgatgaaagctgatattaaatctgccaacctgtaccatctgcgagatgctactaatctttggcatatgcgtcttaggcatatgagtgaaattggtttggcagaattgagcaagcgaggattgctagatggacaaagcatcgggaagctcaagttttgtgagcattgcatctttggcaagcataagagggtgaagttcaacacatctacacatactactgaaggtttgcctaaacagttttgggcggaagccgtttccactgcttgttatcttatcaatcgatcacccaattatgccattgataagaagactccaattgaggtatggtctggttccccagcaaattattcagacttaaaagtatttgattgtactgcttatgctcatgttgataatgttatgttacacgacaaaccttctactaatgttcctgttgagagtcaggagaaagcaagtgtgcagatggaacacttgatcagttcagggcaggcaccaaaaaatgaagttgttgttattgaccaagatgcacctgttattgaagatacaaattcttctactgttcagcagtctccaaaacattctattgcaaaagataagcccaaaagaaatactaaacctcctcaaagatatattgaagaagcgaacataattgcttatgctttgagtgtggcagaagaaattgaaggtcatgccaaaccttctacatattctgaggctattgtttctgatgattgcaatagatggataactgctatgcatgatgagatggagtcacttgaaaagaatcatacttgggaattggtgaagttgccaaaggagaagaaacctattcgttgcaagtggatcttcaaaagaaaggaaggtatgtctccaagtgatgaggcaaggtacaaagcaaggttagttgctaaaggttatagccagattccaggtattgatttcaatgatgtcttttcccctgttgtgaagtatagttcaattcgtactttactcagtattgttgcaatgcatgattatgaactagagcaaatagatgttaagactgcatttttacatggggagttagaagaggacatttatatggagcaacctgaaggttttgttgttcctggaaaagagaacctagtatgtaggttaaagaaatctctttatgggttgaagcagtcacctagacagtggtataagagatttgactctttcatgctttctcagaagtttagaagatccaattatgatagctgtgtttatctcaaagttgtttatggttcagctatatatttgcttctttatgtcgatgatatgttgattgctgcaaaagacaaatcagaaatagcaaagttgaaggcacaattgagtagtgagtttgagatgaaggatttgggtgcagtgaagaaaattctcggtatggaaattactagagaaagacattctgacaagttatatcttagtcagaaaggttatattgaaaaagttcttcgtcgtttcaatatgcatgatgcaaaaccaatgagtactcctttagctgcaaatttcagattatcttcaaatttatgtccacggtcagattatgatattgagtacatgtctagaattccttattcaagtgcatttggttcacttatgtatgccatgtttgggagatctagagatggacttgttggttatgtggattcaaattttgctggatatttggataggagaagatcgctcacaggttatgttttcactattagaggatgtgctgttagttggaaggcaagtttgcaagcaactattgccttatctactactgaagtagagtatatggctatcttgccagttcctgctactaagtttgagctttgctcaagcttggtgggtgttacagtatag

SEQ ID NO: 47008 - DNA, 1630 bp, Oryza sativa
  Clone ID: PAT_MRT4530_49819C.1
tcagtcctcttccttcttcctcctccctctctcccttctctctctttctttccccttcttccccttcggccggcagcggacggcgagaacgagtggcgacgacaggacgggcgagggcaggagcggcgagccgtgcagccgctgccgctgccgtactcctcctttcgaggcctcgcagctgccgccaccctgacacctctccccgccagcgctcgcggctcccatccaccgacgacgcggcttgcagcgatgcggttgcacagcctcctgcacacgcttgcggccgggggagtgcttgttgtggggctcggagtggctggtgggagcacggtggcgcggaggccgcctcctctgctgttcggcgatgggcggcgatggccattgtcccggttctactgctccaagggcgggcggcgtccggctaggaattgcgattgtgacgacggccgccatcttcgctccctgccacggccgcgtctccgcggctcgccgttgttgccgctccagcgacggccgagctgtcctggccggaggagcgaatgggcgaagcaactttcccggtgggcgactgggcgagcggatgcgctgcttcttgtagtccagccagtcgatgccgcacatgtagacgtaggtgttgtccttcttgagcagctcccgggcgggattggccatggcgaacggcctgtggggcgcgcttgggcaggcgttgagggtggcgcagctggtcggcgtggacgcgctggggctggtctccatggtcgtgcaggcggcgctggcgaaatatttcgtaaaatacacaccgtttagtagtttgaaaatcacgcacgcagaaaacgagggagaggagttgggaacgagatgcacaacagagacaccaattttatgtggaaaacccttgcgagccgttcttgcacagcaagacctcgatgatgcgctttctggatttgacaagaggacacaggattggtccggtgatgagaagaaaagggatcgtaaggctatgtcatatattcattttcatctatctaacaatattttggaggaggtgcttaaggaggagacagtcgctgggctgtggttgaagctggaacagatatgcatgaccaaggatctgaccagtaagatgcacctgaagcaaaagttatttttgcacaagttgcaagatgatgcgtctgtgatggaccatctctccactttcaaggaaattgttgctgaccttgagtctatggagatgaagaagatggtaccctctgaaggttcaaattcacaagcagaaggcttggttgttcggggcaggcaacaggagaagaacacaaagaaccaatcaagagataaaagctcaagtagctaccgtgtgagatcaaagtccagaggcaggtataagtcatgcaaatactgcaagagagatggacatgatatctctgagtattggaagctacaggacaaagacaagagaaccggaaagtatataccaaaaggtaagaaagaagaggaagttgtgcacaaactaagtgaccagtggattcttgatactgcatgcacctatcacatgtgcccgaatagggattggtttgccacctatgaagctgtccaaggtggtactgttttgatgggtgatgatacaccatga

SEQ ID NO: 47009 - DNA, 591 bp, Oryza sativa
  Clone ID: PAT_MRT4530_4981C.1
atggcaagcgccgacgacctcctccacacgggttggcgggcagacttctccaccatagcaactagcaagggacagtacggtggagcgtcgtcatcttctgtcgcccagcgccgccgtcgtcagtccgccaccacccgtgccggcactggcatcgtcgtcgtccaccgcccgcgcccacgcccatgtcagccgcggcgtcgtccgttcactgtcgccaccatcatcgtcgtccaccgcccgtgccgcgcgcgcctagccacggcgtcgtccaccgcccgcgtcgcgcattctccggtggagcacgccgatgagggtgcacatgtcctcgtcctcctcatcttcctccccaccaccaccaccaccaccgacgccgcccacccgctgcccatccccgccatccacatggatcttcacccagatctcgtggtaggaactggtgtggatggcgagcgtgtactcctagctcaggttgatgcactcgcggcggtgttcgagctcgtgttcgcgttcgcgctactggtggtggcgttcgcgggcaagcgaacggacgacaccgcggctgatatgggcgtgggcggtggacgacgataa

SEQ ID NO: 47010 - DNA, 477 bp, Oryza sativa
  Clone ID: PAT_MRT4530_49820C.1
caagagcgaggggatctataaatcgccccatagtatgtgctgtacagcgcgtttgtcacctctgtgtgcactggctctgtagccgagcatctgttcaggccagagcactagtcagataggcagagttctctgcgtggaagttcatgagaatgcaggttcgataggttgcaagcatttgagccaatttggagtgtgaggtctcaagctggcacaactgagttcttcgatgtctctaatgagcaatttcaatgtaccggagtatctgttgtccgtcgagttattgaacctagaggccttctactaccccattacactaatggtgcatctctagtatatatcatccaagggagaggtataacagggccaactttcccaggctgtgctgagtcctaccaacaacagttccaacaatcagggcaagcccaattgaccgaaagtcaaagcccaagtcaaaagttcaaggatgaacatcaaaag

SEQ ID NO: 47011 - DNA, 3687 bp, Oryza sativa
  Clone ID: PAT_MRT4530_49821C.1
ctacataacagcacatcctccaatagtgaaaacataacatgtgagcgatcttctcctatccaaatctccagcaaaatctgaatccacataaccaacaagttcatctctagatctcccaaacatggcatacataagtgaaccaactgcatttgaataaggaactctagacatgtactcaatatcataatctgattgtggacataaatctgcaacctcgcatggtgtatcatcacccatcaaaacagtaccaccttgaacagcttcataggtagcaaaccaatccctattcgggcacatgtgataggtgcatgcagtatcaagaatccactggtcactagtttgtgcacagccagcataagcaacaagcaattctgtatcagacttctcatcagtaacaactgcggctttaccttcctcttctttcttaccttttggtatatactttctggttctcttgtctttgtcctccatagactcaaggtcagcaacaatttccttgaaagcggagagatggtccatcacagacccatcatcttgcaacttgtgcaaaaataacttttgcttcaggtgcatcttactggtcagatccttagtcatgcatatctgttccagcttcaaccacagcccagcggctgtctcctccttaagcacctcctcgccgccgccggagctcgcccgccggctccggagctcgccgccggaaagccggcgggcgagccatgatggcagcggcggggctccctccagggcggcgacccctctcaggcgcggagaggcggcgaacggcggcggttgggggagcgacggcggtggcccatcctggcaaggaggcggcggatccaactccgccttcgccggatctagccatcccctggctggatccagccggagggtgtgtggttggtggcggacgaggccgtggcgctgcggcgcgtcaaggacggcagcaccggcgcaacgaggcggtagcaacggtgcgacgttggcagaggaggcggcggcaacgacgcgccggcgacgatgcttgcacggctgctggcggtggctgccgcggcgaggagatgcgcgcgggcggcagagctcgtgccgccgggccgggcggcagcggggcgagcgacggcggcagcacggcggcgatggcggctcgaggctcgacggtggcggtgccggtggctgccgcggctgtggcccgaggcagccggggcaacacctgtggtggcagtggcggtggctgacggtgtggagcctaaggcctcggagcttggcgcaggtggcgtcagcggctgaccggcgaggctgcatctggtcggcgcggcatcgtttggaggaggggtcggagaccggcttggcgcagagtggcgcagccgatggcagtagaggccggctcggcgcgagaggcgcgggcggcggagatggaggccggcttggcgtgagaggcgcagctgatggagggaggccggattggcgcgagaggcgcgtccggtggaggaggccggcttggcgcgagaggcgcggccggcggtggaggaggcaacctcggtgtgagaaggagctgccggtaggtgtggcgcggtcttcagcgcttgaaggctggccggcgggggacgttggtgcaggggtcccacatgtcggcagagcttgagtggtggtagagcatcggtgcgtcagacgtggatttgcaggtggtgagcggtgggtgaaacccagcccggccttggccgggccgacaacgattccctgagggcgttgtcgtgcagctccagaactatcattggtatacgatgcaacagaagctctattgtcatggatactaagctgacgagtaagctttgacaatagagatgattgtttttggtacttctcccgtctacgtttagcattgtggtcctcttggagaagttcttcaatctttgcattggtttgagcacttattttgctgtagagctgatttagcatatcttcctttgctttctccacttggcaaagtacgattgcctttggaacatttgctgccaaactgttcaaaacagcctctacataaccacgaacttcttgagacatccaccgaagttcttcttcaggatcagcaggcttccgggccatcgtatcaagggacccatcagaatggctttgcctcatggaaccaccctcaggagtatttaaacccttcacagaaccccctttgctttgaatgacacctcttatcttcttcatccattcaaccttgtcagcaatagtctcggccttcagtataacagcactatgagatttcagcacagttttgtaggcaactctgttagtaatcttaaatacaagacttgggcctttctctgccccattggccttctttgaatccttcaaactcttggaaagctcttcctcttctatctcttccagattacattcctccaggacaataacacctcgaaaatgtctctcctcttgtttcttggtgtacccaagctttccactcttctcatttaggacaaaccatcttttgctccattcattattttttgcacttttcttcaaaaggtagcctgcagttatttcaccaccaggcccagcaacctgcaaatttggtccctcttttgcatctttatctttgtcttgctgactgaatttttctttcaacgatttcaaggcaccaccagattgctcagatcctgtgcctgagcccttgttggactgttctgcatcttgggctttcttagatgacctgtttttcacctcatcctcacgacgttgcctttccattcttctttgtactaaacggatgaagtgttgtggtgggacaaaggcacgctccatatcaacaagtgcaactaccatcttttttgcatcacttttgaagacatccaatgcattggttgcaatttcaacgacctcttcaacacacagccgtgatggctcctttgccatttcaagtactccttttattaaggattttaaacctttctttcgaggagctccagttaggatggatttgagtgtctccgcttcagcctgccaggcagtttccagtgagttctcagaaccaactgatccagcttgggccgatgcaattgagacagattgcccatctggatcaatatccttcgctagtctgagagctcgagatgatgcaacatcagcagcttgcattgctggtatcacaacaatcaatattgcatcattatgtccagcatattcactgatatctggcttaccaacattgtgcaatgtaagagtaaaagtgaagcccagcaacaaacctgtacttgtccgcagcttgaggtaaatctcatcgtttcggcctttccctgatccaccggacgcccccttgctcagcctgtcctgcagcgaatggcggagagcacttgccgacacctgctgcgacttgctgtcgatctgcaggacgatggatttgctgctcagccccggatccctctgcaggtcgaccactatcggcgcccgcgtcgccccgttctcacccgtcggcagcacggggtggccgatgaggctgttgagcacggccgacttgccggcgccgacgttgccgagcgcgacggcgttgaggaaggtggaggggcggcgcgggctggcctcgtcggaggggtcgtcgtcggccaggagggaggcggcctggcgcatggactcggcgagctggacgagctcgtccatggcctccatggccgacgacgacat

SEQ ID NO: 47012 - DNA, 283 bp, Oryza sativa
  Clone ID: PAT_MRT4530_49822C.1
gggaccagacgaagaaacattaaataaacccccaaaatttcatagggccgaacggtttgggttactagttaagcaacctgggggcatacttgcatatctaaatgatcggtcaaacaggggggacaagcacaaaacatccgatgattccctagggggaattaaggtgcgacgccccaggggacccgacattctaagggtttttttggggggatttttttttttaaataagggagggggggaaaacccgggtacttggcccggaactggggttcccagagggggg

SEQ ID NO: 47013 - DNA, 661 bp, Oryza sativa
  Clone ID: PAT_MRT4530_49823C.1
tttcgtaaaaaaaaaaaaaaaaaaaaaagagggggggggggggggggggaaaaaaaaaaaaaaaaaaaaaaaaaaaaaaaaaaaaaaaaaaaaaaaaaaaaaaaaaaacaaaaaaaaaaaaacaaaaaaggtgcgacccctttaaaaaaacccaaattttcactccctttttttttccactggtccgccccgctttctttgggggggcggggggggaaaccccccggcccccccatttttaaacccttttgttttgggaaaccccctttcctctccccccctttattgccttttaggccccttcccctttttcctcccctgggttttcccaacttaggcccccccctgggccccctcccctttaaccgggcctttacttaagggggatgggggcccccccctcaccgtgccctttaccctcgccggtttggtggttcccccccctttcctcttttcctttcctaccccccaggtccccgtttttttccctttttcccttttttttttggccccctttccgggtttccccctttatgctttatatccccgggtcccctttaaggcttccttttttttttctttcccctcctttcccccaaaacctttttttaggggttttgtgtcctttttcttggcccctcccccccctaaaaattttttt

SEQ ID NO: 47014 - DNA, 486 bp, Oryza sativa
  unsure (1)..(486): unsure at all n locations
  Clone ID: PAT_MRT4530_49824C.1
cccacgcgtncggtactacaacaacatggcatccataaatcgccccatagttttcttcacagtttgcttgttcctcttgtgcaatggctctctagcccagcagctattaggccagagcactagtcaatggcagagttttcgtcgnggaagtccaagagaatgcaggttcgataggttgcaatcatttgagccaattctgagtgtgaggtctcaagctggcacaactgagttcttcgatgtctctaatgagcaatttcaatgtaccggagtatctgttgtccagcgagttattgaacctagaggccttctactaccccattacactaatggtgcatctctagtatatatcatccaagggagaggtataacaaggccaacttttccaggctgtgctgagtcctaccaacaacaggttcaacactcaggccaagccccattgaccgaaagtcaaagccaaaagtcaaaagttcaagggtgaacatcaaa

SEQ ID NO: 47015 - DNA, 512 bp, Oryza sativa
  Clone ID: PAT_MRT4530_49825C.1
ccggccgggacaaaaccattcaagttcattagtactacaacaacatggcatccataaatcgccccatagtttcttcacagtttgcttgttcctctagtgcaatggctctctagcccagcagctattaggccaagcactagtcaatggcaaagttctcgtcgtggaagtccaagagaatgcaggttcgatagggtgcaagcatttgagccaattcggagtgtgaggtctcaagctgggacaactgagttcttcgatgtctctaatgagcaatttcatgtacggagtatctgttgtccgtcgagttattgaacctagaggccttctactaccccattacactaatggtgcatctctagtatatatcatctaagggagaggtataacagggccaatgttcccaggctgtcctgagtcctaccaacaacagttcccacaatcaggccaagcccatttggaccgaaggtcaaagcacagtcaaaagttcaaggatgacatcaaaagatccaccgttt

SEQ ID NO: 47016 - DNA, 538 bp, Oryza sativa
  Clone ID: PAT_MRT4530_49826C.1
accacactatggcaactataaataatataaaccctcaaacatactttcacaaagaaaaaaagccgtcggagaggatatttaagagcacgaggactgacctacttaactagtctcttgtcttacccaatcaacttcatgtgcatttacaatacaataatgtcctatgactagaatccgctcgttaaacacacggactacagtaactagaatcatatccatcattgcaccttcagcaacaaagacaagtgcagtcgacagatctttatcaacaaagacaacatccgcatactcaatatggaacacactgttctaacacgtagaataataccttttacacactgaggataaaccacaacatcaataatcctaaccgcgctgatacataacaaataagagctgaacggatacaaatttcaacacctagaatatcaccattcttagccttgcccatatgactgcacacaaagtaaatatataccataatgaactcctttcaccattttgaaacatcaacaactcacaagcgttgtgtatatta

SEQ ID NO: 47017 - DNA, 337 bp, Oryza sativa
  Clone ID: PAT_MRT4530_49827C.1
ctcaacaacatggcatccataaatcgccccatagttttcttcacagtttgcttgttcctcttgtgcaatggctctctagcccagcagctattatgccagagcactagtcaatggcagagttctcgtcgcggaaatccaagagaatgcaggttcgatagggtgcaagcatttgagccaattcggagtgtgaggtctcaagctggcacaactgagttcttcgatgtctctaatgaacaatttcaatgtacccggagtatctgttgtccgcccagttattgaaacctataagacttctactaccccattacactaatggggcatctctagtatatatcat

SEQ ID NO: 47018 - DNA, 1096 bp, Oryza sativa
  Clone ID: PAT_MRT4530_49828C.1
cggcacgaggcttcattcgcggaaaactcctctcctcctcctcctcctcctcctccgtctcgcccgccaccaataaatcccccaatcccgcgcgcccccgccgcccccgccgccgcggaaccctaaccctagctctccccgccgccgcgatggtgggcggcggcgccggcgcagacgccggcatcgaccgggtgctgtggacggaggccgagatcgccgcccgggtgtcggaggtggccgccgagctcgccgccgacctccgcgccctgcgcgagcccgccgtcgtcgtcggcgtcgccacgggggcgttcctcttcctcgccgacctggtccgccgcgtcgacgcgccgctcgccgtggacctcgtgcgcgccgagtcgtacggcgacggcaccgagtccagcggccggccgcggatcacctccgacctcaaagtcgacgtcgccgggaagcacgtcgtggtggtggaagatattgtggacactgggaatactgtttcctgtcttattgcttatttagaaaagaaaggagcatcatccatatcagtctgcacttttcttgaccaaaccggcaaggagaactgctaattttcagctagtgggggatggaaaattttatagaggttttgagtgcccagattcctttgttgttggatatggcatggattatgctgaactctaccgcaacctgccttatgttggagttcttaaggccgagatgtacaaaaaagatacaagcaattagaaaaggagtacttgcaacatgttgaagagataaaaaagttagaaaggaatacacatattccatttttgaaatctgtaggcaaatcttacgtaattttgtacaagcaagaagcttaaagcttggctactcttactttttctctatcaaaagctcaggagaaactgtcctgtttcaacagcactccgtcaccaaactgcaaccacggaacaaaacaatgtggttgtataacatgttagatatttgatttatagacagcgatcaaattgatttggttgtaacttgcatcttaaaggaaaacttttgtggctgtcttcatcacttgtaataccaacatcattctagtttggtggtc

SEQ ID NO: 47019 - DNA, 460 bp, Oryza sativa
  Clone ID: PAT_MRT4530_49829C.1
cggtccgagaggatgtagatttgataggttgcaagcatttgagccaattcggagtgtgaggtctcaagctgccacaactgagttcttcgatgcctctaatgagttgtttcaatgtaccggagtatctgttggccgttttgttattgaacctagaggcctactactaccccattacactattgttgcatctctagtatatatcatccaagggagaggtataacaggcccgactttcccaggctgtcctgagacctaccagcagcagttccaacaatcagggcaagcccaattgaccgaaagtcaaagccaaagccataagttcaaggatgaacatcaaaagattcaccgtttcagacaaggagatgttatcgcgttgcctgctggtgtagctcattggtgctacaatgatggcgaagcgccggctgttgccatatatgccactgatatcaacaccggcgct

SEQ ID NO: 47020 - DNA, 2946 bp, Oryza sativa
  Clone ID: PAT_MRT4530_4982C.1
atggaagcgacggcggtgagcttggcgaggtccgtcctcgacgtcgtcctgagcagcgttgggcctgccgtcgccgacgaggtcgcgcgcttcctcggcgtccccaaggaagtgaagttcatccgcaacgagcttgagatgatgcaggccttcatcaagacggcctcctcttccttgcaccccgacgccgccgccaccgccggaggcggggacaacgacatcttgaggacgtgggtgaagcaggtgcgcgacctggcctatgacatcgaggactgcctcctcgacttcgccctctacgccgccaggatctcgtcgtcgccgacgggcagctcctggctccggccaggccccctcgcggcgcgcggccgcatcgccgaccggatccgcgagctcaaggccagcgtcgaggagctcaaccagcttaggctgcgttaccatatcgtcgtcgacgaccaccaccacccgagccgcacgtaccatgagcgcgtcgtcgccatgctccccggcggccatggctcgagctccgacgagctcgcgttccaggagtcggagatcatcggccgcgcaggcgagaaggagcagctgaaggatctgatctcccgctgcagtggctcgccgtcgccgagcgtggtggcggtgtgggggatgggcggcatggggaagtcgtcgctggtgaggatggtgcacaacaacccggcggtgctcgacgtgttcgactgcagcgcgtgggtgacggtgccgcacccgctcgacggcgccgacgagttcaggcggcggctgaggaagcagctcggcctcggcttgggcgccgcagccggagacgaccagaacgtcatccaggactacctgcgggagaagaggtacatcatcatggtggacgacctgctcagccaggaggagtgggatcagatctggcaagtcctcaagccgttgaacaacaagggcagcgtcgtcatcgtcacgacgcgccgtaaggacgtcgccgggcactgcgcgggcctcgcgcctgaggagcatggccatgtctacgagctgaaacgtctggatgataagcaatccaaggatctcctttgtcgaaaggtctacagaacaccaaactataccttgccggaggacatgaaaccgcacatcagtcgcatcttgaagggatgctgggggcttcctcttgctatatccacaatcggaggtctccttgccaataggcctaaaacaggaatggaatggaagaagttgcacgaacaccttggagtagagctggagtccgaccagctccaggacatcacgaaggtacttgtctcaagttaccatggcctgccatatcacctgaagccaatcttcttataccttagtatcttccccgagaacaacgagatccggcgcacccgcttgttgaggagatggatcgcagaaggttacatagcgaataaccgcgacatgcccgttgaagtagtgggagagcgcttcttcaatgagcttatcaacagaagcatgatccaatcttccaaggtcagccatggcctgaaagtcgatcgctgtcgagttcatggcatgatgctccatataatcctgtccaagtccatcgatgagaaccagctctttgtcatcaagaagcactgtaacgaggttccacaaagtaagatacgccacttggttgtgaacagatggaagaagagggatgaaaagttggagaacataaacctgtcattgattcgatcgctaacggtatttggagagtgcccagcatctctcattacccttgagatgcgaatgcttcgtgttctcgacctggaagatatggccaatctgaagaacgaagaccttaagcacataggaaagctgagacacctaagatatctgggtcttagaggaacagatatttccaagcttccatcttctcttcagaaccttctgtacctagagacgcttgacatccaagacacgcaagtcacccagctcccagatggcattgctaaacttgagaagctccgttaccttctcgccggagtcaatttctcaagagatttgctacaaaagatgccgcagtttgggatggaaaaccacaattccaacctgttggggaacttggcatcctgcctatattgttacaacacccaatcttgtgagatatctggcatggatcaattcagtgtaatggttcctgaaggaatcgagaagttaaggaacttgcacatgttgagtgtggtcaatgtgcgcaagagcaaagatgtggctgggaagctggagaggctgacgaacttgcaaaggctaggggtcacaggtcttggtcaggaggaaggcaaggagctatggaactcgataaagaacctcaataggttgcaacggcttgaggtgcgctccgagtcacttgattttcttgtcaacaacaaggacatagatgcaacaccaccaaagtatctagtgtcactcaggttgtgcggtctgttggacgaacttcctgtatggatcaagtcactcaatgatctgacgaaggtgaagctaatagggacacaactaaagcaggatgacattcatcgcctcaaggacctgcgcatcctagcttcactaggcttgtgggagaagtcctacaaagagaagtcactgatattcaatgatggcacattccgaaagctcatattcctcgatatcgatggattggagattattgaaacagttaacattgagaagggtgcgatgcctgaacttcaacaactttgggtgaacaggtgccagaaattgagcgatgatgataatggcttgtctggagtgttacatctcctcaaccttaacgagcttgttctgaagaaatgtggtcctaaggagaaactggtgcagctattgcaaagccagctcagtacgcatgtcaagcgccccaagttcctagttggaaagtccatatcaccaactagctcagaggcgagcacgagcacggccacacagactggatag

SEQ ID NO: 47021 - DNA, 225 bp, Oryza sativa
  Clone ID: PAT_MRT4530_49830C.1
atggagatcgccgcccggccctcccttgttcagccgccactcgtcttggcggcggcgcaaggaggcaaggagcggaggagacaacgagagcggcatgcgacgagcagaggggatcgagacaacggcgggcggaggggagacgatggtggagcgctgcttgctcgacgctcgcggccgggctcgcgccttgctcgtgacggggaggaaattgggtttggggagtga

SEQ ID NO: 47022 - DNA, 478 bp, Oryza sativa
  Clone ID: PAT_MRT4530_49831C.1
cccacgcgtgcgcccacgcgtgcggtgctacaacaacatggcatccataaatcgcccgatagttatcttcacagcttgcttgttcctcttgtgcgatagctccctagcccagcatctattaggccagagcactagtcaatggcagagttctcgtcgtggaagtccgagaggatgtagatttgatatgttgcaagcatttgagccactacagagtgtgaggtctcaagctggcacaactgagttcttcgatgtctctaatgagctgctccaatgtaccggagtatctgtagtccgtcgagttatagaacctagaggcctactactaccccattacactaatggtgcatctctagtatatatcatccaagggagaggtataacagggccgactttcccaggctgtactgagacctaccagcagcagttccaacaatcagggcaagcccaattgaccgaaagtcaaagccaaagccataag

SEQ ID NO: 47023 - DNA, 471 bp, Oryza sativa
  Clone ID: PAT_MRT4530_49832C.1
gttcattatgtcctacaacaacatggcatccataaatcgccccatagttttcttacagtttgcttgttcctcttgtgcgatggctccctagcccagcagctattaggccagagcactagtcaatggcagagttctcgtcgtggaagtccgagaggatgtagatttgataggttgcaagcatttgagccaattcggagtgtgaggtctcaagctggcacaactgagttcttcgatgtctctaatgagttggttcaatggaccggagtatctgttgtccgccgagttattgaaccctgaggcctactactaccccattacactaatggggcatctctagtatatatcatcccagggagagggataacaggggcgacttttccaggcttggctgagacctaccagcagcaggttcaacaatcagggcgagccccattgaccggaagtcaaagcccaagccctatagttcaaggg

SEQ ID NO: 47024 - DNA, 441 bp, Oryza sativa
  Clone ID: PAT_MRT4530_49833C.1
ttttcgtataattacgatacttatcgcacgccgccgccgtcgccggccgccgcacgtatcaccgtcgcgcgccggcccagggaggaggaggcgagagtgcgagatccaccacccgatgacctcccaggcggcgacgacgacgaccacggcggcggcggcggcggcgtggaccagggaggacgacaaggcgttcgagaacccgctcgcggggtgcgcggtgccaccacccgtgggcagaggggcccccccgataccgaatgttttctccccacttcttccccagaggggtccccggtgcaaaggtccgcggagtgaggtgctgaggcactacgaggcgcttgtggaggacgtcgcggtcatcgacgcgggccgcggtcccgctcccgtcttcgacggggagggaatccccggtgccccccaacgaaccgggacccccccccc

SEQ ID NO: 47025 - DNA, 538 bp, Oryza sativa
  Clone ID: PAT_MRT4530_49834C.1
aaaaaaaaaaaaaaaaaaaaaggggggggggggggggggggaaaaaaaaaaaaaaaaaaaaaagaattacaaatcaaagaacataaaataatacaataacaatggccttacctttatttaagtgcccagtttttgtgacctcgtacggggctgggctttgttcttttttttggccaccccctatctttctttggggggggggggggggtccccctactttcccccatcttaaataccccttcttaacacataactttttccccccacttacactatcctcatattacccatctaccgtactctctaacaggcccttccccatcgtgattgtcgatggtggcgccccctgaaggcgttactgttacccgccctttagcggtccctacgcccggttggttccgtttatttctcatccccttaccgcgcttttccctgccttctttacctccgttgctgcctttatgtttcggtttttttgctgtaggttacctggggcgcccccaactgggttaaccttagggcttcttttcgggggccg

SEQ ID NO: 47026 - DNA, 560 bp, Oryza sativa
  unsure (1)..(560): unsure at all n locations
  Clone ID: PAT_MRT4530_49835C.1
ccggccggnaaaaaaaaaaaaaaaaaaaaaaaaaaaaaaaaaaaaaaaaaaaaaaaaaaaaaaaaaaaaaaaaaaaaaattcagttcattagtccctacaaaaacatggcatccataaatcgccccatagttttcttaacagtttgcttgttcctcttgggcaatggctccctagcccagcagctataaggccagagcactagtcaatggcagagttctcgtcgtggaagtccgagaggatgtaaatttgataggttgaaagcatttgagccaattcggagtgtgaggtctaaagctggcacaactaagttcttcgatgtctcaaatgagttgtttaaatgtaccggagtatttgttgtccgccgggttattgaacctagaggcctactactaccccattacactaagggggcatcttatagatataatatccaagggaaaaggtataaaggggccgacttttccaggttgtcctgagaactaccagcagaagttccaacaataagggcaagcccaaattgaccgaaaggtaaaagccaaagccataagtttaaaggatg

SEQ ID NO: 47027 - DNA, 1549 bp, Oryza sativa
  Clone ID: PAT_MRT4530_49836C.1
ttcttctgagaagaagatctgaagatgaagcaaacccgtagcagcctcctgggcagatatgaagcaaacccgtagcagcctccttgcagatgatgaagatcgcccgagatggagtgatttgccatcggagctgaccgaggatattgcaagcaggctgcttgggtacgatgtggcagagtaccttcgcttccgcgccgtctgcaaggcgtggagggagtgcaccccccacccgcgcgaactcgacagccgcttccgcccgcgccgctggatcctcctctcctccacctccggcgacatgcggtgccgcttcctcaacatcgccaccggcgcctgcatccaggtcgacctcccggaggagctcgccgccggcggccagatccagatcgagtgcaggaccgagggcctcctggtccttcgcgacaaggtgaccgacgccattcgactcctcaatcccctcacaaaagccgtcaccgatctcccacccatcaccgccgccatggcaaacgtgatccctgagaaacgtgtccatgccgagatcccgtggtcgctgattgcctacgccggcatctccgacgagacctccccaccgaccgtcgctattttcctgagagacatgcggttaaacatcgcgtacgccaaggccggcgaccgccattggaagctcctcgacgacaaagcttggtcgaccttcccaagcagcatcagccgtagcgacggccaacaactccggtatgtcaactacctgtccgtggtgacgctccgtggccgcatctacttggtgacataccaaggtaacatattgaagctaagcattcgtcctaggccccagctgatacccatcgtcaaggaccagaccaaacattcgatgtggcacggccgagttctgtgccccaacgtggtctcctaccttgtgccgcccaacgacgacgatcaccgtatgctcatggtgcgctattacggcgacctcacccacctcacagatcacgagcagaggtgcatcaagcgaaggaagaagaacgacttgatcaagctgcccagcaaaaatccatgccggtacaattggcgaatactgcaggtgttcgaggtggacatcgtcaggaagaagctggtacgcgtggacggcatcgccgacgaccgggcggtgttcgtcggcgatgtggcgtgcgtctcgctctctatcgacaggttcccttccatccttggcaacacggtgtatcttgggatgaacagctgctgcgctgtgggctttggcttgtgccacctcaaggaccggactgttgagccgcggctcgagcatgtcctcgaaagtgggcgcaaggcgccactccttgttgatatcagcctcttccacctaggaaggattgtgccctttgcacgcccctgcactcttgaagagtaccttgcaacaaaccatctcaaggaggcacagcagatggatgagcttgttgatatggcatgctcaactgcaagatggagtggaagaacaccctcagtgacaatatctgatgctgcttgctggatggggaagaacccagagctgttcatgtag

SEQ ID NO: 47028 - DNA, 465 bp, Oryza sativa
  Clone ID: PAT_MRT4530_49837C.1
ccgggcatacaaaacccttcaagtctattagtactacaacaacatggtgtccataaatcgccccatagttttcttcacagtttgcttgttcctcttgcgcaatggctctctagcccagcagctattaggccagagcactagtctatggcagagttctcgtcgtggaagtccaagagaatgcaggctcgatagggtgcaagtatttgagccaattcggagtgagaggtctcaaggtggcacaactgagttcttcgatgtctctaatgagcaatttcaatgtaccggagtatctgttgtccgtcgagttattgcacctagaggtcttctaataccccattacactagtggtgtatctctagtatatatcatccaagggagaggtataacagggccatctttcccaggctgttgtgagtcctaacaacaacagttccaacaaatccccgcccgcccaattgcccgaaa

SEQ ID NO: 47029 - DNA, 956 bp, Oryza sativa
  Clone ID: PAT_MRT4530_49838C.1
cccacgcgtccgcgagcccgtctcagccgcgtatctcctcttcctcctccctccccgacgatgtgtgtctccgtcgagccaccttcctcaacctccgcgccacgcacgcaactagcccaccagccgcgtcgtttccccaccctcctcgctccgccccacctcctaggctgctcgcctcctcggcgtatcacaaaaaactgaaaccgccggcacccaccaacaagcggtcttgatggctgacattaaaaaccgagcagatttcatggatgtcgagctcttcaccatgaaacgtcgttcgatttgttttcttagtcctcccctgaaatcttcaacctcagacttcaccttgaacacacccaagggggtgtatattaacctcccgaagaattaagaaaggagggattggttttgtttcggctctacttcaagtttctaccgtcagcgttaaacaggattgaaatttatttagtacatacacttcactaaaggagacaattcatggtatgaggatcactggtatgtatactaattttacatcacgctgcatacctgcaccgatagttcattttaattctgaattccggatgcaaattgcttactatcgttgtaacagctgctggagcaatctatatatacattgggtaatcataattgcctcatattcattcttggtcacatgatttctatatattattatatgcccatcctgcgacacatgctgtgcaagaggtacaagtaattccttccataacaacagtctagctatttttatacacattgatccctaattttttatatgtctatccagattcttatttggtatatgatgatcctactttacacccatataacttaatttttcatttcttttctggctagagtataaagaatgctctttgtaatagcaaaattgaatagtttgtcaaatattgggtttttcatcaaggccaaaaaaa

SEQ ID NO: 47030 - DNA, 340 bp, Oryza sativa
  Clone ID: PAT_MRT4530_49839C.1
tttgtttttttttgtttttttgtttttttttttttttttttttattattgtactttatttttttttgtttgtcttttttttgtcagaaacactttttcaacctgaattaagaggaacattttttggccccggggggaaaatttgggaactaaaataatggcgagccacccaaaatccttccccaaaaaaaaaaaaaattttttgggggcaacccaaaaaatcccaaaccccattgaaaaattaaaaattgtgcccccccaaaattttacaaaaaacggggctaaaaagggccaaattaaggttgggccatatcaggcccccccatttaattttgcccccg

SEQ ID NO: 47031 - DNA, 138 bp, Oryza sativa
  Clone ID: PAT_MRT4530_4983C.1
tcgtgagaatctggcaaacggagaaggcaggcgggagcttctacttttttatcaactatgcatgatggccaaagtaggcgtcctctgcggttcaaaacctatgtatgtatgacataaatccaccagtatcactccagc

SEQ ID NO: 47032 - DNA, 711 bp, Oryza sativa
  Clone ID: PAT_MRT4530_49840C.1
taagaatgaatctaatgctttcgatcctattgcagcttccttgccagggttgtggcctgggtgcttcggcgcacggccaagctctccatcggatgccgctccttcagcttcaattatctcagggacatcaccataaaatccccaaagggtcctgttctccccgcctgggttcgtgaaattagacttggcctgcgaaggccactcacccaactgggatttaccatactaaaccatggccctatcctgcaattgcaaatctctgacctggacattgtgctcaggcaacctgcaaaatctgctaagaaaaagaaacctccccctcgcaaatcaacctcgacctcaccggcaaaaggaaaaggaaagccgaaaggacaagggaaatggaggcttataacaaacattgccagtcttttgtcgctttctatagtggagctgaggttcaaggctccaaaagctgctctcggcatcaaggaccttaagattgatttatcaaaaactggaggattggatccaattctcaatgttgaaatacatatcttacctttatttgtgcaagcattagaaccagatggcattgacaacagtacatcagtatttagcaaattggattggtgggtcagtggacaatactgttcagccatggacacagctgactgtagctctttcttgtttgaggatatagtactcttgtgtgatcttcatcagaggtaa

SEQ ID NO: 47033 - DNA, 797 bp, Oryza sativa
  Clone ID: PAT_MRT4530_49841C.1
aaattacacccccgaaagatttcttctctcacaatccagtcctcgaactcgaacccagccatggcgaccaagcagagcctcctcctcctcctcgccctcctcgccgccgccgcggccgtcgcctccgccgtcaccgacgtcgagtactgcaataagggcaagaagtacccggtgaaggtgagcggcgtggagatcgtgcccgatccggtcgcccgcggcgagcccgcaaccttcaagatctccgcttccactgataaaactatcggtaaagggaagctggttattgatgtgaaatacttcttcttctatgtccactcggaaactcgtgagctctgtgatgtgacttcctgcccggcaagtggtgacttcttggtagctcatcagcaaaccctgccatcatacactccaccaggctcttacaccatcaccatgaagatgctgggtgataacgatgaggagctgagctgcatctcgttcgggttcagcatcggtttcgctgcatcagaagccaccatctgaatgcatccagaggcagaattcagaaatatcacaccatggatgtaattacaaaagcacctatgtatcttagatcatagaactcaaatacaatgcgcatctgccaacacattgtgttcaactaagacgttttatccagagttgaacatacaataaaaacatcactcactagtgtacctaactccgtttagctgttgaaatgtgttgcattgcatgttgaattgagcctggatgcatcttgatcttgagaaaaaaaaaaaaaaaaaaaaaaaaaaaaaaaa

SEQ ID NO: 47034 - DNA, 306 bp, Oryza sativa
  Clone ID: PAT_MRT4530_49842C.1
atggcgcgcgcggccctcgatctggcagccagagacaaagagttgacggattcactggtggccctcatgcccctagcaggacgccgtccgtcgccctcgtcaggcaaggcatcgatcagagacgaagaggaagggaggcgaatcggtgagcgcctgagtggtggacggtggaggaggactggtgggtggggtagcggcggaggtgggtcggctgccaatagcaatggccctaccctccttaagtggcacacacgcaaaattctattttcgcatgcaggcctcttaaggacccgcacatcaaaatga

SEQ ID NO: 47035 - DNA, 349 bp, Oryza sativa
  Clone ID: PAT_MRT4530_49843C.1
aaaaagtgcaagcaatagcgatggctgattattcacttggtaaactatgttcttcaagggtggaatcattccatgaggaaaaggagaaggtgatcaagatagaagaaaggcttgcttatggagctcgggttataatccaatcttcacccttgtgtgaagagagtgatgacagcactgaatcactgtaaggggctgtgattttgttttccttttgtttttctgtgagctggctcattgtaatttggtgtgtgtctcaatagttctgggagtagcttcaaagtgcaattttattcattttatgacatgtgtgatattcagcaatcaatttattacaccttcacgaattaaa

SEQ ID NO: 47036 - DNA, 458 bp, Oryza sativa
  unsure (1)..(458): unsure at all n locations
  Clone ID: PAT_MRT4530_49844C.1
cccacgcgtccgcgacttccttccttccttccggttgcttccgccgatcgacttctcgccccccaaatcgattcgccccccgcctcgatctatcgattccgcggcagcgccccttcgatcggttggagatggccaggacttccttcaagctcgagcacccactgggtttgttgcttcttctctctcgccccattacctctttgccctgtcaatttgttgcgattaggttgcaatctgtgattcgatcgatggtgtggtggtagattgattgcgagtttgtagatgggcgttttataatcggaactagctttgcgtttttgtgtggtatatgatgatctgattgtagattatatatgagtactacttttgtggagactgccttgtgtgtgggattggtttgtcgggcgtngtgtttggtgttggagtatgatttggcccacccaaggatggattttttc

SEQ ID NO: 47037 - DNA, 234 bp, Oryza sativa
  Clone ID: PAT_MRT4530_49845C.1
atggccatcgtctgcgcagatcgtcagattggttctcaatgtagcctgccatacgcggatcaagcacaggtggaaggcgccggcacaggctcttcgtcagaggtggacgaggcgtcggaagcgccggagctgtgcgacatggctagcaagggagagcggtgcgagcggagcgaggagcgcggcgtcgtgcgcggggtgcgcgtcgtgcgcgtggagcgcgcctcgagagtctga

SEQ ID NO: 47038 - DNA, 972 bp, Oryza sativa
  Clone ID: PAT_MRT4530_49846C.1
atgcccctctgtagcttgcatttcccggctttccgcgcgccgtcgcccgtcgtcgtcttcggtgcgaggatgcaagatgcgaggcgtgcttcacttggcctccccgtctgcatcaccatcaattgtcgcctgctcgacttcctcgtcccgctatgctaccagagaggaaggcgggggaggaagctcgacgccgacaccgggaggagagggaggtggcggggaggccagcggccacgccggatgcaagtagtgtcaatgacaacatggagagacgaaagcgttatctttgatctcgccgagcacgaactcgaggaggaagactaccctgttgtcgactacgaaggaagatatccccttcatcgatgtctcggccggtcacctgcgcctctctaccccgaggccccgagcggccgagttcccatcgtctcatcacctctcttcgtcctcttctccgcccaccccaagccgccacctctccccccatcctcccatctctgcaagctcctccgtctcaccgcctccacatccgcctcctccccaccccgcgccggccgctcccgggaacccacccatgccaggccccggcccagcccccgcccctccccctcctcctcctcctccctctacgcgcgccccagcctcctcgacatggagcgtggccgtgcagcccgccgcgccgacgtcgacgcgttcctcgcctctctcggcatcgacccgggtgagctcgctggcctcgagctccacgccaccatcgatgtcatgcgcgagcgcgtcgagttcctacattccctcaagcgcgtcgagttcctgcactccctcggcctctccgcacgacgtgacgatggaggggatatctacccccgccggccgcacgccgctcctgcccccgtctccgcgcctctcggccttgtcggcagcagtggcgtcgtcctccactgtcgttgccctcctcacgaaggcctcggtggctga

SEQ ID NO: 47039 - DNA, 441 bp, Oryza sativa
  Clone ID: PAT_MRT4530_49847C.1
tcacctttggtctctcgatgtgaacgatgagcactgaggatcttgtacttcatgcttaaaggaagttgattgctcaacttcagtgcttccttccgcagtagccgcctgcgaacgacgaacatcgaagaccagcccattcattggttcacgggcctggtcaagcaacctcttgtgcagtagaacatcatcaacccgctcgacattcacatccaaagcatacctgttcaatgcatgaagccaagcatgtctggcggggaggctgtagaagtgggcccagagctcgtcgtcgtcgagcgcgccgccgcccccgcggatccggcggagaacctcgcggtaggcttccgccttccgccgcctgccccccgccgacgccccccgcgtccgcggcggtggtggcgactcccccccgcggctgccgcacgactcggcgccgctggccat

SEQ ID NO: 47040 - DNA, 2393 bp, Oryza sativa
  Clone ID: PAT_MRT4530_49848C.1
gcacgaggctcctctctctcctctcctctcctcgcgtataaagccggcggccgcttctccgtcgaagctccccccctccacgacggccggcgcctccgccgccgcctccgccgccgccgcggcacagcgtcggaaaccctagcctgcgcgggggcggccggaggacagggaggttgtttgtttgtttgtgtgtatcatacggatacggcggcatggccagcggcgccgagtcgtgcggcagccgcgggggggagtcgccaccaccgccgcggacgcggggggcgtcggcggggggcaggcggtttgtttgtttgtgttaccgcgaggttctccgcggcatgcgcgggggcgccgagtcgtgcggcagccgcgggggcggcggcgcgctcgacggcctcccgctctgggcctctacagcctcccccaggtatgctttggatgtgaatgtcgagcgggttgatgatgttctactgcacaagaggttgcttgaccaggcccgtgaaccaatgaatgggctggtcttcgatgttcgtcgttcgcaggctgctactctggatggaagcactgaagttgagcaatcaacttcctttaagcatgaagtacaagatcctcagtgctcatcgttcacatcgagagaccaaaggtgtttccatgaaattatatttgcatgtgacgataagcctaagcttcttagccagctaaccgctctacttggggaacttggccttaacatccaagaagcacatgcattttcgacgagtgatggctattctcttgacatctttgttgtcgatggctggagtcatgaggtcgatgttctacgagatgcattaaggagaggagttgaaaagataaagtacaaagcatggccattggttcagtccatgcctactaggacaggtcacgagctaatggaggattctcctccagctgattttgtccagattccagctgatgcaactgatgtttgggaagttgatccaaggcttctaaaatttgaacgaaaattagcatctggatcatttggtgatctataccatgggacatactgtagtcaagatgtagcaatcaaagtactcaagcctgagcgggtcagcgttgatatgctgcgtgagtttgcacaggaagtatatataatgaaaaaggttcgtcacaagaatgttgtgcaatttattggtgcatgcaccagaccacctattttgtgtatagttacagagttcatgcgtggaggaagtattttcgactttctttacaattttagaggaacttttcagctccctgatgtgttaagaattgcctctgatgtatccaaggggatgaactacctgcatcaaattaacattgtccacagggacttaaagactgctaatcttcttatggatgaccaggttgtcaaggttgcagactttggagtagccagagttaaagaccagtcaggagttatgactgcagaaacaggaacctatagatggatggctcctgaggtcatcgagcacttgccctacgatcagagagcagatgttttcagtttcgggatagttatttgggagctgctgactggaaagcttccttatgaagatatgacgcctcttcaagcagccgttgccgttgtccaaaaggatctgagacctatcattcctgctgatactcatcctatgcttgctggtctacttcagaaatgctggcagaaagatccagctctaagaccaactttttcagagattcttgatatactaaattctataaaggaggctgttcgaagttctggacatcagaagagacactcaggtcgatcttattccaggcagagacgaagcggttgatgcagcaattttccttttttaaaaaaaaaaaaaatcttgtttggtagtgacttctaagctgcgatgatggttttcttgagctccacctccttccttttattatggtcaaatccaagcatttatgttgtaacgagcgggctacagccggattgcagcattcaatctgtaacgggagttcttgtttttttttgtcattctgcgctggggtaaacgattattacgtttaaggccatgccgccacatgcatccaagccgcctaagccggcgtgccattgttgcgccttgagggcaggccactgctacgcgttgggcccgcccagacgcgactgtgcctcaatgctatccgattctacgtgtcggggccaaccaaccgatgcgctgttgctccatctaaaggctgcaccgtggctcgaccatgaggctggggctgcccagccaccactccggcttgagatggcgaacttggcgctagcggtggagtcatcatcaacctctatgcaaacgctgctgccgtcaggagctagcaaacaggcaacgagagagctcactccgttgacacggcattggtga

SEQ ID NO: 47041 - DNA, 351 bp, Oryza sativa
  Clone ID: PAT_MRT4530_49849C.1
aaaaaaagaatggtttttttttctctttttgatttacaccaattctgaaaaggccttaaaggccaatgtctgcagacaaaaaggctgcttgacaaaattctatcttttggagaaaagaaaaaaaagatcattggaaaaagggcaaagaccggccggcaattggccttttttttcccacttttttcacaacatcccaggcttaaattttttttctaatctgtcccccctctaatcctatgtttttttgggccaaaaggaactccaggatcaaccaaaccccacccacctaaaaataaaagcccctgcaaatgctaccgccaagttagccctggaaaactagccttggcccga

SEQ ID NO: 47042 - DNA, 342 bp, Oryza sativa
  Clone ID: PAT_MRT4530_4984C.1
atgagagacaccggcgccgccctgctgctggcggcgctgctgctcctgctggcgtcggagctcgccacgctcggctgcggccacaggatgacgagagcggacgtggcggcgtggaagcgccacgcactcgtggctccgacgaagaagacgacgacgatggcggcgtcgcgcgctgcgacgacgacgacgaccttcccgatcccgacggtggccgggacaggcgatacggcggcggcgctcggtgacggtcaaaggacaaccacactctcacgctatggagtgaaaattaagctatactactccaagtcatcatcaggaactgtcagggcagaacgtgcatag

SEQ ID NO: 47043 - DNA, 378 bp, Oryza sativa
  Clone ID: PAT_MRT4530_49850C.1
atggtggcgcacaccagcagggctcccaccccgaagccggcgatctcgctggacgtcagcccctccatgctcggatgcccccctccaaccaccttctacttccagagggaattgcgcggttacctttcgttcaccacgggagaaagagcggcggagcagcagcgtggtggttggctctcagctcaggggcagccagcgtgggcacggagcgaggccacaccagcgcgcgacgcggcggcgactccggccgagatgcaggcgctcgaccgcaacccgctgcagcagagctacatggaaaggcttcgggcgacaggatcggagggacggctcacggatgggcgcggggctgttcgtggggagggggaggcggcggcgtag

SEQ ID NO: 47044 - DNA, 112 bp, Oryza sativa
  Clone ID: PAT_MRT4530_49851C.1
ctcgtatcctaagccccggaggctgctgctccctaggtaggggttgaatttgatattcctgtcccggcacggtggcggatgctcccctccccgtcctggtggcatctggtac

SEQ ID NO: 47045 - DNA, 5808 bp, Oryza sativa
  Clone ID: PAT_MRT4530_49852C.1
gcagcacgaccctctcgagagagccggactaactgatgaactgctctcatgcaagccagattactataaacatacggtcatcccccctgttgttcgggtttctttcatgtagggaaaggaaaggtgcatttcgagttgcctgactggtcccagtcgccgcggagcatcccactagccacgccgacgttcaggcgccctgcacgtcaacggcgggaccccttcctccatacccagcccgcgccggtcccatttacacctcccaatggggctcaagggccgctcgtgcattctgggtgccataatctgcaacatgtatgcagccggagcaactccgccttgctccctagtataaggtacggtgatctctatgcccgttcctgactgctgagaaatgggctcttgtctgcgaaggataccccagttccctcgttgtttagtcgagtttcgaccttgggtgctcgtgaagcaagagccctaagttcagagggtgaagcacttcttgccttcaagaaggcagttacaacttgggattggatatttctcaacttgcgtgagcatgatgtggatccttgcaattggaagggtgttgcatgtgactctcagagcaagagagtggtttgtgtgattcttgcgtatcagaagtaaattgcgcacatactgccagctatctgaagggtgacatcaatatgcaagaaaaaaccctctacgaaaagatctcgtagaactcgcacatttaataaggagttgctcttccctgtaagtcacgatttatttctatattctttcctgtatttgtaattggtcatccagattttgcccctcaggttttgcctcatctgtgccgttttctcctgggatacttgggagagcctgcggcaatacatgatagattttgctaaatacctaatgccattaaatttgtcgaatcgtctgtttaaccgaacaatagattgagatattatacacatgaacctatgataatattcaagcatcagaaaacgaagattatgaaggaaatatgattaacattcggtgagcagatttgcacgtacagtcacaagctaatgaacatctggcatcttctgcagacgactccatcaatagaagaaaaggggagaattatgccagacttgtattaagtgcagtagcagcagtaggaagtcgtctgttggtcgctatgatttgtgtctgtggtagttttctgtagaaaaattttggaaagaaagatattcatggttatagggtgaagctgtgtgagggcttttccattgttaagttccaagggcatctcccttaatctactgaagaaatcctcaagaaactagggaccccggatgaaaataatatctgtcgcttatgtagctacgatattgtacatgaactagcaagagatgaccaactgcaagatgtggatgccctttatcgtggaaacaaacacctatagattagcatcacacatattactgggcgatgaagggctcttattcaggctaaaggtatcccccatttgatttcgactatcttggatacttttttactacggtaacgacgaatacacagaaacagagggaggtcatgcctctccttggcagaaagctccctctccgcattgaaaaatggctagatcgagctttggagctaccgcccccagcttattcatggagaacactctgatcagctgttgttgtcaaaactcgtatcatggtagttaatctcgttctgaaattcttcctgtttagtttttttgttcctgcaggaggcatatgcttcgcccggtagaaaaaaaatatagtatgatcgtagtagacaactggttgtttgtaataaacataagccctttggcccctttcgtacatcatgtagtagtaagcatttgttgtgtgcctattgggcattcacctgacatgccgaagacaatacgatcgttgactagtgtttggctatatgtacaaaaatgatcgtatgtttaatttcctgatcaatattgatcatgttgaccaaattgtagctctatatagacaggaagtaccaattgaggctttcattgctcttccttctctgactaaaaaaagtgttagttcgtttccagaagaagtgttcaacaatagctacagggtcggtacagatcgttggagtctgaagtgtaattgacaaccatgccccagtgatttctacgattcagaataaggtgtcagactgatggctgagtgatgaaaacgccctgatttccgcagcttttcctgtggttgaacattccatttattctatgcagtttaagtatgtttattcttgcggcaatcggcttcaatcggtcagcacaattgggagggcatttttgtgtttaagtactaatgctacgtagaaattatatgtacgaaatggcaatgtaattgaaaatttaccaggagctgactgtgcttgttttgaacttccagactagaattaatgttaatggaagggattagatgtgacatttattagaattactactgtaaaagataccttttcagcggagaatgttataagtggcataaattctgagaccttggaaaatcaagatgctggatatctatactcagaatttacctgagcatttcgtgcagtgggttaaccacggagacactttttggtattaagattacccgatgcttgtgtcatgtacgcggtacgcgttggctactttgaaggcctaaacttgtcttttccaagtggtcatgagacgggaattagtgatttgagtagggaattaggagtgagaagagatagatggcacagcaaacttcagacattcgccttgtgatatatgtccacatcatcccatagccctcttaggaaagtataacattctggttatttgttcccatctttcttgtaggagcatgtagataggcgtttttctcattttttgaagagaaagtagaggtagattcatatgttcaaccaaggtctgaaagatttccgcacacctctagaggagcttttatctgtcattcagaacgctagtagaaaagaaggtgcttctacttgctacaggatgcttgtttacctgaagtattgctttcagggcttagcatttcctccagggcacgggacaattccccaatcccgccttcattcagtacgagaagaactattgcaatttttgcttgaggagtctaagacttccagtactgatgtatacaagagcttcaaatcctccagtgaaaaatgcccaaacatatgctatctactatggatggatactgaagctgctttggaagttctcaaatgtgcctttgcacatgagagatttgaacctagagacaacccatctagtactcctgatgcacgtgtctcagaggatggagacaatattaatattggaagccctgacagtgaaaatattatgttacaaaatgtggtggacaccattgtggatattgttggtttggaaaatgaggctattcactcaattgttattggagcggctgagtcagaaatttggccttcagagaaggactttggttatctaatcgagtttgtgtctttttttgtttcccacaaaagggcaaaagcatctcaaagagttgttaggcacatcctcagatatcttacttcatccaatatcctgtcatctgatgataagaaaacaccaactcaaaaagaaaaggaagttcttcagctcttcgatgcagttcctcaaactgattggaattctgattatgtgttgcatatttgcttagacgctcattttcaccaggcttgtggattgatatatatgaccagaaagcaaaatttgcctgctttagaaagttacatgaaggatacactggaaccattccatgcttttatcttcattaacaaaaagctatccgaattggccgattatgaagcttcgtcatttcgttcctcagtaatatctcattttcctgagctagtcaagctaagcagggagtgcgcttttgtcttggtcattgatcatttccacgatgagatccagaaaatattatcagagcttcattctgatcaccacagcctctttcttttcttgaaaactgcgattgaagtgcacttgtcaggaaaactgaatttcagtgaactcaatgccagaaaaaatagcacagttgaacttcaatactcatcccgtgaacttgaattttatatacagagactttcaaatcttcccaagttgttggaccgcaatcctgttattatgactgatgagattgttgaactctatctggagagcatagccacaggcagtgtgccaataatagaacatgaaggcttctatgtcagtacgagcgaagattatggggttacagatgctgctgcattcttgcaagagagagttggtgatgttgggagtgcactggcacttattctagcaggtcttgatgagaaaatcaacctatttatttcttcagtggaaaatgctttctctgggattgcatcaaaaagtatatctgagatagagcagccagacattgttctaaaaatgagtgaggctcatcctgtgcttgatgcattacgtgctgccatcggattgtgtcaaaggaattcacaaagattgaacccagaggagtcccagtccctttggttccaactgcttgactccttctcagagcccctgaaaaaattgtatggaagcaaggatgtaaatggaaaaggtgtcaggtctaatgggagtgaaacatcgaatagacagccaaaggacaaaggattctcacgaaaaacaaggatttcagcttatcagaggtgcttgaatgcactgcggagagtattttcgcagtttgttggagaaataatcgaggcaatggctggacatatacccttaccagcaatcatgggaaagctattatctgacaacaggagtcaagagtttggtgattttaagctcgttatacatagaatgctgtctatgtatctttatgaaaaaagaatactggaaacagccaagtcagtaattgaggatgattcattctacaccttgagcttactaaagagaggggtttgccatggacttgctccacagacttttaaagtgctgtttcagcaatacgagtattcagttgtggacatgcaactcatctccaatgtgagtctgaacaaatatgaaatactgaatcatcttcagaggccacagagtttgcatatagaaactgtacctccattgaggctttcaccaccagcgatatatcatgaaaagatacagaagagaacaaccacgatgggagaatccagcaagcattcagttagaactgaaaaaccccagagaatatggcaaatgaaggaaccaagatcaaaaagatcagggaaccgagttctgccaaagtcaagcatgtggagttctcagaataatcaagtgcgatagtgtaaatataatatggtatgaatttgacaattcttaaaatgtgtggttgtgctggttgctaggctcctccccatcaccctcgggcaggtgtttcagaggatcgatgttgttagcaaggacttcggcaacatcgtcgatgtcgagctcggcgggccatggctgctgctgccagtggaggtgatggcaacactggctcacaagtttgggatcatcggtaaggacacctgtcataaagacacgtggcgcctcaaaatgagaacatgtggcgttgccacatttggccacgtggcgttgcacgctaacgccaccatactggcgtacacgtcatccgccatgtggagtacacgtcatctgccacgttacatccaacgtggattccacgtctggcagccacgtggcttggacaaatgtggagtacacgtcatctgccacgtcacatccaacgtggattccac

SEQ ID NO: 47046 - DNA, 174 bp, Oryza sativa
  Clone ID: PAT_MRT4530_49853C.1
ctaacgcatatttacatttattatcgggggatgtattaaaatggtgacatactttataacattacatttctcattcatctttttgtacccttacaaaacaccatatggacacttacatttgactatcacttattaactctcaaaatcattatttgaagaatattattaagaatt

SEQ ID NO: 47047 - DNA, 179 bp, Oryza sativa
  Clone ID: PAT_MRT4530_49854C.1
gacaagctcaaggccgagcgtgagagaggtatcaccatccatatcagcctgtggaagttcgagaccaccaagtactactgcacggtcatcgatgcccctgctacgtgactcatcaagaacatgatcggtcctcaggctgactgtgcgtgctcatcatgactcacactggtgtttgagct

SEQ ID NO: 47048 - DNA, 481 bp, Oryza sativa
  Clone ID: PAT_MRT4530_49855C.1
tttttttttttttttttttttttttttttttttttttttgtgtttgtgttttttttttttttttttttttttttttttaaaaaaaaaaaaaaaaatttttttttatttatataaacaaaagtttaaaatgtaaaaaataaaaaaatttgagcttatttttattttccaaaaaaatatattgttaaaaataattaaaaaaaaacgccaagggtggtaatggtactgggtgcacaaaaatacctagggtaaatacaaaatttaaaagggacgttaaaaaaaaaaaaaaattgagcttgagccaaatttcgataaaaagaaaaataaacaaactgttggaattttaactttttgaaaccgtgggttaaaccggaaaattcggaacggtaacttgaagggtaaaaatttttcttaaaaggaagcgtataaaaacttggggaaaacaaaggaaaaagtgttttctggggaaaaatgttattcgttt

SEQ ID NO: 47049 - DNA, 546 bp, Oryza sativa
  Clone ID: PAT_MRT4530_49856C.1
ttttcctttttttcaaaaattcgaaatcaataccttgctttaaccatacccatcaagatcgctagaatagttttggctaaattcatggatggtgctaagaacacgcagtccacaaaaccacaagatcatacacagtgcttcaatttaaacaaatttagctttaggtccagcttggtagggctctctatcttgaatctgcctctttcaatgcgcggatgagatgggtgatacggtactggagcttctcgttctctatgattagcttcttgttcttttccttttcagcaagacattctgtgttaactgcatcaagctttgactgaagatctttcacggctgatgaatttgtctctgaaccactcgtcaggccatctttgttcagcagcaaggcttccagctttgctaaacgtgtctcggcatcggaggccctatcgtggaagggcctgagggcctcctccagacccgccgccgccgccgccgccgccatgctcgccgccggtcgactgaacccctcgaataccctctcctggactctttttttttttt

SEQ ID NO: 47050 - DNA, 218 bp, Oryza sativa
  Clone ID: PAT_MRT4530_49857C.1
gcgttcggtaacaatataatagttcgtatgttgaaaattcagtgccaggcaccaccaacagtggcaatgctcctgggagcactatagtagttagggtgtctggtactgaattgtaacaatataatagttcgtatgttaaaaataaagtcatacatcatcatgtgtgactgttgaaacttagggtggggggggtctaaataaaatcatcttacctattt

SEQ ID NO: 47051 - DNA, 1533 bp, Oryza sativa
  Clone ID: PAT_MRT4530_49858C.1
atggcgtccgactccgagtcgccggcggcggcggcggcgccggcgaagttaccggccacgccgctggcggggttcgtttcgctcctcgccgcgcgccgcttcgcggccgctaagtcgctactcgcctccctcgtcacgccccgcctgctcgccgtccccttcgccgacctggccgccgcctccctccctcgcgccgcgccgcggcacgccgtcactgccttctacgacatgctcttccgcgcctacgcggactcgggcgccgccgctcgcgccgccgaggccttcgagctaaccgtatcccgcctcggggggcttgacccccgctccctcacctcctccctcctctcgctccggcgagcaggccacctcgacaccgccgccgacctcctcaaacaggctgccacttcttgtcctgactccgtcacgcctctctcggcgtctgtcgtcgtcgacggatactgcaagtctggccgcgtcgcccacgcccgccagctgctcgacgaaatgcctcgacacggcgtgaaggttaacgccttgtgctataactcgctgctagacgcatacacgcgcgaaaaagatgatgatcgggtggcagagatgctaaaggtaatggaaaatgaaggcattgagccaacagtcgggacatatacaatcctcgtcgatggtttatcggcagccagagatatcaccaaggttgaggctgtgtttgaagagatgaagagtaagaatctctcaggggatgtctacttctattcttcagtcatcaacgcatactgccgtgcagggaatgtgcggagggcatcggaggtgtttgatgaatgtgttgggaatggcattgagccaaacgagcatacgtatggagcattgatcaatgggttctgcaagattgggcagatggaggctgcagagatgttggtgacagatatgcaagttcgaggggtgggaattaaccaaattgttttcaatacaatgattgatgggtattgtcggaaaaatatggtggacaaggctcttgaaataaagatgatcatggagaagatgggcatcgagctggatgtgtatacatacaacacactagcatgtgacatggtcgaggcaagaaggctgtttcgagagatggcaggaaatggggcagaacctagtctggtaacctacaatgttatgatggatgggtacatcaagaaggggagcatacgggaggctgagaggttcaaaaatgagatggaaaagaaagggcttgttccagacatatactcttatgcagcgttagtccatgggcactgtgtcaatgggaaggtggatgtggcattgaggctgtttgaagagatgaagcagagggggtctaaacccaacttggtggcatatactgctctgatatccggcctggccaaggaaggaagatcagaggaggcattccagttgtacgacaatatgctgggagatggattgaccccagatgatgctctgtattctgcacttgtagggagccttcacacggataaaaagcaaaatgttaaaccacgaacaaattaa

SEQ ID NO: 47052 - DNA, 1232 bp, Oryza sativa
  Clone ID: PAT_MRT4530_49859C.1
tttcttcccaagccgatggcgatggcaatggcgcacgtgctggtgttccccgccccggcgcagggccgtctcggcgcctcagccggtggtggggcgccttccaatttcatgttctcgcccttgggcctccgcgccgggctcgcgctgctcgccacgggcactgacggcgagacgctgcgccagctgctggccttcctgggctcccagcacatccaccagctcaatgcggcgagtgccgggctcctcgccgagatgcgggcgtggccgcaactctccttcgccgcgggaatctttgtggaccgctcgctccgcctcaggccggagttccagtccaccgctgccgccgctcacggggcattcccacgatccgtggacttccaaaaccaggctgacgctgtagcggcggaggtgaacggtttcatctcgcagaccacgaaggggcgcttaaccaacgtcatcccccctggcaccttgaacagcgacacgatgtgcgtccttgcgaacgccatgcacttcaaggcgaagtgggctcggacgttcgagtcgtggaacaccacgcaggcaatgttccaccgcctcgacgacacgacggtgcgggtgccgttcctgtcggaccccgggatgcactacgccgccaaggcgccaagttcgagttccacggcctggagttcaaggtcctccagctcttctacaagatggtcggccgcgacggccaggtcgacttcgggttcggtgcgccgtgcttctgcatgctcgtcttcctcccgatcaagcgcgacggcctccgccacctcctgcgcatggccgtcaccgagccggacttcgtcacgcggtgcgtgccccggagccggcagatcgtcaccccgtgcaaggtgcccaagttcaagttctcctcccagctcgacgccgggggcgcgctggcacagctcgggctgggcgcgccgttcgaccctgacgccgccgacctgtccaggatggccgtgaacacgccgcccgcggggctctacgtgtcgaccatgaggcagaagtgcgccgtggaggtcgacgaggagggcacgacggcggtggaggcgatgtactcgcctagcagcccgggctatagccccggataccaacctcccaggccgccgccgatgagcttcgtggcggagcacccgttcatgttcgccatcgtggagtataagaaggcccaggtcttgttcctcgggcacgtgatggacccatctaaagag

SEQ ID NO: 47053 - DNA, 474 bp, Oryza sativa
  Clone ID: PAT_MRT4530_4985C.1
atgacactcgtgcatttgccaaggagtagaatgcaagagttgaggtctgatgggtgtgttgcattccttgaaagggtcactttgttctgcaatagatatggtcttgaatttcatgaaatggatggtgtttatgtgccttatggaagatctcaaaggtttgcacgaaatcaaacgaatgatgaccactttagaagagaagtatatattgggatcattgatcaaattagccaagaatttgacaatcactttgacgaggttaatatgaagttgctttcctgtatggcagccttgaatccaactaactcatttgcatcttttggtacacagaaggttgagatggttagtgcattgaagataaaaatagttgacttaggaggtcatgagttcaaggattgttgccgcaacatattaatgcctctacaaagtgcctctatttgcatagagacatcttataaaatgcctcttagttcatag

SEQ ID NO: 47054 - DNA, 2493 bp, Oryza sativa
  Clone ID: PAT_MRT4530_49860C.1
atggcatgtgcagctctggttgcagtcgctgcaatcctcttcttctccaccctgacagcattagctgatgaacgggaagcactgctttgcctgaaatcacatctttcaagcccaaacgggtccgccttctccacatggagcaacaccatctcacccgatttctgcacctggcgcggcgtcacttgctccatcaagctccaagaacgacctcgtgtggttgtggccctggacatggaggcaggaggcctcaccggagagatcccaccctgcatctccaacctctcgtccctcgcgagaatccacctccccaacaatggcctctcaggtggcctcacattcacagccgatgtggccaggctccagtacctcaacctcagcttcaacgcgatcagtggtgagatcccacgaggcctcggtacgcttcctaacctctcatccctggacctaaccagcaacaacctccatggcagaatcccaccattgcttgggagctcatcggcgttggagtctgtcggcctcgcggacaactacctgaccggagagatcccattgttcttggctaatgcgtcgtcactccgctatctttcactgaagaacaatagcctctacgggagcatccctgcagcacttttcaacagctcaaccatcagggagatataccttaggaaaaacaatctttctggtgcaattccacccgtaacgatgttcacttcacggatcaccaaccttgatcttacaacaaatagcctgtcaggaggcataccaccatctctagcgaatctctcatcgcttacagcatttttagctgcacaaaaccagttgcagggaagtataccggattttagtaagctgtcggcgctacaatatcttgacctctcttacaacaatctttctggggctgtaaatccctccatttacaacatgtcgtccatcagttttctcggtttggccaacaacaatcttgaggggatgatgcctcctgacataggaaacacacttcctaacatccaagttctcatgatgtctaacaaccattttgttggagaaatccctaaatctctagctaatgcttccaacatgcagtttctgtacctggccaacaactctttgagaggggtgattccttcttttagtttgatgacagatttgcaggttgtcatgctgtactcaaaccagttagaagctggagactgggcattcctatcatccttgaaaaattgctccaatctgctgaaactgcactttggtgaaaataacctacgtggggacatgcccagctctgtagccgacctgccgaaaacattaacttcactcgctctcccgtcaaactatatatctggcaccattcccttggagattgggaacctatctagcatgtccctactctatcttgataacaatctattgacagggagcatacctcatactcttggccaactaaacaatcttgttgtccttagcctttcacaaaacaaattttcaggagaaataccacaatccattggtaacttgaatcaattggctgaactttatttatcagaaaatcaactgagtggaagaatacctacaactttagcgaggaaggggaaatccaatgagcacatagatcactcctacatggagctgaaaaagttaacatacagtgatgttagcaaagcaacaaataatttttctgcagccaacatagtcggctctgggcattttgggacagtctatagaggtatactggatacagaagacactatggtcgctgttaaggtgttcaagctcgatcagtgtggtgcattggatagctttatggcagagtgcaaagcattgaagaacatccgtcaccgaaatcttgtcaaggtgataactgcatgctcaacttatgatccgatgggcagtgagttcaaggctctagtatttgaatatatggctaatggtagcctagaaagccgactacacacaaggtttgatccatgtggtgatttgagtttgggagaaaggattagcatagcatttgatattgcttctgctctagaataccttcacaaccaatgcattccacctgttgttcactgcgatttgaagccaagcaatgtacttttcaaccatgactatgttgcctgcgtctgtgactttggtctggcaaggtcaattcgtgaatattcatccggaactcaaagcatatcaagaagcatggctgggccaagggggtctattgggtacattgctcctgagtatggcatgggcagtcaaatctcaactgagggtgatgtctatagttatggcattattcttctggaaatgctaacaggaagacaccctaccaatgaaatatttactgatggcttcacactccgcatgtatgtcaatgcatcactttcacagatcaaagacatacttgaccccaggcttattcctgaaatgacagaacaaccttctaatcataccctgcaattgcatgaacacaagacagcactgccgaatttatcttccgaagtttcttga

SEQ ID NO: 47055 - DNA, 2796 bp, Oryza sativa
  Clone ID: PAT_MRT4530_49861C.1
atggtatgtgcagctatacacattgcagtcgtagcaatgctcgtctcccttacagcattagcaatagctgacgaatccgacaataaccaacgggaagctctgctctgcatcaaatcacacctctcaagcccagagggaggcgccctcaccacatggaacaatacctcgctcgacatgtgcacctggcgcggcgtgacatgctccagcgagctcccaaagcctcgtttggtcgtggccttggacatggaggcacagggcctcagcggagaaatcccaccctgcatctccaacctctcgtccctcacgagaatccacctccccaacaatggcctctccggtggcctcgcatccgcagccgatgttgccgggctccgatacctcaacctcagcttcaacgcgatcggcggtgcgatcccaaaacgccttggtacgcttcgcaacctttcgtccctggacttaacaaacaacaacattcatggcgagatcccgccgttgcttgggagctcatctgccttggaatccgtcggtctcgccgacaactacctgaccggaggaatcccattgttcttggctaatgcgtcctcgctccgctatctttccttgaagaacaatagcctctatgggagcatccctgcagcacttttcaacagctcaaccatcagggaaatataccttggagaaaacaatctttctggtgcaattccacccgtaacaatattcccttcccagatcaccaaccttgatcttacaacgaatagcctgacaggaggcataccaccatctctagggaatctctcatcgcttacagcactcttagctgcagaaaaccagttgcagggaagtataccggattttagtaaactatcggcgctacggtatcttgacctctcttacaacaatctttctggaactgtaaatccctccgtttacaacatgtcgtcaatcacatttctcggtttggccaacaacaatcttgaggggataatgcctcctggtataggaaacactcttcctaacatccaagttctgattatgtctgacaatcattttcatggagaaatccctaaatctctagcaaatgcttccaacatgcagttcctgtatctggccaacaactctttgagaggggtgattccttctttcggcttgatgacagatttgcgggtcgtcatgctgtactcaaaccagttagaagctggagactgggcattcctgtcatccttgaagaattgctccaatttgcagaaactgcactttggcgaaaacaacctacgcggggacatgcccagctctgtagccgaattgccgaaaacattaacttcactagctcttccgtcaaactacatatctggcaccattcctttggagattggaaacctatctagcatatccctactttatcttggcaggatcccatctacacttggttcttgcgtccggttggaatcgcttcgtgtaggaggcaacttcctagagggaagtattccacaatcattagcaaatctcaggggcaccaaagtgctggatttctcccagaacaatttatctggtgcaataccggatttctttgggactttcacctcattacaatatctaaatatgtcatacaacaactttgaggggccaattccagtagatggaatctttgcggacagaaataaggtgtttgtccaaggaaatccacacctttgcaccaatgttccaatggatgagttgactgtctgctctgcttcagcatccaaaagaaagaataagctcattattccaatgttggcagctttttcatctataatcttactttcttcaatcctcggattatatttcttgatcgtcaatgttttcctgaaaaggaagtggaaatccaatgagcacatggatcacacctacatggaactgaaaacgttaacatatagtgatgtaagcaaagcaacaaataatttttcagcagccaacatagttggctctgggcattttgggacagtctatagaggtatactgcatacagaagacactatggtcgctgttaaggtgttcaagctcgatcaatgtggtgcattggacagctttatggcagagtgcaaagcactgaagaacatccgtcaccgaaatcttgtcaaggttataactgcatgctcaacttatgatccgatgggcagtgagttcaaggctctagtatttgaatatatggctaatggtagccttgagagccggcttcacacaaagtttgatcgatgtggtgatttgagtttgggagaaaggattagcatagcatttgatattgcttctgctctagagtaccttcacaaccaatgcattccacctgttgttcactgcgatttgaagccaagcaatgtacttttcaacaatgatgatgttgcatgcgtctgcgactttggtctggcaaggtcaattcgtgtttattcatctggaactcaaagcatatcaacaaagtatggcatgggcagtcaaatctcaactgagggtgatgtctatagttatggcattattcttctggaaatgctaacaggaagacaccctaccaatgaaatatttactgatggcttgacactccgcatgtatgtcaatgcatcactttcacaaatcaaagacatacttgaccccaggcttattccagaaatgacagagcaaccttctaatcataccctgcaattgcatgaacacaagaagacagttccatctcgatgcaaactgggaggggtggagggtattctcacatgtacgataagagaaattgcatcaaaattaggagggcttagattatctatgctaacgtga

SEQ ID NO: 47056 - DNA, 1836 bp, Oryza sativa
  Clone ID: PAT_MRT4530_49862C.1
atggcgtccaccggcgcgctgcttctgttgctcttgtttgtgcttgcgtgcggcggcaatggcggcgcggccgccgcggtgttctccgggtgttcgttcgagagccaggaggaggccgaggcgttcgaggccgcgctgctgcagcaggcgtgcttcaacgtgacggcgttcggtggaggcggaggtggaggtgggggcgagggcggctgcgtgtcgcggctcgacacggcgcgcggcggcgcggggagtggccccgtgccggtgctccgcgcggcggtccgggacacgctcggcgaggcggtgggcgccgtggcggccgtggcggggctcgcgtcgctgtccaaccacgcgcgggaggagatggccgtgcgcgactgcgtcgagctggtggggtactccgtcgacgagctcgggtgggcgctcgacgccatggccgaccccgacggcggcgtcgccgcggcggaggaggaggatgagacggagccggagacgaggcgccgccgccgccgcggcgcgcgcgccgaggacgacatccacgcctggctcagcgcggcgatgggcaaccagggcacctgcctcgacggcttccacggcaccgacagccgcctcctccgccgcgtcgagtcggccgtgacgcagctcactcagctcgtcagcaacctcctcgccatgcacaagaagctccgcgacatcacgccgcagcaccaacaccaacaccaccaccaccccggcaacaacaacaacaagaacggcacagccgacggcgccgccgccggaggggatgacaccggcccgtcgtcggatctaccgccatgggtgacggacgtcgtcaacgatgtcgaggaggaggtcacggcgacgcgcggacgagggaggtcgtcgtcgtcgggaaggaaggcgatgcgcgtggacgtggtggtggcgcaggacgggagcgggcggtggcggacggtgagcgaggcggtggcgcgggcgccgagccacagcaggaggaggtacgtgatctacgtgaagcgaggggtgtacgaggagaacgtggaggtgaggaagaagaagacgaacatcgtcatcgtcggcgaggggatgggggagacggtcatcaccggcagccggagcatggccgccggctggaccaccttccggagcgccacgtttgcggtgtcgggggcggggttcatcgcacgggacatgacgattcggaacacggcggggccggcggcgcaccaggcggtggcgctgcgcgtcgactccgatcgctccgccttcttccgcatcgccgtcgagggccaccaggacacgctctacgcgcactccctccgccagttctaccgcgactgccgcgtctccggcaccgtcgacttcatcttcggcaacggcatcgccgtcatccagcgcaccaccatctctaccctcccgcccgccgccggccagaacgccggcagcgtcacggcgcagggccggagggaccccaaccagaacaccggcttcgccctccatgcttgcatcgtggaggccaagtacccgacctacctcggacgcccgtggaagcccttctcccgggtggtcgtcatggagtcctacctcggcgcaggtgtccagccgcgcggatggctggagtgggacggcgacggcggcgagctcgccacgctattctacggggagtaccgcaactatgggcctggcgccaacatcggcggccgggtgcggtggcccggataccacgtgatcatggacgccgccgtcgctgtgcgcttcaccgtgcggcggttcatcgacggcctcgcttggctaccctccaccggcgtcaccttcaccgctgacctcaacaggaaatga

SEQ ID NO: 47057 - DNA, 762 bp, Oryza sativa
  Clone ID: PAT_MRT4530_49863C.1
atgtgctcattggatttccacttccttttcaggaaaacattgacgatcaagaaatataatccgaggattgaagaaagtaagattatagatgaaaaagctgccaacattggaataatgagcttattctttcttttggatgctgaagcagagcagacagtcaactcatccattggaacattggtgcaaagtttctgcaaattggagcaattcttcaaggatgacaggaatgcccagtctccagcttctaactggtttgagtacagcatgacgacccgcaaatctgtcatcaagccgaaagaaggaatcacccctctcaaagagttgttggccagatacaggaactgcatggatgctcccatagaggctattgttcttcaaggaaagatagcggagcgaggacgcattagccaagaacaatgggattcctccggtcagggacgaaaggttgcgaagcgtaccaaggcgttttgggatcgcaccgccgatcgcgttgaagctgaggttgaggtatcggagcccggcaacatcggctgcggatgcgaggccaccggagaggccattgttggggaggtggattctcgtgagggacgagaggttggagatgcagggtgggatttctccgctgaggccctgtgcctccatgtccaaggccacgaccaaacgaggctttgggagctcgctggagcatgtcacgccgcgccaggtgcacatgtcgagcgaggtattgttccatgtggtgagggcgcctccctctgggcttga

SEQ ID NO: 47058 - DNA, 3526 bp, Oryza sativa
  Clone ID: PAT_MRT4530_49864C.1
atggcatgtgcagctctggttgcagtcgctgcaatcctcttcttctccaccctgacagcattagctgatgaacgggaagcactgctttgcctgaaatcacatctttcaagcccaaacgggtccgccttctccacatggagcaacaccatctcacccgatttctgcacctggcgcggcgtcacttgctccatcaagctccaagaacgacctcgtgtggttgtggccctggacatggaggcaggaggcctcaccggagagatcccaccctgcatctccaacctctcgtccctcgcgagaatccacctccccaacaatggcctctcaggtggcctcacattcacagccgatgtggccaggctccagtacctcaacctcagcttcaacgcgatcagtggtgagatcccacgaggcctcggtacgcttcctaacctctcatccctggacctaaccagcaacaacctccatggcagaatcccaccattgcttgggagctcatcggcgttggagtctgtcggcctcgcggacaactacctgaccggagagatcccattgttcttggctaatgcgtcgtcactccgctatctttcactgaagaacaatagcctctacgggagcatccctgcagcacttttcaacagctcaaccatcagggagatataccttaggaaaaacaatctttctggtgcaattccacccgtaacgatgttcacttcacggatcaccaaccttgatcttacaacaaatagcctgtcaggaggcataccaccatctctagcgaatctctcatcgcttacagcatttttagctgcacaaaaccagttgcagggaagtataccggattttagtaagctgtcggcgctacaatatcttgacctctcttacaacaatctttctggggctgtaaatccctccatttacaacatgtcgtccatcagttttctcggtttggccaacaacaatcttgaggggatgatgcctcctgacataggaaacacacttcctaacatccaagttctcatgatgtctaacaaccattttgttggagaaatccctaaatctctagctaatgcttccaacatgcagtttctgtacctggccaacaactctttgagaggggtgattccttcttttagtttgatgacagatttgcaggttgtcatgctgtactcaaaccagttagaagctggagactgggcattcctatcatccttgaaaaattgctccaatctgctgaaactgcactttggtgaaaataacctacgtggggacatgcccagctctgtagccgacctgccgaaaacattaacttcactcgctctcccgtcaaactatatatctggcaccattcccttggagattgggaacctatctagcatgtccctactctatcttgataacaatctattgacagggagcatacctcatactcttggccaactaaacaatcttgttgtccttagcctttcacaaaacaaattttcaggagaaataccacaatccattggtaacttgaatcaattggctgaactttatttatcagaaaatcaactgagtggaagaatacctacaactttagcgaggtgccaacaattgttggcattgaacctttcaagtaatgcccttactggaagcataagcggagacatgtttgtcaagctaaatcaattgagttggctacttgatttatcacacaaccaattcataagctccataccactaaaatttggtagcctgataaatcttgcttctttgaacatttcccacaacagactcacaggcaggatcccatctacacttggttcttgcgtccgattggaatcacttcgtgtagcaggcaacctcctagagggaagtattccacaatcattagcaaacctcagaggcaccaaagtgctggatttctccgcgaacaatttatctggtgcaataccggatttctttgggactttcacctcattacagtatctaaatatgtcatacaacaactttgaggggccaattccagttggtggaatattttctgacagagataaggtgtttgtccaaggaaatccacacctttgcaccaatgttccaatggacgagttgactgtctgctctgcttcagcatccaaaagaaagcataagctcgttattccaatgttggcagttttttcatctattgtcttactttcttcaatcctcggattatatttgttgatcgtaaatgttttcctgaaaaggaaggggaaatccaatgagcacatagatcactcctacatggagctgaaaaagttaacatacagtgatgttagcaaagcaacaaataatttttctgcagccaacatagtcggctctgggcattttgggacagtctatagaggtatactggatacagaagacactatggtcgctgttaaggtgttcaagctcgatcagtgtggtgcattggatagctttatggcagagtgcaaagcattgaagaacatccgtcaccgaaatcttgtcaaggtgataactgcatgctcaacttatgatccgatgggcagtgagttcaaggctctagtatttgaatatatggctaatggtagcctagaaagccgactacacacaaggtttgatccatgtggtgatttgagtttgggagaaaggattagcatagcatttgatattgcttctgctctagaataccttcacaaccaatgcattccacctgttgttcactgcgatttgaagccaagcaatgtacttttcaaccatgactatgttgcctgcgtctgtgactttggtctggcaaggtcaattcgtgaatattcatccggaactcaaagcatatcaagaagcatggctgggccaagggggtctattgggtacattgctcctgagtatggcatgggcagtcaaatctcaactgagggtgatgtctatagttatggcattattcttctggaaatgctaacaggaagacaccctaccaatgaaatatttactgatggcttcacactccgcatgtatgtcaatgcatcactttcacagatcaaagacatacttgaccccaggcttattcctgaaatgacagaacaaccttctaatcataccctgcaattgcatgaacacaagacagcactgccgaatttatcttccgaagtttcttgaaaacttggcctggaatgctctgaagagtcgccaaagatcggccattgatacatgatgtatatagtgaggtaatgtcaataaaggaagcatttttcgccacgagcatttgacgttaggtaataaaatggtgtcatagaagtggaacacctgaggaatgaagcatgaacgttaggtaataaattggtgtctgcagcactgccgaatttatcttccgaagtttcttgatcactacagcagtaagctacagatgtttttgctgctacacacgatacatttgcacactgttatttactgatgcatttcaagcagcattcctatcatgtaataaaaattcttgtatagttcaatgatttgttgccgggatgcagcttgatcaaaaaaaaaaaaaaaa

SEQ ID NO: 47059 - DNA, 393 bp, Oryza sativa
  Clone ID: PAT_MRT4530_49865C.1
ttggtctcgtgggtttgaagcctcctcctccagggtgctgcattagcacaggatgcagcgtgatggaaggcaagagccggcgaccggagataaccgtcgtgccggctgcaggtggaggggccgccgccgtcgttgatgcggtgaaggcggagaacaaggatcccttcatcccgggctcgccgtccctggcgagcggcgccggcatggagagcctgagccgccatgagggcgtcgtcatgttcctggccgcgtggaagctcgacgcgctctgtcaggagtccggctcgttgccggcggtgatgagggcacgcttaccctacttctgaatttctgaatttctgatgaagccatgagctttctgacatctttatacgtgtgtgtgtgtgtgcgtgt

SEQ ID NO: 47060 - DNA, 771 bp, Oryza sativa
  Clone ID: PAT_MRT4530_49866C.1
atggctcagctgcttcgtcggcatctcccagtcatactttctctcatcttgttcctctctaaggctactgcagatgcaaacttcactgtgtcgagagcagcatattaccccaactctgatataaaagggaccgaaaacggtgcatgtgagtatggcgcatttggggcaacactcaacaatggtgatgtttcagcttcagcaagcctctacagggatggggtaggctgtggtgcatgctaccaggtgaggtgcacgaatccttactattgctctccaaatggcgtcacaattgtgatcaccgactctggggcgagtgatggcactgatttcatcctcagccagcatgctttcaccaggatggcgcagagtacagatgctggtacagcgctgctaacccttggcgtggttgggattgagtacaggagggtttcttgtacctacccaaacaagaatatcgttttcaagattactgagagcagcaatttccccaactatcttgaatttgagatctggtaccagcaaggcaaccaggacatcattgcggtccagctttgtgagactgtgaatttgacatgccaacttctgagccggactcatggtgcagtgtgggctgctgtctctccaccaagtgggcctctgtctataaggatgttatttagtagcggagctccccgtggtggtgacacatggctagttccgacgaacatagtaccccagaactggacggcaggggccacatatgattctggggtccaagtacagctgcagtag

SEQ ID NO: 47061 - DNA, 243 bp, Oryza sativa
  Clone ID: PAT_MRT4530_49867C.1
cggacgcgtggcggacgcgtggggaaaagtttaacgtagtttcggcggtcagccaaccaaccgacctatctagtcaacgcggatcgcctctcccagcaccaaaccctatattgttcgtcagttcaactacttacaaagtctttcattttaccctgtttttgctgctcgctccgggattcttgtctcgtctgctcttcgcggtcggtgtcgcgccattagcaaccatggaggtcttgaggaggg

SEQ ID NO: 47062 - DNA, 275 bp, Oryza sativa
  unsure (1)..(275): unsure at all n locations
  Clone ID: PAT_MRT4530_49868C.1
agttttggatctgganaagaaaaggagaggaagttaatggtgtggggaggtngtggtgctggggggggangcgagcgccgccgccggcaatgccaccgggggcagcgtcgccggccgcggcgaggtgcgcgcgcgtnggaggagcgggcctcggcgactgtcgcctcccgggtctctccaccattattataaaacatgaatactctctccatcccataatataaagcgtgcacgcatttcaagaatcaaaaaaaaaaaaaaaaaaaaaaaaaaaa

SEQ ID NO: 47063 - DNA, 631 bp, Oryza sativa
  Clone ID: PAT_MRT4530_49869C.1
ccaaaattggaataaaaataaaataaaatccaaaattagaaaataaaaaggagagtccaaatagtaatacaattttaaaataacttaaattcgaaattaaaaataaggaatattgagagaagagtccatataaaacccaatacgagattatttaatatttagaataaaattaaaaataaaatccaaaattagcaaaaagaaaagagagattagttaatattcgaaataaaataaaatccaaaattagaaaaaacaaaagaagatttcatgtaggaatataatttaaaataaactgaaattcggaattaaaaataagcaatattgaaagaagaatccatataagaacccgatataatattaattaaaataaaaaatatccaaaactagaaaaattaaaagagagttaagtaggaatacaatttcaaacaactgaaattaaaatataaaaatattaaaagaacactctacggtattaattaaaatttgaaaaaaaaatcggtggtcgttgcatgaaaaaaagagtaccttcataaattctaaaattagaacaagaacaaatatttcaattaggaataaataactaaaattgatgataaaaaataaagactattgaaagaaaagaccatctcaa

SEQ ID NO: 47064 - DNA, 198 bp, Oryza sativa
  Clone ID: PAT_MRT4530_4986C.1
atggccaaggggaaagatgttagaatcagagttattttgcaatgtgtgagttgtgttcgaaaaggggccaatgaggagtcggcagggatttctagatatagtactcaaaagaatcgccacaatacacccggacaattagaattaagaaaattttgtcgttattgtcgtaagcatacgattcatgccgaaataaagaaa

SEQ ID NO: 47065 - DNA, 303 bp, Oryza sativa
  Clone ID: PAT_MRT4530_49870C.1
gccgccgccgcccgcgggcagtatatagggaggcgacgtagccccaagcggcggacagaggccgaggaccacaccgacgcaccggagccagcgccacacagacccaggggagcgccccatccacatggaccgcctcttgccagacgcaagacgcctaacgcgccgtcgtcgacgacgtgctcaccctcttcttcggcagatacaccgacaacattctcgcagaatacatcgtcgtaccactcctggatgagcaacaccaggaccaagcacgtgatgacttggaggcctatcttggtgatgata

SEQ ID NO: 47066 - DNA, 693 bp, Oryza sativa
  Clone ID: PAT_MRT4530_49871C.1
cgcgctactcttttttcctcctccttggccactcctttgctcctcgtgtcgtatctttatggctacagtgcgcccatgttggctctataagtcaagacagtaatcacaaagtatgttgcacatctagcagaaaaaatctctctccgttgaagatttcagtattggtaagaaatttactaaaccacagtaactacatttttaaatcagttcaggctctattgtaacaagctaacaccttttcttccactataaccatttctaagctactaatattgaatatttaatggaacattaattccatagattagcgttgtttgcagggtgtttcaacgacactcgactatttacccgaaaggattaaagccataggtacttctaagttctaacctacatagtaccatcctcgcttgatttgttagtccatacggaatgacaatacatatgtgccaccccaaaggtccaagcctccatatctctagctgtgtggtactcttttcttctttgatcataaatttttattttaatttattggtgtgataaagctatatgcacttcaaacaattttagatgagacatgccatatgttctaataaggacgcaatgtgatgttatttctatacaagcattattcctgcttttgttttttccagctctgtatggtgttggaattttctaatgacccatccttcaaga

SEQ ID NO: 47067 - DNA, 728 bp, Oryza sativa
  Clone ID: PAT_MRT4530_49872C.1
gagccagtgtcctcttctcccgcgccgccggcttcgcctcgtcggctggagcgccccagggacgctgctgctgctgctgctgtccgccacggcattgcgacggcgtccacgaggagataggcaggagtggccggccggccctgcttcgatctgctactaatcttgcttcgccgttctttgggcttcaggagagctgggtcttatgtactacacaggataggttcttggccgagcaatggatcttgagtttgggagaggcatgagatccccacagagggactcatggaagacaaccttgctcctggcgtaccagagcttgggggtggtttatggagacttgagcatatctcctctctacgtgttcaagagcacttttgctgaggacatccagcactccgagacgaacgaggagatctttggtgtgctctcttttgtgttctggacactcaccttgatccctctaatcaagtatgtctccattgtcctacgagctgacgacaatggcgagggaggaacttttgctctgtactcgctaatttgccggcatgccaatgtgagccttcttcctaataggcaaattgctgatgaggagctttccacttacaaattggaatgctcttctgagagaaccgataagtcctgcatcaaggtctggcttgagaagcacaagaagctgcataccgccctgctgatcatggttttgattggtacatgcatggtgattgggg

SEQ ID NO: 47068 - DNA, 3565 bp, Oryza sativa
  Clone ID: PAT_MRT4530_49873C.1
atggagtccgcgtcgtcttcactagcgaccagcgggcggcgccgcagcagcagcggcggcggcggcggtagctggggcagcatcggctccgccgccgacccgttcgacatcccggctaagggtgctcccgtcgagagtctcaaaaaatggcggcaagcagctctagtactcaatgcatccaggcgctttagatacacattggacttgaaaagggaggaacaaagggaggaagttataagcaaaattcgtgcacaagctcatgttgtcagggctgcattccgctttaaagaagcaggacaagtccacgttcagcaaaaggaggtggcagcaccgccagttgatggtgcactgggctttggtatcaaagaagaccaacttactgcattgaccagagatcacaattactctgctctacaacagtatggagggatttctggggtagcgcgcatgctaaagacagacacagagaaggggattagtggagatgattcagatttgactgcaagacgaaatgcatttggatcgaatacataccctcgtaagaaaggaagaagcttcctggctttcttatgggatgcttgtaaagatttgacacttatcattctcatggttgctgcagcagtatcacttgctttgggcataacaacagaggggataaaagaaggctggtatgatggagcaagcattgcttttgctgttctcctagttgttgttgttacagcaactagcgattacaagcaatccttacagtttcaaaatcttaatgaggaaaagcagaacatcaaattggaggtggttagaggtggaaggcgaatctcggtatccatttatgatttggttgctggtgatgttgtgccacttaaaattggtgaccaggtccccgctgatgggatccttatcagtggtcactccctgtccgtagatgaatccagcatgaccggagagagtaaaattgttcacaaagatcagaaatcaccattcctaatgtctggttgtaaagttgctgacgggtatggcactatgctggtgaccgcagttggcattaacactgaatggggactgctaatggcaagcatttctgaagattctggtgaagaaacacctttgcaggttcgcttgaacggtgttgccaccttcattggaatggttggactttctgttgctctcgccgttcttgttgtccttctggccaggtacttcactgggcatacctataaccctgatgggtcagtgcaatatgtgaaaggaaaaatgggtgtaggccagacaatacgaggaatagtaggaatatttacagtggcggtaacaattgttgtcgtggctgttcctgaagggttaccattggccgtcacgttgaccaacctaatacctgtacttatctgtgtcaggcttgccttctctatgcgcaagatgatgagggacaaagctctggtcaggaggctctctgcatgtgaaactatgggttcagccacaacaatttgcagcgacaagacaggaacgctgactttgaatcagatgactgttgtggaggcttactttggtggaaagaaaatggatcctccagataatgttcaggtgttatctgcttcaatctcatcattgattgtcgaaggaattgctcagaatacgtctggaagcatatttgagcccgagaatggtcaagatccagaggtgactggatcaccgaccgaaaaggctatactgtcttgggggctgaagcttggcatgagattcaatgacacaagaacaaagtcctctattcttcatgttttcccattcaactcagagaaaaaaagaggcggggttgcagtgcatctgggtggctctgagtctgaggtacacatacactggaagggagctgcagaaattattttggattcatgcaaaagctggcttgctgcagatggttcaaagcattcaatgacacctgagaaattgcttcagattagtgaattcaagaaattcatagaagatatggctgcttcgagcctccggtgtgttgcctttgcttatagaacatatgagatggttgatgtcccaagtgaggaccggagggctgattggatattgcctgaagatgacttgattatgcttggcatagttgggataaaggatccttgccgcccgggtgttaaagattctgttcggttatgtgcagcagctggcattaaggtccgcatggttactggagacaaccttcaaactgccagagccattgccttggagtgtggaattttatctgatcccaatgtgtcagagccagtcattattgaaggaaaggcttttcgtgcactgtcagatttagaaagggaagaagctgcagaaaagatttcggtgatggggaggtcttcaccaaatgacaagcttttacttgttaaagcattaagaaaaagaggtcatgttgttgctgtgactggagatggcacaaatgatgccccagctttgcatgaggcagatataggtctctccatgggcatccagggaactgaagttgccaaggagagttctgatattatcatcttggatgacaattttgcatcggtcgtgagggttgtcagatggggtcgctcggtttatgcaaacattcagaaatttatacagtttcagttaaccgtcaacgttgcagccttgattattaacgttgttgctgctgtcagttctgggaatgttcccctgaacgctgttcagctactgtgggttaacctaatcatggatactctgggtgctcttgcactggcgacagaaccacctactgaccatcttatgcagagaccaccagttggcagaagggaacccttgataacaaatgtcatgtggagaaacttaatcataatggctctgtttcaagttatagtcctccttactctcaactttaggggcacaagccttttgcagctaaaaaacgacaaccaggcacatgcagacaaagtcaaaaataccttcatattcaatacatttgttctctgtcaggtgttcaatgaattcaatgctaggaagcccgatgagctgaacatattcaagggcattactgggaaccatctctttatggccattgttgccataacagttgtactgcaggcgcttattgttgagttccttggcaagtttacatcgacaaccagactcacctggcagttgtggttggtgtcaataggtctcgccttttttagctggccgttggcatttgtgggaaagcttatccctgtcccagagagaccattaggagatttctttgcatgttgctgcccaggaagtaaacaagctgctgatgccaagggtgatgacgctgatcacagcgatgtatgaagctacggatcagagggaaacttgtgccaaggtttacttttaacatcattaaggtgtaattaactgctatcaggattgtacatacactatgcttcacatggataggtctgattacctttggaaaattgtggcactattaaccatgcgttcagatacttgacggggcaaggtgtgattttgcggcagagctgctgcagggagatttctaatggcgttttattagcgtattggagaaaagattttggatacttcaacaaaa

SEQ ID NO: 47069 - DNA, 214 bp, Oryza sativa
  Clone ID: PAT_MRT4530_49874C.1
acgccctttttttttttttttagtataccaacacaaacaattatttgtgtgaactgatgcactttaaacagaatgtaaacgttatctccgaagtcaagaccatatgggaaaatcagatatacaaattttacagagcacaaacaagaacagttactctaagaagagaggctctcttggtaaaaaaaaacgcatggatggattgcactttctggct

SEQ ID NO: 47070 - DNA, 864 bp, Oryza sativa
  unsure (1)..(864): unsure at all n locations
  Clone ID: PAT_MRT4530_49875C.1
acttcactgggcatacctacaaccctgatgggtcagtgcaatatgtgaaaggaaaaatgggtgtaggccagacaatacgaggaatagtaggaatatttacagtggccgtcccaattgttgtcgtggctgttcctgaagggttaccattggccgtcacgttgacgcttgccttctctatgcgcaagatgatgagggacaaagctctggtcaggaggctctctgcatgtgaaactatgggttcagccacaacaatttgcagcgacaagacaggaacgctgactttgaatcagatgactgttgtggaggcttactttggtggaaagaaaatggatcctccagataatgttcaggtgttatctgcttcaatctcatcattgattgtcgaaggaattgctcagaatacgtctggaagcatatttgagcccgagaatggtcaagatccagaggtgactggatcaccgaccgaaaaggctatactgtcttgggggctgaagcttggcatgagattcaatgacacaagaacaaagtcctctattcttcatgttttcccattcaactcagagaaaaaaagaggncggngttgcagtgcatctgggtggctctgagtctgaggtacacatacactggaagggagctgcagaaattattttggattcatgcaaaagctggcttgctgcagatggttcaaagcattcaatgacacctgagaaaaatagtgaattcaagaaattcatagaagatatggctgcttcgaccttcgggtgtgttgcctttgcttatagaacatatgagatggttggatgtccaagtgaggaccggagggctgattggatattgcctggagatgactngattatgcttggc

SEQ ID NO: 47071 - DNA, 984 bp, Oryza sativa
  Clone ID: PAT_MRT4530_49876C.1
atggagctcatcgtatcatctatcacaggtgatctcaccagtcgattaatctcctttctgatgaacaagtttttagataatctttactccggggaaaaggtaaaaaggctggagcaactccttcaaagagttcacatggttgtcgaggaggcagatgggcgatacatcaccaaccgttgtatgctcacacatctgaagacgatagtcgcagcgatgtacagtggctaccatgtgctggataccatcaagtacatgaagaacaacaaaggtgcgaatgatctggtaaataactcatctgccttgtcttttgccactcctctcaaacgatctcgcactactactatttgtcctgaaacaaagaacaaattcagtatggagttacaaggcgcactgaaaaatatagagactgtaattggtgatatcaatgagtttgtcatccttctgaccggatgtgagcgcatgtcccataggccctatgatacctatctttacatcgacaatttcatgtttggtcgacatgtggaaaagcaacatctaattaacttcttgctggagaacaacaatattggtcctccacctgtactaccaattatcggtggtcgtggagttgggaagaaaacacttgttacacatgtatgcaacgatgatagggttcgatctcatttcttttttattttccatatcaatggagagaaccttggggaaattaccgaaaataaaaatatgtcagaaaggacattggtaattgttgagtttgtttcagatgtagatgacaacgactggggaacatttcattcatctcttatgagccttaacagaggaaacaaagtgataatcttgactagaattaagaaattggagagatttggaactgtcaggcccattactcttgacagaatggtgcatgaggagtacagatacctattgaagacgctcacatttggaagcgcaaaccctatggactaccacaacttattccaatag

SEQ ID NO: 47072 - DNA, 1155 bp, Oryza sativa
  Clone ID: PAT_MRT4530_49877C.1
atggagggtgcgtcggagggcgctgtggagggctcggtggtgggcaggacagaggtgccggcagaggactcggtggcgcataagctcacccgcggtgagcgcatgataggtatttttctttcggcattggctagtgctattgaagccatggacgtgttagatactcttgtggtcaggttccatatcaagggtgaatttgtgatagaagttagggagaagaaatatgtacgtagtgtggaggcactgtcatatatagctagagataaggtgccattcggtgagatattagcacatttgcgtgagtactacaaggagccaaaaatagttgaattatgtgataattcatatgatgacagtgactatgaagctgatatggaagtggatagtgaagaggagtgtgaagaaatggctgcggatgtagaggctgaacaagcaaagggtaaagagcaagaagctatacagaatgatgctggtgggttgaagggtaaaagtgtgatggaatgtgctcaagatgaaaggatgtttgttgctgttgagattgaaaagcattacaaagaggtgaagaaggttaagacagtgcagttagagagcctagatgatgtgttatttgaggaacagaggtacaagccaactatgcaagcaagtgaagatgatgggaatgaaaccccatatggtggcggtgaagatgagcagtctgttgaagaacttggcagtgatggggaggtaaggataaggcaggacaagcaaccaagatacaagaagaaggatggggtacatacatttgagcatgccatgaagttcaattgcaagaagcagttcaagaaagcaatcaccaaatatgctctagttgagaagaatgccatagattttgtaaaagatgatcagaaaagggtgctaccaattaatggagagttgctttgtgctatagggagagatggaaacaatcaaatgtacccaattgcatgggttgttgcagccaaagataacaatgaagagtgggattggtttatagacttgttatgtggtgacctgcaagttggtactggacaagggaattctcaatatctatgcaaattggaagagacatttcctagacaagtagttccagaagaagttctgtacatgtgcaaaggccccatggaggatgctgtttaa

SEQ ID NO: 47073 - DNA, 564 bp, Oryza sativa
  Clone ID: PAT_MRT4530_49878C.1
atgggagggacaggaggattcaccggagggaggctggcggcgacgaatcatggcggcgcacgccagcagcgagaaaagggggaaacggcggagggacgacgaggattcaattcaaggaggtgggagcatctccggggttcaaagagtccatttccagcgtcggatggggcagagcgacgccgtggaggtccggcgatgagcggcggcctccgggagcgggcggcgacggcggcaagcctatggcgggtggtggcgaggctaggggcttcgtctacgcgcattcgggagcgctaccgagctaccgcgcgagctaaaggagggagagggcaagcgagaagggagaacggagggaggaactaccgagccgagacgggcactgtgacgagcagccgacggcgcggcagcgagctctccggcatcgggccagggaaggggaggaagacgggtgcctggagtcccgcgtcacgcgtcctcgcacgcaccggtctccccggtgctcggcggcggacggcgactgcgagagcagaggaagggcgacaatcgcgcggtggagtaggagtgtga

SEQ ID NO: 47074 - DNA, 416 bp, Oryza sativa
  unsure (1)..(416): unsure at all n locations
  Clone ID: PAT_MRT4530_49879C.1
atccccgggctgcaggaattcggcacgagggagagagagagaactagtctcgagttttttttttttttttttgcaacttaaggttgccatgaggcttaaatactttcacgattgtatctgcaattttacaaggctggctcccatggatactatgggcaatgaattgctacccattttttacaaatacataaataaaacagacaccctgatgtcggacagaccccatcacttcataacctaatgcaggttcatatgacccaaaaattgcagctgcatattggacgccacacctttagatgcaataagttaatccaatcgaataacttcacattatcagaagcgggaccaatgtgaagcatatgctctnatggtaagcttcggttcagcaagccttggaaagagaggtaaagatcttt

SEQ ID NO: 47075 - DNA, 180 bp, Oryza sativa
  Clone ID: PAT_MRT4530_4987C.1
gttatcagaaaggatactgcaacacaaacttagctgagattacagagtaacaagcatcaactcctgtacatgtgagtaaaaaaggttctaccttatcttatgtatgccgcactaaacgagagtcaagtaataaaatgtacaggtgtacaaacagaggttattatataggcatattaaaac

SEQ ID NO: 47076 - DNA, 1098 bp, Oryza sativa
  Clone ID: PAT_MRT4530_49880C.1
atggaagctctcctctcctcgccgcgcgctctcttctccgtcacgccaaccgcgtgctggccggcgtcagccaggaggaggagacgtgttgcttctcctgtcaaggcggccgccgccgccgccgagccggccggggaggagaaaaagcccgccaccggcggcgccgcggcggcggcgggagacggccaggcggctgcgccggcgccgaagaagatcctcaagaagaaacctgtctactcgatgaagaagggccagattgtgcgcgtcgacaaggagaagtacttgaacagcatcaacgggctagactacatatacgaggaccgtggcgagctaattaaacctagcagtaagaacatcttcgttctagctacggtcataatcttgttcgtcattaccgtgcaggttttggacatcagaatctttgaaacaggggagtatgccctgatttggacttctgaatctcattcatatgtttggacagatcgcttgggttggaatcccaactccaccggcatggctgccaacttacatgctcatcaagtctgggccaccgtggacgggcccctggggctgccgctggaggaggcggagggccacgctcgccgcttcttcctctgggggttcgcctgcctccccttcctctgggccatcaactgctgctacttctggcccgtcctccgctcgccggcgaccttcccctcttccgccgccttctcccgaatccgcccctatgttgtccggtcagcaattggctttaccattttctcggtggttctactcacctgggccacaacatttataattggtggcgagcgattatttgggccagggtggaacgatctagtgatgtacaacgttgcagacaagcttggtatcacaactggacttataaccaagcccaaacaggagcagcagattgagcccagcaacggccgatcaaccattcaaccatcatgccgtcatgggcatgagctcatcgtgacgagagatagagagagattcaatagcgaagaagaagcgcggaaatacgctggagaattcacgtgtttggccgctgggactggtctgttcaccggtcagccacgccgtcgacgacga

SEQ ID NO: 47077 - DNA, 465 bp, Oryza sativa
  Clone ID: PAT_MRT4530_49881C.1
gttgagcagttccaaaaggaattaggtgcattagtggaggaaaaagaggtagctgctaagacatttgatgatgacaaagaaaaaatgaagatggaatcagagtatcttaaaaggaggttggaggaaatccatgacaacaaagatttcatgaagactgaaaataataagcttcagtccgaggctttgattgtagagaagaaacaaatcatgtttgaagcagagattaagagactgaagatggaattgggggcagtgacagaggcaaaggaggtggctgcaaaggcattcaatgctcaaaatgaagaaatcaccaagaaactagaggatcttaagagaaagttggaagaaatccaaacaaataaagacttagtggaaggtgaaactaatgagcttcagccagaggtttttgcaacagaggagaaaaatagcctgtctgaagcaagagataagtgccttaagcaaata

SEQ ID NO: 47078 - DNA, 462 bp, Oryza sativa
  Clone ID: PAT_MRT4530_49882C.1
atggaagcggtgagagctaaaggagagggggaaaagagcagtggtttgctggcggaggagacgatgcgcggtccacctcaggcgagcgaggcgacgccgcagccggcggctgtcatcctgtcgagggagaaagcaaaggggcggcggcgtgaaggggagagggagagggagagggagagacgagagggaggagagtgcgtgagggcggcggcggctagggctggatgcggccaccgtggcggaggtcaacgcggcggcggcggcggcgcgaggggaggcggacgcggcggcgtcatgatggcgcaggacgagagggaggaggagtcgaggagaggcggcaaggggggtccttacgcacaatatcgcctcaggggcactgttcggaagggacctactcggaattacgaacaaaccggagggctttctcgcaaaacaaccaccccgggcactgtaggactgtag

SEQ ID NO: 47079 - DNA, 2984 bp, Oryza sativa
  Clone ID: PAT_MRT4530_49883C.1
ccctcaagcaaaaggtagaaacccatagcatacatgggtgcactagacaaacatgagttaatcttgatctccctgccaccataagtcatgtaaccactcttccaagactaaagtctcttctcaactttctgaaagattggagatatgtctctcatcccaattctgtcaacccccataggcaaactcaagtatgtgaaaggcatcataccaatcttacaattcagcatattagcaattcttaatccctcactatcctccacccctatgacatatacatcacttttctgataattaatcttcatccctgacatctcttcatagcagaataataagaacttaagggcaaggatgttctcatcagaattcttaatgaataggattgtatcatcagcgtattgaaggtgagtcaaacccccatccactaagtttggaaccagaccttcaaggactccccattctttggctttatccaaaatggcagccaaggcatcacccacaagattgaaaaggataggagacaagtggtctccttgcctcaaacccctgtaagttttgaaaaaatgtccctgtttactattaatgttaatactcactctcccatcttcagttatattttttatccatcccaccattatggagtcaaaattcgttttctccatgacctcatacaaaaaatcccattttaccctgtcataagccttctcaaagtcaattttgaggataatcccagtatccctttttattttcaactcatacatcacctcatgtaaaataaaacaaccttctaaaatattccttctaggtataaaggcagtttgagaccaactaatcactttgtttgccacttcaatcatcctaaaagtcacattttgtagatagatgggtctatactgtttgattgtgtttgcatcgctgatttttggcaaaggagaaatcaccccataattgatcatatctatatccagctcacccatgtgtaagtcatctaacatctctttaactaaaacccttatatgaggccacatttgtttataaaaacccacaggcaacccatcagggctagaagctgtattgtttttcatagtcttcatcactttgtccacttcatttgaagagaagggtctaaccatcttccatttgcagggcttatagaaaaaggttgtattagcatctccttgtaaaatcaagtttcccctcctcttctctgccactcttctctgccaccagatctcctcctgaatgtaaatattttccatctccttttccatctcatatctgattttccattcactgtcaaaaagtccactgtcatatgtcttgttatccagctctaccaaagcatttttcaattccttcttagcaccctccagcgcgtgcgccgcgagctcccgcctgtgctcgtcggagcgcaggtactcctgcaccgccgccgccttcgccgccgcgagctcgcgcagcgccttctcctcgagctccttccgcacggcgtccgcctccgcggcggcgtcgcgctcccgcgcacgcagcttctcctccagctccagcgcgtagccgaacgagaacgacgcgtagttcgccgcctgaagcagtgtcaggtagctcgacgcgacgacgtcggagggcttcgccgccgggaaccggcgctcccgtgacggcgtgacgatggcctggagcagctgccgcgcggccttccagtcggccgagtcgccgtcgtgcttgtcgggcacgtgcgccgcgaagcccggcggcggggaacacatgccggaagccgaccacgaccacgagccgccatgcggagcaggcggcgtcggcgtcggcgacggcggcgggttattctcctctgcttcaaaccccctcttcttcccggacaacggcgaccaccacggcatgtcgctctccggctcggtcttcaccttctgtgcgttgaactcgccggagaaaggaaacttacctttagcacgagcaggacgaggaggcggcggctgcggtggtgcggcgccggcgaggttggaggagaacaccgcggcgaggttgctctcgcagagatacgtcctcagatcaaccgcggcgccgccatgcaagtgcagaagctttcccgccaattccatctcctcgccgctgagcaccggctcggcggtagagctcttggacggcggcggcccgccccatcgcacttggcacggccatggcgacggcgacgacacgaagaagaagcctcccttccaccctttgagcttgggcaaccccgtgaagagcaccccgtcggcgccggcgccgcgcttgccccggaagtggtaccagccgttcagcttggacaagaacagcctgaagaagcgccggaacacggcgagcgacggcggcgcggcggcgtggtgggagagcaggaggaaccccgccacgacgcgccacccgttgggcgtgatctggctcggcgcgacgccgagatggcggagaagctcgcaggcaaaggggtgcagcgggaggcgcatcccggcctccagcgcccgcgcgtacacgcacgcggcgcccggcggcggcgccgagcacgcgcgcaggtcgccggcggggcgcgcggcgaactccgccaggacaccgtacttcttgcagacggcgtcgaccgcttcctgcgtgcgcagagacgaggcgatgtggtcggcgacggacctcgggaacggggagtcggcggcggcggcgtctgcgcggcggtggtcggggtcggtggagcgagagcggaaggcgtcggcgtcgatgatctcaacggaggacgacggggaggaagaggaggaatgcatcgtgttttgtgcgagttttctcagtccatccagcaacggggcattcactcctgtatcctgtttctcctcctccctctcgaacggcaacgcactcacatttggaccaaaatggcaaaagaccatcgcccccctgccctgccgctttttcccatccttcggtttctccccttcctcgtcggcactcggcagcat

SEQ ID NO: 47080 - DNA, 3563 bp, Oryza sativa
  unsure (1)..(3563): unsure at all n locations
  Clone ID: PAT_MRT4530_49884C.1
atgcctataaagagacttgagattgagaaagtaacggcccaggatgcagtcttagcttttaaaaatgatggaatcgggttgctgcacgctgcggcttgccagggccaactgaacgtttgcaagttcttggtggaggaatgggggggtgacgtgaatatggctggagcacaaggtttaacaccggttatggcagctgctgagtctgatgctgttccgattctgaaaggatagcttgatcatgggggtgatgttacaaacgcagatgtgataggaggcacagttatccaccatcctgctgaaacgagttgatggatggaaacagagttatcgctttcaaaagcaattcctgtcaagatagacagtgaccttggaacaccactctttcatgctgctaacgatgacaaggataagacacctaacattctgatgtatcacaatgcagcttaacaagcttgggattggggtgctgcacgccgcggcatgccagtgccatctgattgtttgcaagttcttggtggaggaattggggggtgacgtgaatattgctggaaaagaagatataacaccgtttatggccgctgctgagtttggtgatattcctacgttggagtattttcgtaatcatagtggagatgtaacaaaaggagatgttagagtacaaacatcccggagcggtgtggctgtggaataatctctcatgcgaaagtcaaagatataaggccaatgacaatagatcatgggccaaccacagttctgtacacaaacaggagcatttgtagattgctcatgggtgatggtgaagatgctcaatctgatggtaacagatcccgaatgatgcggcctaactgggaaaaagcttgttatcgttggagtgcaggtcacatgctactcaaggagtacaaacaactgtgggatgctctcatggatgcacaaaaattggatcctgggagcgttgaaattgagaaggaacaaagggaatatgatatccaagaaagtaaagatgttgtggagtcgaaggttggcctttatgataaacccactgcatcttatggggtcaaacctccaaatgtttcatctgttatgggaaaaacacaaattgatacatgcaaagatgtggtcttcttaaaagaagaggtagagaaaaggatgaggctggatgtttctggatccttcttcgtgtaccagatgagcacgttagaagcaggaataccattatcatcgtatgctggaaagacatggaatgggaacattgacatggatggtttgattgttgttcatgggagagtcagaatcaagaaaaagccatggaaaggcctcaactcaagcaagatgaacagtgactgcaccaagttgacttcgatgataagagaaatgtttgtcaaaaaaaatgttcatcctccgtacttgaagcaccttcttggaaagttagaagctttagctgtcgatgttttcacagtgcgtcagcagcttgcttttgactatcatatctctttgataccttctctgaaccgagtaaatttggtgtatcaaattaagagatgctatgatggctgggatgacagagagaaaatgtacttcagatttgttgcagacaattgcacagtcccagaagattggtgcaatactttgatgtctaagcatttgtttcgcctagtgattttggaaggacagaagaggaacatcatatacggctccaatggcatgagtgcatttcatttggtgagaaattacaatactcatgcaccagaacattcctggattcatgtgttcgtggattccaaaatagaacattaccaatggtttcaatgtgatagtggtattgagctaatggtcccaaaatatctaggagactttcttgcagaagctgtatttaagtttattgaagatgagtttgatttaactcatgtgaaaccaaatataaccaaatgcaattcaggtattccaacactgctacgacacaacttccatgaaggatctgaatgtaacagccatgacaagctgtcaagtccatttgatgggatgggacaaaaagtaatgcccagcgagacgttcgatcgttcggttgtctacgtggcaattatctatggcgaggctctcgatcggcttgctagctcctcggccatgtgctctaatggcgatttctcggtttgttcgcaggtaacccgtataaatgagtttatggatcgacccacttgcatctctaagtgcggcaaatcggaccacgacgtgaaaacacacgggttatcacttattttacatataaatgccgtcttagctcttaacaagcatgggattggggtgctgcacgccgcggcatgccagggccatctgaatgtttgcaagttcttggtggaggaattggggggtgacgtgaatattgctggaaaagaagatataacaccgtttatggccgctgctgagtctggtgatgttcctacggtggagtattttcttgatcatagtggtgatgtaacaaaagcagatgttagaggatgcacagttctccaccatgctgctggcacagatttatggcccatctcattcattgcaggatgctgtaagtctaacgtaattgtcaataatggagccggtagtcccctgatgagttcccttatctaccgatcattgaagtgtatgaagctactcataaaggctggtgctgatgttaatggcaagggtacagttgtaacccctttgatgcttgctgcgtcgcaaggaggctatactaacttcattcagtttcttctgaaggctggagcaaaccctaatattcctgatgatttgggttggttgccaatagagcatgctgcattacgtgattgcagggaagaagttgaaatgctatttccattgacttctccaattccaaatgtcccaaactggagtgttaatggaataatcgctcatgcaaaagtcaaaaatacaaagccaatggatcaacatcagaaggagagtagaaaagtcgttttgaaggcacaggcagatttggtattcaagcagaagaattacgccgctgcagcaaaaatatatgatctggcaatagctcatggaccgactgcagttttgtacgcaaacaggagcatctgtagattgctcatgggtgatggtgaaggtgctctttctgatgcttacagatgccgaatgatgcggcctaactgggcaaaagcttgctaccgtcagggtgcagctcacatgctactcaaggagtacaaacatgcgtgtgatgctctcatggatgcacaaaaattagattctgggaatgtcgagattgagagggaactaaggaaagctagggaattaatggcgaaacctccagatgagcagtgaggcagaataactgcataatcgtccatcagtaccctatagctagctgccacttcttttcttagccatgccctattttgttggatatgtgatgaaatgtaaagcatgcacttctcggaactctcacctatcggcggccagggactgtcctctggaggtctcgtactcacctctgcgatggagaaccagccataaatccttatantctatgtgaggccgctcgcancccctggcattgt

SEQ ID NO: 47081 - DNA, 481 bp, Oryza sativa
  unsure (1)..(481): unsure at all n locations
  Clone ID: PAT_MRT4530_49885C.1
ttgaaattttttaaattattttttttttttttttttttttttttttttttttttttttttttttaaaaataaaaaacaactttttttttttttatatcacccaaagtttcacatttcacatataataattttttattttttttttaactggctgtgcactatcctnttaaaactcattttttattaacccccagggtggtaatttttctgggtcccccataatccctagggtaaataccatttttaaatggcactttaaaaaccaacaaagcttgagcttgacccaaattcccatcaaagtagaaatcaccaaactggtggagttgtancttttgccctttttcctaaacaatgttaatgtccttataatgaaattgttgcccccccagcccaagcttttgccaaacttttttttttctcanttaaaacccancttattgcaaaaaggggctttcccttattccatactggtgccttacaa

SEQ ID NO: 47082 - DNA, 130 bp, Oryza sativa
  Clone ID: PAT_MRT4530_49886C.1
gactcctagagaattggagaaatgaatgctgacaggaagaatgtagtcgggcaaggcaaacataaagaaggtcacatgcaagaaacaatatgctaaaagtcacatggtggaaaaaccattcaagaattga

SEQ ID NO: 47083 - DNA, 588 bp, Oryza sativa
  Clone ID: PAT_MRT4530_49887C.1
atgtcaacacacaaggtaatatgggccaagcccatactctgttcattcttctctccctcccctgttcgttcctcttcctcacgtccgctagcggcagcagcgcggagctgctgcgagggcggtgacggctgtgaggacggagctgcggcggcggctccccgttccacacgtggccactaccagctcgcgaccggctacggtgttgagtctcctccgcgcgaggggccagtgcgggtccctcctccacccgcgccgcctttgcttctctattgcgccagtagcagccgcaaagcccgaggccgtcgggacgaccggggaggcagctgcggcgccggtggaagagctcgcgaaatctctgcagggggtgcagggggtggaggttccatttacaaaaacataaaatgttttcatattcaaccttcgcagcaccgccgccctcgcaacagctccgcaccgccgccgcagccatcgccggcctcgcagatccgtgccgctgccgccagtggtcgtgaggaagagaagaacgaacagggagggagagaagaacgaacagagtatgggcttggcccatattaccttgtgtcctga

SEQ ID NO: 47084 - DNA, 497 bp, Oryza sativa
  Clone ID: PAT_MRT4530_49888C.1
atgaatgccaactttactttatattcaagttatattgattatactgctagcttatataggagatgcaatggtacgggtatagtgtttgcttatgtaattactctatgtcatgatgatgatattagagtagtatctggtaattaggcgtggtgtctaaattactgggtatgattatttgggttatatgctacggaagagaggtgagtcgctgatggtgacaggtcagtacgggtattcctccgcgtgtgtatatagtcctaagttaatttcctggggagggtactcctccgtatttagctccggttgtatggtcatgacgacctgtcgtaaggaactcggtagtcaggggtggcttctcgaagtaccaggagggcatcgaaaagaggatggagatgaaatgaccaacatgaagacgaaattgctcatcagaagtaacggaaaatgtcagtggtagtaaaaacagtgacaccaatcaaaggtaatgaagttgcataacc

SEQ ID NO: 47085 - DNA, 251 bp, Oryza sativa
  Clone ID: PAT_MRT4530_49889C.1
ccgtcgcgccgccgcctttgtgccgccgcaccgccgccctcgttgccgcgccgggcatcgccgtcgccttgcgccgccgtcgagcccgaggaagccgcggatccgagtgaaggccaagacccgcaagaccttgagcaaggcaagtcatcactattctttgatcacgttgatcccaattgcgaaattaatttttgtttacaaataagattgcatgcgatgatgaacatcctatttatgattatgccatgcct

SEQ ID NO: 47086 - DNA, 1463 bp, Oryza sativa
  Clone ID: PAT_MRT4530_4988C.1
cccacgcgtccgcactaacgtaacgacggtcgatggccatggaactgtccttcaccgtgcaccgccgcgaggcggtactcgtcggcccatcggtttcgacaccgtgcgaaaccaagcgcctctccgatatcgacgaccaagagtccctgcgctaccacgttcccggcctcctcgtataccgtggtggtcagcctccggcgccatgtgtccgcgacaatgacccgtcgggcatcatccgcgcggcgctgtcgcgggcgctggtgcactactacccgctcgccggcaggctgagagaggtggaaggacggaagctggtgatcgactgcagcggcgagggggtggtgttcgtggaggcggacgcggacgtccggctggaagagatggaggccgccgccgctggtggtcacgggctcaggccgtcattcccctgcgtggatcagctcgtccccgacgtgcgatcatcaggccgaggaggcagcgtgctcagctgcccgctggtgggaatccaggtgacacgcctcctctgtggtggcttcatcgtggggaccgccgtcaaccacagcgtgtgcgatgctatgggtatcgtccagttcctcaacgccgtcgccgacatcgccggtggcctccctgcgccggccgtccacgcgacatggtcgcgtgagctgctcgatgcacgcagccctccggcgccggcgttcccacatcgcgagtacgacatgatcgacatcctccctggaggcggcagggaggccgacaacatcgttcgatccttcctgttcagctccaccgacatcgccgcgcttaaggaggaagcactactgccacaccccgagcaccgcctccgcggcggcagcagcacggcgacgagcttcgaggtcctcgcggcgttcctctggcgcgctcgcactgcggcgctggaggtcccggcggacgaggaggtgcgcctcgtcgccgtcgttggcttcagcaggatcgccgcgctgggcctaccatccggctactacggcaacacatgcgcgtaccccacggtggtgatgaccgccggggagctgctccgcggttgcacgctgggagacgtggtgaggctggtgcaggaggcgaaggcggccgtcaccgccgagtacgtgcgatccacggccgaatgtctggttctgcggcggcgcccgcgtttagccaggaccaacctcttcgtcgttaccgacgtccgacgcgtggggttcgaccgcgtggattttgggtggggcgacccggtgtacggcggcccagctcgggcgcttcccacggtgagcttgctggtcaacgtcaagggcagcagcaatgtcgtgggtgccgttgtttcattgccatcgctcgtcatggggaggttctcggctgagctggagagctttctcaacacttaggtcatatatactcaatgaccccactagctacgtactgcacacctgcatgctaccacacaataa

SEQ ID NO: 47087 - DNA, 2268 bp, Oryza sativa
  Clone ID: PAT_MRT4530_49890C.1
atggcgggcctaggaatgcttgttgaagcgctacgtgacaactttggagcgtttataggaagtttagtggacttttggtcagattgtcacaacaaggttgcaagatctataaaagctataatgtcgtctaccacatgtggcttccgctcaaacgacttgatagagcgcataaacaaagatgtactgacgacgaatgcgctcttcgtcgccaatgcattcttggtggtgatccttgtgggagctggctcttatggccgtcgttaccggcatattgctttgaaccgctatctttttctgggagcatccactctagtcctaccaatcctctcctatgttgtctcctacgtcggcagagacaagtactacaacttgtttcacggtttggaatgcgttgacaaccgcgcattctgtctgctactatgggcagcgctgctgccaatggttgggatgaatacaagttcaatattgactgccgttcataatggaaatgaagaattgccagatatcatcatatcaacattactgggccttggtttcatcaagattattctaaaatttgttgcatacgggagggcacggcgctccttcgctatgggacaaaatcctagtcttattgctggatatatggaagaattgtacagactacaggtatcagaagttgcagaggtgacaatacaaaggcttttagcactcgtggtaatgggagaagacaaacaacagattgagaaaggacctcatggttatcacttcaaacgtagcacttttagccagaacgggacaagtgcgatgacaagcaatggtaacttggtaaccattgacaaagtttggcatttggcagaaatgaatgatgctcttttggggccaagaccagcactgaaacatctctgcatgtcattctcattgtttaagcttctgcgaaggcgatttgctaggtacccactggttgaggcaggttctgagaaggcctttcactttgttcgtggtatattgctcacggatggggcagacgcagatcctgaagctgtgttcagggttatcacagatgagctatcatttgcttgggatttctattactcgtcccacccgatctcccatttgggtaagtggttgcccattatgagcatcatgacctcactctttaccatggcattttgcatcttcatcgtgattacactggcttggaaaattcttccagagtataaggactacagggtaatgtcctgcgaattaacatgcggtgaacaagataatgatagatttcatgatattggaagcatcttgttcgtgttggtgccaacgatctcccttcttctggtagttttgcttggtgaggtatgggagatcatatcttacgtttgctctaactggaccaaagttaccctggtttgcgcctacacagcaaagccatcatggcaaaagtctcgaatcatgagacgattgattgcttgttttctgtggtgcagatgcaagctcatgaattactggggtgacaaaatgggcatgacctctctattagatccttgcaagaggaaaggtcatattaggcacctattcaggctgtctaaagcaatgaagcctaccaagataccaaagccggtgaaggctgctctcatcaactcacttaaaggtagcaatgggcagctgagcaatggcatagcatctttgcagaagtgccatctgcgtgacgatattcgttgggcttgcaatggtgaagggacatctgacattattcttgtttggcacattgcaacttgcatctttgagatcaggcacatgcatgatccttcagaacgtcatagctctcctgatgagaatgatgatatgatcactgccattcacttgtcaaagtactgtgcatatttgctagcatcgtgcccagagctactgccagatgacactccatggtcaaaagaattgtataaatctgccaagaagatcaccgactctgttttgggcagcactgatatgaggtgtttcgaatttgaccgcatgatgcaattactgagtgaaaaatcaaagagcaatgaggtggtgtgcaaaggtgtacaactcggcaagcagctggttgatggaattcagaatgaaaacaaggggtggaatatgcttgctgagttttggtcagagatgatgctatatgttgctccttccgacaatacaaaggcacatgcaaaggccattgccaggggaggcgagctgataacaatcctctgggcacttctcactcatgctgggatcatcaggaggccagaacatgacaatgttgtttaa

SEQ ID NO: 47088 - DNA, 214 bp, Oryza sativa
  Clone ID: PAT_MRT4530_49891C.1
gccccggctggagcccccgccggcgcctgcgccgcggctctcgccccactgaggcgttcgtgagagtgagcgcgacgtagcgtgactcagcagatcaaatccagcgttatataatacgcaggcagataatatgctactcgtcaatattccacgttgattacccagctcgtgtaaataaatatgcgctgtcattttcgtcaaaaaaaaaaaaaaa

SEQ ID NO: 47089 - DNA, 153 bp, Oryza sativa
  unsure (1)..(153): unsure at all n locations
  Clone ID: PAT_MRT4530_49892C.1
agaccataacataataatactntttttatttccgttaatactttaaaccgggaaacacacatctnttatctaatcacaatttcttgtaattacaacacggttaacaccacataaaacttctttcataacaataaatattcatattttctattt

SEQ ID NO: 47090 - DNA, 248 bp, Oryza sativa
  Clone ID: PAT_MRT4530_49893C.1
cgcgtccgcaagcccaagtcgcgtcgcaccgaagcagagtagagaaggagaggagcggagcgccatcagccgtcggagggagtgatccggtggctctcgctctctccacctctgctgctgctgccgctgccgccgctgcgcgggcgctctcggttagttttaccacggcgaggggttactccttgttttttgatatctctgatgttaacctactcattcctctttttcctactctcttcgtcttcttt

SEQ ID NO: 47091 - DNA, 1143 bp, Oryza sativa
  Clone ID: PAT_MRT4530_49894C.1
atgagctccactctgatggcttcttgctgcttcatcatctcttacaagaggcctcgcccaatcattgccacctttgtccccttcctcctcctcctcttcttcttcgccgtcgtcgtcgccgcctcgtcgtccagcaatggcacggcggcggcgctccaccccggcgaggagctgctccggcttgagagagtcagggcacagctcgccaggagtcccgacggcgacgtgatcgactgcgtgccgtctcacctgcagccggcgttcgagcacccgaggctgagaggccaaaagccagaggagccgccctcggcgaggccgacggagacgacgaggaggaggaggaggaggaggaggagtcacgcccacggcggcggcggcggcgagcaccgggaggaggaggacgacggcgagcacgggttgcggcaggcgtggtgggccgccggcgaggcgtgcccggaggggacgataccggtgaggcggacgacggaggccgacctgctgcgagccagctccgccgccgccgccggcggccggttcgggatgaagcctcgcggcgtcggcgtcgtcggcggcgcggcgcggcgcgactccaccagcagcggccacgagcatgcggtggggtacatgagcggggggcaattctacggggcgaaggcgagcctgaacgtgtggccggcgaaggtggcgtcgccggcggagttcagcctctcccagatctggctcatctccggctccttcggcaatgacctcaacaccatcgaggccggatggcaggtgagccctcagctgtacggtgacaacaacccaaggttcttcacgtattggacaaatgatgcgtaccaggagacgggttgctacaacctgcactgctcagggttcgtccagaccaacagccggatcgccatgggcgccgccatctcccccatctcctccttcgccggccgccagttcgacatcaccctcctcatttggaagatccgaagcagggtcactggtggctgcagctggggtcgggtgcgctggtgggctactggctgtcgttcctcttcagccacctgggcgcgcgcgccgacatggcgcagttcggcggcgaggtggtgaacacgcggccgtcggggtcgcacacgccgacgcagatgggca

SEQ ID NO: 47092 - DNA, 1839 bp, Oryza sativa
  Clone ID: PAT_MRT4530_49895C.1
atggcttcttgctgcttcatcatctcttacaagaggcctcgcccaatcattgccacctttgtccccttcctcctcctcctcttcttcttcgccgtcgtcgtcgccgcctcgtcgtccagcaatggcacggcggcggcgctccaccccggcgaggagctgctccggcttgagagagtcagggcacagctcgccaggagtcccgacggcgacgtgatcgactgcgtgccgtctcacctgcagccggcgttcgagcacccgaggctgagaggccaaaagccagaggagccgccctcggcgaggccgacggagacgacgaggaggaggaggaggaggaggaggagtcacgcccacggcggcggcggcggcgagcaccgggaggaggaggacgacggcgagcacgggttgcggcaggcgtggtgggccgccggcgaggcgtgcccggaggggacgataccggtgaggcggacgacggaggccgacctgctgcgagccagctccgccgccgccgccggcggccggttcgggatgaagcctcgcggcgtcggcgtcgtcggcggcgcggcgcggcgcgactccaccagcagcggccacgaggtgagtgccacgtcacctcagcttcagcttccgctgccgacggattcagacaagccgtactgccgtgctggagtgcaccggcgctatagatggccatcccacgtgccgcactcacagcccaggcacggcccaacacgcctcgggccgtgccgggacggcccgaaggcacgatgggccatccatgcggtggggtacatgagcggggggcaattctacggggcgaaggcgagcctgaacgtgtggccggcgaaggtggcgtcgccggcggagttcagcctctcccagatctggctcatctccggctccttcggcaatgacctcaacaccatcgaggccggatggcaggtgagccctcagctgtacggtgacaacaacccaaggttcttcacgtattggacaaatgatgcgtaccaggagacgggttgctacaacctgcactgctcagggttcgtccagaccaacagccggatcgccatgggcgccgccatctcccccatctcctccttcgccggccgccagttcgacatcaccctcctcatttggaaggacccgaagcagggtcactggtggctgcagctggggtcgggtgcgctggtgggctactggccgtcgttcctcttcagccacctgggcgcgcgcgccgacatggcgcagttcggcggcgaggtggtgaacacgcggccgtcggggtcgcacacgccgacgcagatgggcagcggccgcttccccggcgaagggtacggccgcgccgcctacttccgcaacgtccaggtcgtcgactgggacaacaacctcatccccgccgccgccctccgcctcctcgccgaccaccccgcctgctacgacatcgccggcggccagggcgccgcctggggcaggagccgggaagcggtggcggcgtgcggcgtcggagccgcggcggggcgtcggggaggcggctcggcgtcgtcgtcggacgggaaacagatttccgacacaatgcttgccttgagctgccagccattatggccgccggattcgtggacgacgaggggcggcgccgggagggtcatggcgttcgtggcactgtcctgcgccacggtggtgatgggcggcgccatctacggctacgacatcagcaccgcgggcggcgtgtcgtccatggagtcgttcctaagggacttattaccggaagtgctccggcggatggcgggcgccggcgctggcgcgcgccgcgtcagcaactactgcaagttcgacagctag

SEQ ID NO: 47093 - DNA, 498 bp, Oryza sativa
  Clone ID: PAT_MRT4530_49896C.1
attcagaagagaatcaacgtccttaaaaaaaatggtcttgaaagcgcttggttgatcatcaatttcattgtacaaatcaactaaaataattgatgtgcagaagaatagccaggtctgattagcaaacgaaggatacatgtttgcgtcgaggattgatggagcgccaaatcagaacatgccaaaaggaacttccattgggatattccactagaaatcctagatgcctgtcatggataggacactgttcagacttgagagccatcagttggttccaagttccaacatcaaagaaaggtgcactacaaaatcatgagttttgcagagccgcagggatagctggtgcctggacatggtcccattattcctattatatgaactaagaagatatactctcttttatcacattaaatgtgaaactaatgcttctcctgcaattttattagagagccttcgaccatcacgtcaacaaagataaattcatcaaacaagtcattgtag

SEQ ID NO: 47094 - DNA, 2066 bp, Oryza sativa
  Clone ID: PAT_MRT4530_49897C.1
ttttttttttggggcccaaattttttttatccgggtaaacaaggggagggagaattacattttcctttcctactcttctcaaccaaagagcactacaacactcaaacaagacaatattcttatttacattcagacaatgcataaacttgagaagatgctacacaatctaactggagcatctatcgatcaccaaaaaaaaaagttaaaaccaccgatgacatacttacagtacataattgtaaccggcaaaatgatcatcaactaccttttcatgcttttggttagacatgatatgctttatattttctccatattcggtaaacctttctgaacttgtgcaaacctcaatcagcttaaagttgtgattgagactacatggcgcgacattgcacaaccaacatgtacaaatttgtaacgttcatctgagttagcgaagtttaaacatcatatacgggcatgcgttcttcaatgggcacacggcagattggacatttcttgcacttatcagaacaagtcttgcataatgttctgtgccggcaaggaagtaagaccatgcatatctccccctcgtagcaaatcctacaaagaaccttctcattttgaagcctttcaaattcctgctttggtacatttggtaatttctgattgctctcccaaagctgcttcggagcctccatacccctgctccgagacgagcctccgacaaattcgtgactacctcaagtggatagccacaaacgtggggtgtacccagtagattcagtatagaataaccgggcttgctcttctttgctgccttcatcaatagaccaccaaccaagaagccttgaaccacgatgaagaaaagcaaagcaatcacggacttttgatgagattgtaaggtaattaggactaactggtccatttcgtaatagtagaacaaccttctccaacaatcttgctagagagaaaaggacaccagcgccttgtaaaataaacagtggggagaacagtgcaaatatcggaatatactgagcactaggaggcgtaccctccaagcgcatacaaagcaaaacttggaaaatcaccagtggtattttcattacgtgacctcctatgtcaggaagaccacagagcctctcttgttcatgatcttctagtgatgggaggagaagaccactctcccaatcacggtatctaattgccgctgatgatgagctagcctccccaggattaggagatttatgaatcatgggattaaaccatccataatttataaacaaatcccaccatcccaaagcaccaacatcaccagacagcttcaaaagtgtgaaggttgtagcagctataagaaacaccatagaaattgcaacccaaaagtgaggaagtgtctcccaaatagcttcatcgctcatactttcttcatctcctggcattaaagctctacacattctgaaattgtcagcaagaataatcacttcaaaggccagaagaggaaggaatacaatcttcaaatcaacagtcggcttacttttaactctcaaactttcgagatatatgcaaagcagcagctcaaacgcaataagcaacggcgctgcaacaattgaatggcaaggagcccaatgacggccatgaggaagcgaaggggctggcattgaaaaccttccacgggcaacaatgccatgaaatagccatagagggatgaatataatccaccaggagtaggctgtgcggccgtcgactttgagcgcgaggaggagcgtgaagcagaagagcgccgcgtgcgccgccgccgcctgcgccgtcttccccacccccgcccacgtctgcgcccgccgccgctgcatccctcacctcctcaccgcgccccaaaccccactggaaattaatctcttccgctcccgcgtccgcctctccctcctccttggtcttctccccgctgcgcctgcgccgagccgagccgccgacgaaggagtgggagacaaaagtgaggcgacgaggacgaagggttccttcctctctctctctctctctctctcccctcttagactctagcccttttccggaaacgtgggcggacgcgtggg

SEQ ID NO: 47095 - DNA, 5124 bp, Oryza sativa
  Clone ID: PAT_MRT4530_49898C.1
atgccaccgaagaaaaccgtcaaggagagagttgtcaggcgaaaggaaggtgacgtcgaagacgagatgttagccgaagagggagcagagccttcggcctccacgggcgaagccggaacggtaccaactccggtggcaccaactctcccgtcttcggcgcccacatcttcgattgaggcggaagcggtgaaagcggaagcagcggcgaaggccgacgtaatcttttcatcccaagtagcggggggcccttcgaccgccgttttcgcacaaccagcttcgacatcaacagcgatcaccacctcgcaagccaacaccaaccttgaagcacaagccgaagctgacatggaggccatgcgtcagaatatgacaaaactccaagacacgcttcgccagatgcaagagcagcaacaagcgtacgaagcagcaagacaagccaaggctcacacccaacagttctacgctcagccccaagttctttctccatacgctatgcaggcgtcggtgtacttcgccaagcccgccccggccattgccgcgcgtccaacgcctcaaatgatcccggcaccggttcgcccggcggcacctcaagcccaatacccgaagcctgctaccacgcttttcggcgtgacgccgcaagctatgatggaagcagcttcgaccttgcaagcgcagtttcaagccttcttgcaacaactcaatcaaccccacaacaatataccaagaaattcatctccggccacggccgagggaggcccaagtcaagccccaccgcaaagccaagcctggaatcaagctatgtttgaccctgctacggcgaggcaagctacttcgacagaccagcagaatcaggcagtgatgttcggcatgggacatcaatctacggctcaacctcaagtgcaagctgtagcttcgctattcacgcctccgtacccacaactgaactggccttcccaacaaggggctacaaccaagccaggtggcgaaaagggtttgcccctcagctggggaatcaaaagtcaccccatcccaccccagttcaagttccctccagtcccaaggtattcgggtgaaacggatctgaaagagttcctgtccatctacgagtccgcaattgaggcggctcacggcgatgagaacactaaggcaaagctttactcattggagcaattgcgcagcgttttcgtccttaactttcgaggtacttatgaggagccgaaaactcaccaagaccttttgggcatttgccaaaggccgggggaatcgacaagggaatacatgcgccgattctcgcaagcacggtgccaagtgcaggatataaccgaagcatctgtcgtcaacgcaacttcggccggcttgctcgagggtgaactcacaagaaagctcgcacgcaaggaacccaaaactctcaaacacctctttcgcataatcgacggatacgctcgaggcgaagaagacaccaagcgaaggcaagagatacaagccgaatatgacaaggccgccgcagctgcagcagccacttcgcaagccaacgcccaagctcaggttccgcctcaagttgcaagttcggcgcctgtcctggttcaaccaaccctcccggcgaatcaaggacaacacccaaggtcgaaccaagccccgataacctggaggaaatttaggaccgaacgagctggcaaggcggtaatggcggtcgaggaagtgcaggccctccgaaaggagttcgactcccagcaggcgggtggacagcagcagcccttccacaagaaagtcaagaagcaatgtaacgctcaagcgccaaggcagcaacaaggaagggtcgaagaggcgccgcgcgaagcgatccctaaccaagcacctcaagtagaacaacgccaagacgtgcggcgaagagtgattcaagtcattacaagatctgatcccccctcacaagtgtctaaatggcaaaagaagatgcaacttcgaacagtgcacaacatcgtttcggccgaagatggggcaccaagatacttgtcacagccaatatccttcgggccagaagatgccgaaggagttcttttcccgcatcaggacccgctggttgtttctgcagaaatggctggttttgaagtccggcgcatcctgatcgacggaggaagttcggctgatgtcatgttcgccgggacatacgccaagatgggtctgccgacattggcgctatcccaagcaccaacttcgctcagaggatttggaggtgaaacagtgcaagttctgggacaaaccctcgtcaaagtcgcctttggcttgcaagagaatagaagagaagaggagatactcttcgacattgttgacatcccatacaactacaacgccatcttcggcaggggcactatgaccaagttcgaagcagtctctcatcacaactacctcaagctcaagatgccacgctcgaccggcgtaatagttgtcaagggttcccagccttcgaccgctacagtggcccctttcggtagggaagtccacaccgtagaggtcatatcgcttggtggagacctgagcgaacaagaaattgacaacaccatggttgtgcttaagaagaacatcgacatcttcgcttgggggccagacgaagtagggggtgtctcgccagacctcataatgcaccatctcgcagtcaagcctgaagcaaggccgaagaagcaaaagttgaggaaaatgtcggccgatcgccgggaggcggtgaaagcagaagtgaacaagctgctaaaagcgggagtgatacgagagatcgaccacccagagtggttagcaaacccagtactggtgaggaagtcaaatggcaagtggcgaatgtgtgtcgacttcacggacctcaacaagatgtgtccgaaggatgacttcccgttgccccggatcgatcagctagtcgattcgaccgccgggtgcgaactcatgagcttcttggatgcatactcaggatatcaccaaattcacatgaatccggctgacatcccgaagacagccttcatcacgcccttcggcaccttctgccacttcagaatgtctttcggtcttagaaatgcaggggctacgtttgtcaggctagtgtacaaagtcctggggtcccaattggggcgaaatgttgaagcttatgttgatgacatcgtcgtaaaaagccgcaaggccttcgaccactcatcagatttgcaagagactttcgacaatctccacgcaatcggcatgaaactgaacctagataagtgtgtattcggcgttcgtgttggtaagttgttgggatttcttgtatccgaacgggggatcgaagcgaaccccaaaaaaatcgatgccattcagcaaatgaagccaccatcgagcgtacgacaagtacgaaagctcacggggcgaattgcggcacttagtcaattcctgtcaaaagcagccgaaagaggcttgccttttttcaagacccttcgcggggtaggaaagttctgttggacacccgaatgccaaaaagctttcgacgagtttaagcagtatctccaaagccctccaactctagttagcttagtggcaggaagcgaactctggctctatctagcggcttcgcccgttgctgtcagcgcagctttggtacaagaaactgaagttggccaaaagccagtttattttgtctccgaagcgctccaggggcgaagagcacggatgcccgtcgaacagccatgggtcatgcacttagacggctcgtggtctcacaagggggcggggatcgccgcaatcctgacttcgccaggggacgtattaatttgctacgcagctagactgcagttcgacacaaccaacaacacggctgaatatgaagcagtgttgacggggctgagaaaagcaaagtcgttaggcgttcggaggcttctaatccgaacagactcaaaacttgtcgctagccaagtcgataaatcctttgaagcaaaggaggaaggaatgagaaaatacctcgaagccgttcgatctatggaaaaaactttcgccagcataacggtcgaacacttgccccgaggtcaaaacgaagaggctgacgcattggcaaaattagccgcctgtggggggccgcattcgctaggggtcttctttgaagtcctgtattcaccaagtgtgccaacagaaagccaacacattatggcaatcgaccaggctgaactgggcgaagacccagatgactggcgaacgcccttcgtcaagcacctcaaagagggatggctgccagatgacgaaccaaaggcaaaacagctgcagatcagaaccgcgaagtacaagataatctctgggcaattgtaccgaactggaatactacagcccatgcttcgctgtgtatctttctccaaaggtgaggagatgccaatcgcgccaatctggccattcgcaaggtggggcttagacatcatcggcccattcccagtggcgcgaaacggctacaagttcgccatagtagccatcgagtacttctctcgctcggttgaagccgaaccactaggcacaataaccacagctgcggttcaaaagtttgtctggaagaacattgtttgccgattcggggtaccaaaagagttcatcactgacaatggtaaacaattcgattccgagaaattccgagaaatgtgcgaggggctaaacctgcaaatcagattcgcttcggtcgcacacccgcagtcgaacggggcggccgaatgggcaaatggaaaaatcctcgaggcccttcggatgacccctacaaggccaacaaagttcagccctttcatgcttctctacggagaagtggcgatgacgccggcagaactagggtctaactcaccaagggtgatgttctccgggggcgaaaatgggcgcgaagtgttgctcgaactcttgcaaggggtacgagtcgaagctctacaacacatgagcaagtacgcggaaggtacttcggcaacctacaacaaaaaggttcgaccgacggaactttggcccggccatctcgtgctaagaaaaaaggcgaaccccgtggcagtggggaaactggactctaagtgggaaggaccatacctaatcaagcacaaatctctaacaggttcttttcggctggcaactttggaggaagaagagttcgaccactcctga

SEQ ID NO: 47096 - DNA, 386 bp, Oryza sativa
  Clone ID: PAT_MRT4530_49899C.1
cccgggctgcaggaattcgggcacgagggcaccacccccttcttctccaacctcttgcagctgcagacatggcggggaacggaaggagaacgaagcaagccatgtcgtcgcagcggcccggccgtcaccagcggagggcgtcgcagagcgtgttcgtgctcccggataacttcgccgacctcgacgacgtgccggccggcgccggcggcgccggcgaggacggccggaagggcgccgccgcgacggcggacgcggccggcgggcagcagcaggctcgcccatcgccggcggcgcgccaccggagggcgatgtcggtggccgtggcgtcgtccagggagctggagatgatcaaggaggacatgggcagctacaagatcggcgcctga

SEQ ID NO: 47097 - DNA, 1007 bp, Oryza sativa
  Clone ID: PAT_MRT4530_4989C.1
cacattgattcggattggccagaggttactgtaaatacggctttatcgtcaatactgtttccaaggattctgtattcatttttttctgaaaacttaccttgacgcttcacaaaaatccgatttgaattacgcgcaaaatcgccccgaggtcggtctgatcgcagttgtacctgcagtctgcccgggcctagtcgccggtttagtgtcggtctaaccaagctccttaatccacaaccttgtttttgccactgtcgtttcgcaaaagcaatttctctttcctttttaattttcatcatcaaccaaaacaccattgttctttgtgacaattagaacaagaaagcacctcatcagcttttacaagatcctccatatactcaacacgccctaaagcatctttcaatctcatttcattcaaaaaacactttgagcaatttggagaaaccaaaacatatttgtgttgtttaatcctttatgcactcaaaacattgaacaaagaacacgcacaaaaagcaactttatattttttttcaaaacgttcttttgtcaaagtcaactcattaacaacatgagagcatgcaaagcaaatccaagagaaaaagacaaataaagcttgttagttttttcaaccaaacactggaaccagtaggtacatatgcacgaacaaaatcggaaccaaacatacctgaaaacttacctggacgcttcacaaaaatccgatttgaattacgcgcaaaatcgccccgaggtcggtctgatcgcagttgtacctgcagtctgcccgggcctagtcgccggtctgaccattgatatacctgcagtctgaccgccattggcaactagtatgaccgattggttagtgtcggtctaaccaagctccttaatccacaaccttgtttttgccactgtcgtttcgcaaaagcaatttctctttcctttttctgtttgcggacaagtctaaaacaaaaaccaaccaaatattcatcttttccaaaaaaaaaaaaaaaaaa

SEQ ID NO: 47098 - DNA, 5817 bp, Oryza sativa
  Clone ID: PAT_MRT4530_498C.1
agcttgccaacggctaccgggttcgccttcttccttaggacaagatgaccaggcaacagctccatcggtcgaacttttttgttgtaagttgccgaagtgcctgtggcgtacttgcgtatgtgctcgagtgcttcgactcttaccccctccaagagttcgagcgacacctcgcgcccctcttcgtccccagagaacatcacccttggtgagttagcccctagctctgtcggggtcattgcctcatcgccataaataagcatgaacgggctgaacttggttggtcttgtgggggtcgttcgaagggcccagagaacagatagcatctcctctggccatttgcccttcgctgccccctcaagcctttttttagtgcttctaggatcttaccgtttgtgtgttcagccgccccatttgactgtgggtgcgcgaccgatgcgaacctgatttccaggttaagcccttcgcacatttctctgaacttgtcagagtcgaattgcttgccattgtcagtgatgaactcttttggcaccccaaaacggcaaacaatgtttttccatacaaacttctgtactgctgccgaagtgatcgctccgaggggttcggcctcaatccattgagagaagtactcgacggccacaattgcgaacttgtacccgtttcacgccaccgggaacagcccaatgatgtccagtccccatctggcgaagggccagattggtgcgatgggctgcaactcatactggggcgatgtttggcttcggccatggcgctggcagctttcgcacttcttgacttgctcaacacagactttcaacacagtgggccagtaaactccttgtctaaacactttggaagcaactgttcttgcggcttggtgtgcgccacatagcccctggtgtatctccctggccatttcctcgccttcggcaaaagagatgcagcgaagcaagggttgaagtaccccggagcgatagagctggcctgagaccatcttatattttgtggctctgagttgcaggcgctttgcttctgcttcgtcttccggaagccagccagtttcaaggtgttttacgaacggggttcgccagtcgtatggatcttcgcccagtttctcctagtcgattgccatgacctccaagctctccacaggcacgcttggtgcaaacaggacttcaaaaaaggtgccaggcgaatgcggtccaccacaagcagcagattttgccaaggtgtgcttcctcgttctggcctctaggtaaatgttcgaccgttatgccggtgaaacacttttccatagaccgaacgacctccaaatacctcttcattccttcttcttttgcctcaaaggacttgtcgacatggcccgccaccagcttagagtcggttcggattagcaagcgccgaacccctaatgctttcgcctttcttaggcccagaagaatggcttcgtattctgctgcgttgttggtcgtgtcgaactgcagccttgcggcataccgaatcggcacaccacttggcgaaatgagcactgccgcaatgcccgcccccttgtgcgaccacgaaccgtcagagtacatcacccagggctgtttgacgggctcgggctcgggggcgagtgccggtgtccattcggccacgaagtcagctagcacttgggacttgatagcagtgcgggcaacaaaatgcaagtcaaaaggggatagctctgctgcccacttgctaagccggccggtaacttctttgccccagagtatttcgcccaaagggtactgcgatggcactatgactttgtgggtctggaagtaatgcttaagcttgcacgaagccatcaccagggcataagcgagcttttccatttcaatgtatcttgtcttcgctccttgcaatgctttggagatgaaatagaccggtttctgccctgaatctatttcttggacaagggcagcactgactgccactggcgaagctgccaggtatagtagcagttcgcttcctggtgctaggctgatcagagctggcgggctttgtaggtattgcttcagctcgccgaacgctgcttggcattcgggtgtccagtggaatttttccacgccccggagggtcttgaagaagggcaaacctctttcggctgctaggaaacccaacaacttgccggcgcgaacaccgaaaacgcacttctcaggattcagtttcgtacccgccgcgcgcaagttgtcgaaggtctcctgcaagtcggacgcgtggtcgaaagccttgcggctttttacgacgacatcgtcgacataagcctccacatttcgccccaactgcttgtaaaggaccttgtacaccagcctcgcgaaggttgctccggcattcctcaggccaaaaggcatcctgaggtgacaaaaggtgccaaatggtgtgatgaaggctgtcttggggatgtctgccgggttcatgtggatctggtgatagccggaatatgcatccaggaagctcatgagttcgcagctagctgtcaaatccacaagctggtcgatccgtggcaagaggaaatcgtccttcggacatgctttgtttaggtctgtgaagtcgacacacatgcgccattttccgtttgacttccgcacaagcactggattcgccagccactcaggatggtcgatctcttgaatgactccagccttgagcaatttttggacttcggcttttgctgcctgttggcgatcagcagacatcttgcgtagcttctgtttccttggcttagcatctggcttgactgccaggtgatgcatgatgagatctgtcgaaacacctcccacttcatcagagccccaggcaaagatatcaatgttcttcttgagtgcctctaggatgttctcagcttcttctttgcccatgtcgccccccaacgatacgagctttgcggggtcggcatcatcaatctatatcttgattatcttgctgtgaggggcgggctttggcacatgcttcgcccggtcatgcggttcggcctcaacattgtgcactgctctgttgattatggccagatctccttttgaagcagccaaaggctgaagccccttgaccacgatcactcctgccgggccgggcatcttgagcttgagataattgtgatgagaaatggcttcgaacttgttcaacgttgcacggccgaagatggcattttagttgtatgggatgtcgacaatgtcaaacaatacttgctctgcgcgtctgttttcccccgtgccgaaggctaccatcaactgtgcttggccgagaacttgaactgcttctccgccgaatcctcggagcgatgctggtgctggggtaaaggcttgggtagtcaaccccatcttggcatatgcttcggcaaagatgacatcggccgaacttcctccgttgaccaggactcgccggacctcgaaaccagctatatcggctgagatcactagaggatcttgatgcgggaacattaatccttcggcatcttctggctcaaaagagatttgctggttcagatacttcttgcggacaggttgttgatggttgcttgcttgctgggcgtcaaactccttgcgaagggcttgcactccttcgacagccatcacagccttgcccgcatggttggttctgaacttcctccaggtcatgggggcttgaccttgccttggcagttgtccttagatcgccggctggggctggcgaaccacgagaggaggtggttcggcaacttgaacttgttgttgggcttgagcagcggcgacggaggccttatcgtactcggcttgtattgcttgccgtcgcttgcaatcctccttgccccttgcgaacccgtcaatgatgtgaagtaggtgctcaagcgtttgcggctccttgttggcaatttttcttgtgagttcgccctcgagtagaccagctgaagcggcgtttatgatagacgcatcggttatgtcttgaacttggcaccgggcttgcgagaagcgacgcatgtactcccttatcgactcccccggcctctggcgaatgctgagtagatgctgctgcgtcttcggcttctcataggtgcctcgaaagttaaggacaaagacatcgcgcaattgctcccatcagtaaatactattggttggcaaattgaaataccaagagcgggcgatgccgtctagggcgagatgtattacctttgccttggtattttcgtcgccatgagccgcttcgatcgcggattcataaatggagaggaattcctttgggtcagtttcgcctaagtagcgtgggacgggtgagaacttgaactggggtgggattggatgggtcttgattcccccactgagcggtagccccttttcgccccctgccctgttcacggcaccttgctgcgggtacggtgtggcgaagggcaaaatcacgacttgcgcgtgtggttgggccatggcattcggctgcccggccccgattggtgatgtttgctgagccgccatggatgggtcgaaagttggttgtgaccatgtcatggtgacctggtttggtgcttgctttgctccgaagcctggcgttggtgtttgcagccgaacggttggcgcctgagcaacattgatggagtcgaactgcagtccttgactccacggcgaagcccccagacctggctgattcgaaggcaaccaactaggtgcaccatgacttgtattcccctccgggtgagccgaaggggcagtacttgaaatgttgtggggttggctgagctgttgaaggaaagcttggagctgcgcctgcagagccgaagccccttctgccattgtatgtggcacttggccaggcggttgaggatgtacttgggcagcaaccggttgagcttgcagttgcacgtgaggggccggatgcgctgctgcggtcgatggctgcccggcgaagtacattggcgcttgtgcggcttgtggcggaaggggctgggtcggcacttgtggatagacttggggtgggacatagcctgccgaatactggaggattggtgccgaagtgaccttggaccgccttgccgcctcgtacgcttgctgctgttcctgcatttggcgaagcatgtcttggagtcgtctcatgttctgtcgcatggcttccatgtcggcttcggtttgtgtctcggggtcaaggttgacttgggcttgcgcagcggcgagcgcagttggggccactgccggctacgatggggcggcttggggcaccagcaattggcttgtcgaaaggatctccgtcctggtctggagtgccctcgccaccgcagccaccttcgccatgtcagccgcgttcggcacctgcacagaggcagtaggggccgaaggcggtagtgatggcgcaggtgcggaagcagatggcgctcctccatcttcggcgacaggcgccgaaggctctgctccctcttcggcggccatatccgtcccggcgtcgctttcctttcgcctcgtaaccttctccttcacaaccttcttcggtggcattcgctctcagtggtttcgctcggaggtccccacggtcggcgccagctgttgtcgaaacgacaaatggttgcccttagaaagggacatttacatgggtacatagtgtaattgaggttcatgggcccctgatggccgttgggcaatcgtcggcccaatagcccctaggcttgatgggccggaaaagcttcttcggtcctcgcgggggagaacttgctatggcgaagtcgtctcccttcggcatatattcttcgccctgcatccttcgcccaagaggcctttggcttggcaaagcacccacgtgatccctcacctctcgccgtccctgttccatagtcttcgccat

SEQ ID NO: 47099 - DNA, 243 bp, Oryza sativa
  Clone ID: PAT_MRT4530_49900C.1
aattttctcaatgaaaatctggatgaggatgtgtacatgacacaacccaaaggatttgtcgatccagaatcagctaaaaggataggccagttgccaaaatctatttatgggttgacaaaagcatctcatagtagaaatattcgttttgacgaagtagtaaggcattggggctttgtcaaaaacgaagaagagccttgtgtttacaagaagaatagtgggaatgcaccggtgtttctaatacta

SEQ ID NO: 47100 - DNA, 513 bp, Oryza sativa
  unsure (1)..(513): unsure at all n locations
  Clone ID: PAT_MRT4530_49901C.1
cggacntgngntncganaaccaacatgataccataaccccggggggtgggctggcaaggcatcacgatcagtcagttcgtccatgggcagtctgctccctagatcaatctttcttctcctcgtcggcaaagccacaggatcttcgctgtgtttatgaaggcgaagatttcttcgtatagatgttcagtgcctgagatcaagatttggagttctgccatatccccttctgttcaccatccatttcactgagtaaatctgttaatgttgagtatttcctttgaactacacattgaaaagcggtgggtgtttttgaagtgaataggttttgaacccccaactcccttcaacaaccagggctattatttccatgggcggtcnatacctgtggggttgccatttggaatttgtaaacagctgtacaaaaattagcaggtgcctgtaactcttatttaaaggaaaaatactacaactagtttagatgtgatctgcaaaaaaaaaaaaaaaaaaaaaaaa

SEQ ID NO: 47101 - DNA, 545 bp, Oryza sativa
  unsure (1)..(545): unsure at all n locations
  Clone ID: PAT_MRT4530_49902C.1
ggacaatacatgtgctattagtattgctcgtgatcctataaaacatgagcttactaagcatatttgtgtggatgcctcgtatacccgcacacaggtacatgatcaggtggttgctcttcagtacgtgccttccgagttgcagctagctgatttctttacaaaggcacaaactagagctcaacacaggttctatctctccaaactcagtgttgttgatccaccctgagtttgaggggggggtgttagatgtgtattagataggttgtatttatggttttatgtcttttggctttccatgttcctgtcttttggttttccctgtatctgtatatatatttgggctattgccctctgatgaatacaagtcgtgttcatancananaaaaaaaaaaaaaaaaaaacaataaataaaaaaaaaaaaaagaacaataaaaaaaatgaaaaagaaagaacgaaaaaatccaaataaatttaaaaaaaattgattcacgcatgcccggcggntatagctggtaagagctttgacatacactgtgttgatagat

SEQ ID NO: 47102 - DNA, 195 bp, Oryza sativa
  Clone ID: PAT_MRT4530_49903C.1
gttgatgaccaggcctcatttgagcatgcagctgattgggttgaggagtgcttggaagacgccctgcgaggaacactgagaaagctgcagttcagcactaaccgccctgcctggatcaacctgaagaggatgctggttgagattgtgttgtctgaaatgctgcagaggatactggctgaaccaggacagagttag

SEQ ID NO: 47103 - DNA, 1146 bp, Oryza sativa
  Clone ID: PAT_MRT4530_49904C.1
atcaaagaataaatgattaatagtttcatctttacgacaaaaagaacaagttcctctcccattccttttaatcagattatcttttattaaaactactccctgatataagtaccataagaagatcttaatctttaatctttatggggctttaatcttccaaattctttaatttatattgggaacatcggtatgcaccaacacaagatatagagatttaaccgaaaatctgtcatcagtggttagattccatttaaactcatcttggttgtgagaaatataatattagcgatgtgtgagagaaggtgattacacgccactaacttagagccagtaaggtccctgcgctaagaaaagcttagcagactagtatggaaaatttctgaaatagttgcatgtttatgcctaacaacattataaagacatgggtattgttctattaaataggcattccctaactatttatcttctcaaaaccgtacttgagagccatctttgatgttgaaagagtcaaatatgtgaaaatcaggcttagccttcattagactagcccaaaagtgtgactctcttgttttccaatgagaaggctgtgactccaaatattttttccttagcatttattgccacacaccatctatagtgagtagcttatacaactacttactaaagagaatcttgttcttaatttcaagatcttgaattcccaacccccttgatctttacgatgatgtctcaccttgctagtcggtatttccttttgtgtccatcctcttgccaaaagaaccttgattgaaaataatcaattttattgatcactcctttatgtatttcaaaaaagaacatcatatatattgataggctgataatcactaaattgattagtgtcagtcgccctctaagtaataaaagtttgccttccaatttgccagccgtttctcaagccattcaatcacctactttcactccgagctacaaagtctcctatggtgtataggaatgcctgtatattgatcctgagctgtttgtgtttctttttgtacgatataaatgaagtaactttttatcaccaccaaaaaaatataattcaaattcgatttacatattgagaattaaaaaaagataaatccagagcactttgatttgattctt

SEQ ID NO: 47104 - DNA, 225 bp, Oryza sativa
  Clone ID: PAT_MRT4530_49905C.1
atggcgatgacacgggtggcaatccgcggtggaccgagtctacggaccggggaagggacggcgcacgacgtggcgccgacgcggcggccacacggcagccacgtgggcggccgaacggacggccccgatctaccatccgcggcgacgcgaggcggcgaccggccggcggcggagggcgacagcgtcacggcgacgcgggcggcggagcagcggctaagcggctaa

SEQ ID NO: 47105 - DNA, 1002 bp, Oryza sativa
  Clone ID: PAT_MRT4530_49906C.1
atgcaggaagcgcttgtctccccggtgcgctcggcattggagctcaagccgttcaacttcggagaccagcggctcgcgtcctcgccgcgctacctccccagcggcgacgacgccctgtaccgctgctcctcccccttcagccccagcttcgggttctcctcgccgtcgccgctagccacctccgtctcgctctcgccgtcctcctccgcctccctcgtcgatgacggcgacgacggaggagcggccgccgacgccacggggcagcggctccagctcgcgcgcctcgcgctgcagtaccaggaggtggccgaccgctacgagctttgcctctcccacctcgccgaggccgccgaagaggcggcggcgctccgtcttgagaacgccgagctccgcgtcaccaacagcgacctcgccctccgtctcgcgctgctcagcgggaagcataccgccgccgtcgccgtcgccgacgagatccgtcggctccgcctcggcgagcagaaggtcgcggccgccaccaaggagcgcacgcccgagaagctcgccgtgctgccgaagagcatctccgtgcggtccacaagctacctcaagctgaaccagcaatcccaggccgccaccgccacttcggcggcccccaaccgcaagccccgcacgtcgtcgaacccaaccaaccccccgaactcgcagcgcgcgtacgacggcggcaagaaaggcgacgagcagaaggcgcaacccgcggacagcggcgcggagctggaggtgtacaaccagggcatgttcaagacggagctgtgcaacaagtgggaggagacgggagactgcccctacggcgaccagtgccagttcgcgcacggcgtcaccgagctccgccccgtcatccgccaccctcgctacaagaccgcggtgtgccgcatggtgctcgccggcgacgtctgcccctacggccaccgttgccacttccgccactcgctcacccccgccgaacgcctcctcctccgatcctag

SEQ ID NO: 47106 - DNA, 2450 bp, Oryza sativa
  Clone ID: PAT_MRT4530_49907C.1
aaacacatgtttgaccattcgtcttattaaaaaaaattataaaatatgtaaaattatttgtatacatgaaagtatatttaacaatgaatcaaatgatttgaaaagaataaataattacttaaatttttttaataagacgaatggtcaaacacgtactaaaaagtcaacggggtcaaatattttaaaacggggggagtactatcatgtccgtgtcggctttgggtcatgggttccgcgcacattatgcactcgccgaagaaaaacatcatcaaaactccatatatatggaaaagaaaggttcacccttcgaatagattttgcaacatatcttccagatcctcgggggtatacgtggctgatgttcctaactggccgccctgtccctgagtctccaggtaggctcggtaagcagagattaccttcccgcacaccgaattgcgcagcacggttcgcagctgagggctattgatcttccagagcttctccgtgtggtaggttatctgcaacaaggagttgaactccaccagcgccgagacactacggaaaagcgacgacctcctgcggctctgccctgcgtaccccaggcacgagacgacatttccccaggacagatcgaggtactccttgatgcgccgatcgacccgctgcttccgctttgcgtaccagtaggcgcccatgaacgactgcaacgaaggctccgcctgctgcagtatgaagtggtcgttgttgagcaggaagatgtgcatccgcccgccggcggctgcgtacatcttggacctgtcctcgatcatggcgtccaccgagttgatcagcctggcgacggtgctcgtcagcgacgatttctcctccgcgagctggtatagctccccgatggagaacagctcgtcgtcgccgtcgtcgtcctcgccctcctggaccagcacgtcgcgattctgcagcaccgggttcagcacgtcgcgattctcaagcagcaggttgatgtagttgagcacgtactgattgaccgggtggatgtcgttcccctgcgccgtcgtccgccacgaatcctcctctcggatcagactctccagatcatggagtatgcccctcatcatgccgctcagcgtcttgagcacggccgtgatcctctcggaaaccaaccatttggtcgctccggggagcagcgccaggaggctcggggagacgcccgagaccaccgcgtacatgtcgatcacgcggaggatcttctccggcgatctgctcagcgcggcgatagcgtccgggaagcacatcatcttcaccaggcttgccttggcgaagagcgcgaattggaattcaggccctgcagctccgtgctggtcgtacctgtaggacctcgatgacgccgcttgggaatacgctgttatagcttgcttgaccgtagcaatggcaatgctcctgctcctgctcgtgtttggagccggatctgagctttcttggtcgagattcgacgagccagagccaggacttacatcatgtaatgtaacaccggcgtggtcgtcgtcgatccacgccggtgcagatatctgtggcctgtacttctcgatcggaagcaccggaatgacaccgccggagtcgccatcgccgctgctgagggtggccttcgtcagacggagggcttccgccatgacggtgagcgcggcgagccaccccttgatcatctcctccacgccgctccatggcttctcctgcaggttcatctcgtcgactctgagaacccagtcaacgccaaggtcggagaaccaggtctgcagtatctcgtcgccgccgccgccgccgccgctgccgctccccagccgcggccgggagaactccgttattagcctctcggtgtacctgtcgctgaccatatgactcgcgatctcgctgaggccccggaacgcctccccgcgcagcaacctgtagctctcgggcccggagcttggagtaccgtgcgcctccgagccgggagcggaggaggtaaaggatgccgaagacgagctcgtgaccgagccactcgacgggaagacgagggtggtgctgctggtggacgcggcggcaacggacgcggtgacgacccgctggatcgagttgcggtagctgcagctgccgccatccgattccgagcgatgaggacttggccgccaaacacggtcgaacttcagcgctcgcaactcctcttgagacttggagaccttggttgagatctggtagctagttgcagtggcggtgttccatcggctctgcggtggtaggccacggtaggcgtcgggctcgcggaggagacgcgacggcgatagcagttggaggagccctcccttttgccagatctggcaggaggggaggcggcggcggcagttggaggagccctccctttcgccagatctggcgggaggggaggcggcagcggcaggtggaggagccctcccctcactcctgttgtctaacgccat

SEQ ID NO: 47107 - DNA, 411 bp, Oryza sativa
  unsure (1)..(411): unsure at all n locations
  Clone ID: PAT_MRT4530_49908C.1
gccttgctnaaaccggtggaatcgagagccacgccctngcgggccggggtgtggcggaagcccccgccccgtaacggcgtcgtaagtggcgattgggataagaaaagggtggcggcggctgcggcagtggcgatgagtggctcggcgtcgacgcttgggatgcagtgcgggagctacggctcgctcgcgtcggtcggcggcgggtggaagggcaggggcagggggtgggggtggcgaggcggcggggagaaggagcggctgcagctccaccgcgcgctgcggctggtgggccgccagatggccggggtgctgctgctgctcgccgctgcctccgccgccatctacgcgggcacggccggcggccggcggacgatggggagcgacatgtgggcaggaagaggagaagagtga

SEQ ID NO: 47108 - DNA, 258 bp, Oryza sativa
  Clone ID: PAT_MRT4530_49909C.1
atgacctcaggtgtatatgcattatatatcctgctgccatatcttgagatttgcatcttccgatctaccgctgaatttctcttggtttgtcttgagcagcgagggccttggggaacaaggagcacaatgggtggaagtcatatcatggtaaattactacactctccttggccactgcttcacgttcctcggcgacgacgatgacgatgaccaatggtgttgcgacgattatgagcagcacggcgagggtcgtcggtga

SEQ ID NO: 47109 - DNA, 465 bp, Oryza sativa
  Clone ID: PAT_MRT4530_4990C.1
aggttcaaattcaacttttttattaaagctactgcgtgtcccacaggaactgtttcataaaactggacatatcatacggactccatgggccattaaaccaaaaacacttggacatgaactccacaaatactggactaacagaggctcgggacgaccagccacataagcagctccaccaaactggctgtttacttgaccaccacggcgcggtacaccaaccggagggtggacttcttctggaggttggattctgcgagggtgccttcatcctccaactgcttgccagaacagaacagactctgctggtctgaaggaaaaccctccttccactggatcttggccacaacattatcaatggggtctgatctatcaacctgcaaagagatggtctccccaggcaaggcctacaccaacatctgtataccacctcggaaacgaagcacctggtttagggtagactccttt

SEQ ID NO: 47110 - DNA, 399 bp, Oryza sativa
  Clone ID: PAT_MRT4530_49910C.1
atgcggcggcggcggcggttcctcggcgcggcgaccactccggcggcggcggaagcctctcgacgcgagcagcaggcggggcggggtggctcctcgatagggcacaacagaaggtttgccaaggtgcagctgccaaggctggagcagattgtgaaagagccgacgctgcagcaggtgaaacagatggctgaggagatgctgccgcagaagtcgatggcacaactgctggagacgagggaggtgacagatgaacggcaatggacggcgaagtgcttgcacgtccatggtggggaaccggcggaagatctccatctgggacgactggggaggaggcgatctccatgtttgcgagaggtcgccggcgaccggcagcggaactggaagagagtagagacttag

SEQ ID NO: 47111 - DNA, 788 bp, Oryza sativa
  unsure (1)..(788): unsure at all n locations
  Clone ID: PAT_MRT4530_49911C.1
ccggccngggaaaaaaggatccagtcaaaacctgagagagccgaatactctcttccccaaactatctccgcctcttcctcctccgcctccggtgatccggtctcgctatctctcttccgcatctcgggacgcgatggcggcgctgctgggccggaggttcgggatggcggcggcggcgctcatcgccctcgcggcgctcggatccgccgcctcggggacggcgtccaagtcgtccttcgtgaaatccaccgtcaaagcccacgacgtcgtcatattctccaagtcatactgcccgtactgtagaagagccaaagctgtgttcaaggaacttgaactgaagaaggagccgtatgttgtggagcttgatcaacgagaggatggttgggagattcaggatgccttatctgacatggttggcaggcgaactgttcctcaagtttttgtccatgggaagcacctgggtggctctgatgatactgttgaagcatatgagagtggcaagctagccaaacttttgaacattgatgtcaaagaagatctttgagtagtaatagtttagcatcaatggcaggcctctttcatttccatagaacatacccaaatactatgcaactatgaattcttcatagaatttggctgtgaatgtacctctttagacccctttaaactgtactctatgacaaaccgacaatacctccgttacctcacatttgttatttgcataggccatcgtaattgattgcatcgcaatcagcattcttccaaaaaaaaaaaaaaaaaaattgcgg

SEQ ID NO: 47112 - DNA, 447 bp, Oryza sativa
  Clone ID: PAT_MRT4530_49912C.1
tcactcggctgccacgtcgcagctgagtaggcggaggaagggacgctgccaggcgcatttatgggtggcgccccaaccacctccgccgcatttaaagcggcatggcaggtcgcgcgttgcccaagcaaccgtttctctagggtttgagatctctttgttgacgaaaaatcgaacacactggcaggagtagggtattacgcttcccagcggcccgaacctaaataatccctggtctatctcttgatcgccatccaccacactagccaaatccacggcgaagatgcgctcttgatcatcgcgccctatccccatcccgtagtcgacaacagagtagtcttcctcctcgaatccgtgtccgacgagatcagagacagcgctagatccctcttggtcaccagtatctagtgcccttttccttgttgggaaaaaagttgcttctatcgccat

SEQ ID NO: 47113 - DNA, 510 bp, Oryza sativa
  Clone ID: PAT_MRT4530_49913C.1
atgggaaacgcgatgtcaggccacaagggcggcgcggtccatcgccgccccgcgccctcccctcgcctctcctccgcgccgcccctccaccagcagccatctccacaccgcgccggcgcccctctcctctccacccgcgccgccgccgcccctcgcctccccaccgcgcctctacccctagccggagaggcgccgcccctccacctccaccagaagccgtccccacaccgcgccggcgaccctcgcctccccaccgcgcctccacccctagccggagaggcgccgcccctccacctccaccagaagccgtccccacaccgcgccggctaccctcgtctctccacccgtgccgccctcgacctgcgccgcctcctcgccgccgtcgaacgccgacgcccctcgacgccctcgaccgccgctgcctcctcgccgccctcgaccgccgacgccccgcgccgccaggccgcagccacctccgccggtcacgatcgccgtcatctgaaggcctaa

SEQ ID NO: 47114 - DNA, 420 bp, Oryza sativa
  Clone ID: PAT_MRT4530_49914C.1
ggattcggcacgagggagaactagtctcgagtttttttttttttttttttgttagatgggctgggctaaatttgatcaaccggctgaggctgccggcggccaacattgacaatgtccggtcgttctaaaaaaaaaagagagaaataaaaactctgggtcaacggtcacccccgcatgcatacagcatgtagtattcatgtgtccatgtcctcgcaaagacaccgtgggctactcctagtcaccgattggtttacacttggtccatccccatcataatcagctcgataatcgtacgtcgtcctcactgtctctaggtacctaataaaaagaaattcagtattactctaattttttttttgacatttaaagagcaggagagggtcccactgcgctatattaatatatgtaaatatgtagaag

SEQ ID NO: 47115 - DNA, 427 bp, Oryza sativa
  Clone ID: PAT_MRT4530_49915C.1
atggcaccagcgttgctctacccgaccatcctcttcctcgcagcggccgccgtcggcgccgccgctccgccgcactcgcagtgtctcgacaacccgccggacctgacgacggccggtggcggcggcgaggccggcgtggtcgtccacgatcttggaggattcgaggcctacgtcaccggcgccgtccattccaggcggaccatcctcttggccaccgacatcttcggattcgaagcgccattgctgaggtacaatcttcttcttcgtttgtataatagggaaattgctgtatgtacgataaacttgttatgagttgatgttcgttatttatctataaataattatacggatgtacttgtgccattgatgttcattgctggctataaattacatgtggatgtacaactcaattttcacaaaaaaaaaa

SEQ ID NO: 47116 - DNA, 192 bp, Oryza sativa
  Clone ID: PAT_MRT4530_49916C.1
atggtggtcgtcgggcggtcgctgtccacgctgtcgtggatgtacatcgtctccgacatgagccacgccgggtttaagagcatcaacttcgggtggggggaggccatctatggcgcggcggcggtggacgcgagggggaaggagggcggctcaccggcggcggcagcggcgacgacggcggcggcgatggtg

SEQ ID NO: 47117 - DNA, 217 bp, Oryza sativa
  Clone ID: PAT_MRT4530_49917C.1
cctgcaaaactaataatggttgcattggggtgaggtatatcagaacaagggcgggccatactttaccagctcatcaacgagatgaactgatggctccacgtgcccaacaataggaccgtccgatacgttatacaacccctgaattccctcgatcacgaccgttcattttaccaacttcagactacggccctaaacttcatgcactcgacaactaggc

SEQ ID NO: 47118 - DNA, 2244 bp, Oryza sativa
  Clone ID: PAT_MRT4530_49918C.1
atggatttagaaaccatcaagattcttttgcgctaccctagaggttctgttgagtacttagctggagtagatggatttcttgaatttgcatataaagataagttagaggatacaaagatttattgtccatgtgaaacatgcgtacatactatgctactttcaaaaaatgatgtctatgatcatttggtgtgcaatggaatgcttcagagttataaccaatgggattttcatggtgagtcttcagaggagcaaattaggaaccaacaaccacagcctcacaatgaagacatgcgtgctaacatgcacgaattaattaatgactcacttaggactgtgtatgacgacatgcctatgagtgattctgcagattcgccatgtacacacactgatggaccaaatttagaagctcaagcattttatgagttggtgaaagattcaaagaagcctttatgggatggatgtgaactatcacacttatctctgctagtgcttttgttcaatatgaaatccatgaacaaatggagtgataaatcatttggagatctacttgatattcttcacatggcaattccaaatggaaaagaattgccaaaaaacttttatgaggctaagaaggtggtttcaaaatttggtctagattatcaacaaattcatgcatgtcccaataactgtcagctgttttggaaagagaaggttaatgatgatttttgttcaacttgtaaggcttctagatggaaagataaaaaaccagaaaccaagttaacgaagaaagaaagaaagaaagcaacaccaatcaaagtcttacgatattttccaataaaggagaggctgaaaagattgttcatgtgtagagaaacagcatcgctcccacgttggcatgatgaagagcgcttagtagaggatggtgtgcttcgacatccagctgattctccggcatggaagaactttgataaaagattcaagcaatttgcatctgattctcgtaatatacgatttgggttagctacagatgggtttaacccatatgctttaggaatgcttgcttcacatatggtgcatggagaatttgcatgcccgccttgtggtccaaatgtatggtccaaacgtttggcacatgggaagaaatcttgttttatgggtcattgtcgatttttgccacctaatcatgaatttcgttttgatagaaattctttggatggaaccacagagattagtacagagcctatgacttactatgggcgtctggtattggatgaaataaattctatcggtgattttaagaagtcaaaaacttataaggcagaaatgaacattagaggggagctccatccacaacaaagaacttcaagcaagttctacttaccacctgccagctttactatgtccaaaagtgagaagcaattgttctgtaaagttcttagggatataaaagttcctgatggctattcttcaaacatatctagatgtgtgaactctgctgaaggaaaaattcatgggctcaaaacacatgattgccatgttctaatgcaacaattgatgccaattgctttgaggggtattcttcccaatgaagtcacatctgtcttgtttgacttatctgcttactttcgaggaatatgttcaaaagttctccatgttgatgagcttgaccgtttggaagaagcaaaaatcacattgtgtagaatggaaatgatatttcctcctagattcttcactgttatggttcacttagtcgtccatttagctactgaatgtaagattgctgggccagtttgctatcgatggatgtactttattgaaagagaacatgctgctaatttgcaaaggaagaaacgcaaaaggctaactccaaaaaacattgagaacatgcaaaatgaacaattccctgattggttcagagatcatatcttgcagttggagaatcaaagaggtatcgatagtattgatgaggatattagatggctggcacgtggaccaattgagattgagcatgagccctttgtatttgcaaatcaagtcgaccaagtgttttacattgaagaccatttaaatccagggtggtctattgtaaggaagatgaaacctagagatgtatttgaactgggcgaagaatggaatgatgtggaatgcgaaccataccatgtcaataatcttggggagctatttgacagtgcacatgatggtcagacatggattcgaagagatatagaaggaacaactgtcaataacatagtaactaattaa

SEQ ID NO: 47119 - DNA, 1956 bp, Oryza sativa
  Clone ID: PAT_MRT4530_49919C.1
atggatttaaaaaccatcaagattcttttgcgctaccctagaggttctgatgagtacttagctggagtacatggatttcttgaatttgcatataaagataagtcggaggatacaaagatttattgtccatgtgaaacatgcgtacatactatgctactttcaaaaaatgatgtctatgatcgtttggtgtgcaatggaatgctccagagttatgaccaatgggattttcatggtgagtcttcagaggagcaaactaggaatcagcaaccacagccccacaatgaaaatatgcgtgctaacatgcacgaattaattaatgatgcatttaggactgtgtatgacgacgtgcctatgagtgatcatgcagattcaccatgtacacatactgatgggccaaatttagaagctcaagcattttataagctggtgaaagattcagagaagcctttatgggatggatgtgaactatcacacttatctctgctagtgcttttgttcaatatgaaatccatgaacaaatggagtgataaatcatttggcgatctacttgatatccttcacatggcaattccaaatgaaaaagaattgccaaaaaacttttatgaggctaagaaggtggtttcaaaatttggtctagattatcaacaaattcatgcatgtcccaataactgtcagctgttttggaaagataaggttaatgatgatttttgttcaatttgtaaggcttctagatggaaaggtaaaaagccagaaaccaagttaacgaaagaaagaaagaaagcaacgccaagcaaagttttacgatattttccaataaaggataggctaaaaagattgttcatgtgcagagaaacagcatcgctcccacgttggcatgatgaagagcgcttagaggatggtgcgcttcaacatccaactgattctccggcatggaagaactttgatgaaaggttcaagcaatttgtatctgattctcgtaatatacggtttgggttagctacagatgggtttaacccatatgaaggaaagtcaaaggataatctccaagctcgtcttgatctcaaagaaatgaacattagagaggagctgcatccacaacaaagaacttcaagcaagttttacttgccacctgctagctttactatgtcgaaaagcgagaagcaattgttctgtaaagttcttcgggatataaaagttcctgatggctattctgcaaatatatccagatgtgtaaactatgccgaaggaaaaattcatgggctcaagacacatgattgccatgttctaatgcaacaattgatgccaattgctttgaggggtattcttcccgatgatgtcacatccgtcttgtttgacttatctgcttactttcaaggaatatgttcaaaagttcttcatgttgatgagcttgaccgtttggaagaagcaattcaaatcacattatgcagaatggaaatgataattcctcctagattcttcacggttatggttcacttggttgtccatttagctactgaatgtaagattgctgggccagtttgctatcgatggatgtactttattgaaaggtacttgggtaaattgaagtcgtatgttcgcaataaagcgcgtccaaaaggttcaattgcagaatcatatttggcagatgagtgtatggcattttgttcacgatatttggaaggtttccctaccaagcataacctaccatcaaggaataatgacaagccagatcagtttgagactcccatgagtaggcaagaatctactttgtttcctccagtaggaaaaccattgggaaaaccatcagtgtactccttaactggtagagagaaattgcaagcccatagagaacatgctgctgatttgaaaaggaataagcgcaaaaggatgaagcctggtataaatctgaccagggctaacgtgccatctctaagagataacacgctagctccggct

SEQ ID NO: 47120 - DNA, 373 bp, Oryza sativa
  Clone ID: PAT_MRT4530_4991C.1
atgggtccttttcgctacgctaatatcataggtgtcgtggtccaacaagacggcgccaatgatattaacatcatccccctagacttcctgtcctcgacgccgttccccgtgacgccaatatcgttgacgccatcttgcctccgcacgctcctccgtcccttcgtgagcgccacctcgcccagcccgcatcgcgactctgccgggacaacgcgctccgcccccaaattccacgcgccgccgaattccatgcgctgccgcaccgaatccgaagacggccgccctcttttccccatcctgaagcctagccgcatgctgcctttgctcgctgccgtcgtgccgcagcgctgcctgggcaatgagaacctggaagaag

SEQ ID NO: 47121 - DNA, 2593 bp, Oryza sativa
  Clone ID: PAT_MRT4530_49920C.1
atggatttaaaaaccatcaagattcttttgcgctaccctagaggttctgatgagtacttaactggagtacatggatttcttgaatttgcatacaaagataagtcggaggatacaaagatttattgtccatgtggaacatgcgtacatactatgctactttcaaaaaatgatgtttatgatcattgggtgtgcaatggaatgcttcagagttatgaccaatgggattttcatggtgagtcttcagaggagcaaactaggaatcagcaaccacagccccacaatgaaaatatgcgtgctaacatgcacgaattaattaatgatgcacttaggactgtgtttgacgatgtgcctatgagtgatcatgcagattcatcgtgtacacacactgatgggccaaatttagaagctcaagcattttataagctggtgaaagattcagagaagcctttatgggatggatctgattctccggcatggaagaactttgatgaaaggttcaagcaatttgcatctgattctcgtaatatacagtttgggttagctacagatgggtttaacccatatggtatgttgagctctacatacagttgttggccagttgttttagtaatttataatcttccaccatggctctgcatgaaggaacctaatcttctaatgccattaataattcctgggcccaaaagtcctggagataacattcatgttttcctccagccacttctagaagatttaagagacatatttttcaatggcatttccacatatgatgcatctagagatgaaacttttaatttgagggcagctgtactatggactataaatgacttgccagctttaggaatgcttgcttcacatatggtgcatggagaatttgcatgcccgccttgtggtccaaacgtttggcacatgggaaaaaaatcttgttttatgggtcatcgtcgatttttgccacctaatcatgaattttgttttgatagaaattcttttgatggaaccacagagattagtgtagagcctataacttaggcgtccggtattggatgaaataaatgctattggtgattttaagaagtcaaaaacttataaggcaataagtagtctattcacattaccttattgggatggcaatcttcttcggcataatcttgatgtgatgcacatagaaaaaaatgtgtgcgacaatatttatggtacacttctaaatttagaaggaaagtcaaaggataatctccaagctggtcttaatctcaaagaaatgaacattagagaggagctgcatccacaacaaagaacttcaagcaagttttacttgccacctgctagctttactatgtcgaaaagaaaaattcatgggctcaagacacatgattgccatgttctaatgcaacaatttatgccaattgctttgaggggtattcttcccgatgatgtcacatccgtcttgtttgacttatctgcttacttttgaggaatatgttcaaaagttcttcatgttgatgagcttgaccgtttggaagaagcaattaaaatcacattatgcagaatggaaatgatatttcctcctggattcttcacggttatggtttacttggtcgtccatttagctactgaatgtaagattgctgggccagtttgctatcgatggatgtactttattgaaaggtacttgggtaaattgaagtcgtatgttcgcaacaaagcgcgtccagaaggttcaattgtagaatcatatttggcagctgagtgtatggcattttgttcacgatatttggaaggtttccctaccaagcataacctaccatcaaggaataatgacaaaccagatcagtttgagactcccatgagtaggcaagaatccactttgtttcctccagtaggaaaaccattgggaaaaccatcggtgtactccttaactgatagagaaaaattgcaagcccatagatatgtgctatacaactgtgatgctgtagtaccatatctaaaagaacatgttgctgatttaaaaaggaataagcgcaaaaggttaactccaaaaaacattgaggacatgcaaaatgaacaatttcctaattggttcagagatcatatcttgcagttggagaatcaaagaggtatcgatagcattgatgaggatattagatggttggcacgtggaccaattgaggtagcaaaacgacatagagcattcaatacccgtgggtacaggttcagatcaaagcgttatgacagggtgactcaaaatagtggagttgttgtgactgcaaaaacatcgagctacacgtccgcgagtgataccaaccctgtccttggtgatatcatgtattacggaaggattgagcatgagccctttgtatttacaaatcaagtcgaccaagtgttttacattgaagaccatttaaatccagggtggtctattgtaaggaagatgaaacccagagatatatttgaactgggcgaagagcggaatgatgtggaatgtgaaccatatcatgtcagtaatcttggggagctatttgacaatgcacataatggtcagacatgggtccaaagagatatagaaggaacaattgtcgataacatggtaactaat

SEQ ID NO: 47122 - DNA, 2613 bp, Oryza sativa
  Clone ID: PAT_MRT4530_49921C.1
atggatttagaaaccatcaagattcttttgcgctaccctagaggttctgttgagtacttagctggagtagatggatttcttgaatttgtatataaagataagttagaggatacaaagatttattgtccatgtgaaacatgcgtacatactatgctactttcaaaaaatgatgtctatgatcatttggtgtgcaatggaatgcttcagagttatgaccaatgggattttcatggtgagtcttcagaggagcaaattaggaaccaacaaccacagcctcacaatgaagacatgcgtgctaacatgcacgaattaattaatgatgcacttaggactgtgtatgacgacatgcctatgagtgattctgcagattcgccatgtacacacactgatggaccaaatttagaagctcaagcattttataagttggtgaaagattcagagaagcctttatgggatggaactgattctccggcatggaagaactttgataaaaggttcaagcaatttgcatctgattctcgtaatatacgatttgggttagctacagatgggtttaacccatatggtatgttgagctctacctatagttgctggccagttgttttagtaatatataatcttccaccatggctctgcatgaaggaacctaatcttctaatgccattaataattcctgggcccaaaagtcctggagataacattcatgttttcctccagccgcttctagaagatttaagagacatatttgtcaatggcatttccacatatgatgcatctagaaatgaaacttttaatttgagggcagctgtactgtggactataaatgacttgccagctttaggaatgcttgcttcacatatggtgcatggagaatttgcatgcccgccttgtggtccaaatgtatggtccaaacgtttggcacatgggaagaaatcttgttttatgggtcatcgtcgatttttgccacctaatcatgaatttcgttttgatagaaattcttttgatggaaccacagagattagtacagagcctatgacttactatgggcgtccggtattggatgaaataaatgctatcggtgattttaagaagtcaaaaacttataaggcagtaagtagtttattcacactaccttattgggatggcaatcttcttcggcataatcttgatgtgatgcacatagaaaaaaatgtgtgcgataatatttatggtacacttctaaatttagaaggaaagtcaaaggataatctccaagctcgtcttgatctcaaggaaatgaacattagaggggagctccatccacaacaaagaacttcaagcaagttctacttaccacctgccagctttactatgtccaaaagaaaaattcatgggctcaaaacacatgattgccatgttctaatgcaacaattgatgccaattgctttgaggggtattcttcccgatgaaatcacatctgtcttgtttgacttatctgcttactttcgaggaatatgttcaaaagttctccatgttgatgagcttgaccgtttggaagaagcaattaaaatcacattgtgcagaatggaaatgatatttcctcctggattcttcactgttatggttcacttagtcgtccatttagctactgaatgtaagattgctgggccagtttgctatcgatggatgtactttattgaaaggtacctgggtaaattgaagtcgtatgttcgcaacaaagcgcgtccagaaggttcaattgcagaatcatatttggcagatgagtgcatggcattttgttcacgatacttggaaggtttccctaccaagcataacataccatcaaggaataatgacaaaccagatcaatttgagactcccatgagtaggcaagaatccactttgtttcctccagtaggaaaaccattgggaaaaccatcggcgtactccttaactgatagagagaaattgcaagcacatagatatgtgctatacaactgtgatgctgtagtgccatatctgaaagaacatgctgctgatttacaaaggaagaaacgcaaaaggctaactccaaaaaacattgagaacatgcaaaatgaacaattccctgattggttcagagatcatatcttgcagttggagaatcaaagaggtatcgatagtattgacgaggatattagatggttggcacgtggaccaattgaggtagcaaaacgacatagagcattcaatacccgtgggtataggttcagatcaaagcgttatgacagggtgactcaaaacagtggagttgttgtgactgcaaaaacatcgagctacacgtccgccagtgatactaaccctgtccttggtgatatcatgtattacggaaggattgagcatgagccctttgtatttgcaaatcaagtcgaccaagtgttttacattgaagaccatttaaatccagggtggtctattgtaaggaagatgaaacccagagatgtatttgaactgggcgaagaatggaatgatgtggaatgcgaaccataccatgtcagtaatcttggggagctatttgacagtgcacatgatggtcagacatggattcgaagagatatagaaggaacaactgtcgataacatggtaactaattaa

SEQ ID NO: 47123 - DNA, 660 bp, Oryza sativa
  unsure (1)..(660): unsure at all n locations
  Clone ID: PAT_MRT4530_49922C.1
ttagataggncccngggcagatngagngtncgaacagaggttnttaanccattctcaacgcctccatcaccaactccaacaccgccatcgagatcaggaacttcctcggcgagaagaaggtgaggaaagtggacatgcttgagggtgtgacaattttgcgttctgagaaggtcaaggatgagctggtccttgatggcaatgatatcgagcttgtctcccgttctgcggcactgatcaaccagaaatgccacgtcaagaacaaggatatcaggaagttcctggatggcatctatgtcagtgacaagggcaccatcactgaggaccagtgagctgcgtttccttactagctgtagcaaaacctgtcctagagagagtgcacaaggaacttttactgctctgtttttgagtcaaattacaaggtcattcgacaatgaaattttgtactactgggttaggatgttattatgtaattggagcatgtgctcctatggtatccgtattgtttgtgagaatgtttctgtgcttatttctcttgatggatcttttttacaccgttgaaagaacctgcaacttgggttattattatctcgccctaaaaaaaaaaactcgagggggggcccggtacccaattcgccctatagtgagtcgtattacaattnc

SEQ ID NO: 47124 - DNA, 606 bp, Oryza sativa
  Clone ID: PAT_MRT4530_49923C.1
atggctgagggagaagggcagtgcaagggtggaagtgggaaggggaaaagagaggaagctattatttgtatgattgtatctacatggacaaaaaaaaggaaatggggcatcgctgtcaggctggttcctctctacttccttgagagcctcttccactgccttttccacttcacaagccgcaatctgtggtctcgacgttcatctccgtccacagcctgttcccggacatgctcgaccggatcccgcgcgccttgacgctcatgcccttgagccgccggagcgcggcgatcatggagtcgatcgacgacgacggctcgtcgacctcgaactgcaccgtgacgcacggctgctgctcgtcgtggcccatgatctgggccttcagctcctcgttcctcctctgcagctggtccctcgcgaccttcagctcgtggatgtagatcgccgccgactgcacgatcgagttcttgtcccccttggagcgagaggagaccatggcgtagaggtcggcgtagctctggctgagcttctcgcggcgctggcgctcgcgcatcatgtggcggaaaccgcggctgctctccacgtcggcgccctgcccgcgccgccgcc

SEQ ID NO: 47125 - DNA, 1313 bp, Oryza sativa
  Clone ID: PAT_MRT4530_49924C.1
ttttttttttttttttttttttgagtttatgtgggatgtgaaattgatccctttgtgattggaactggttgtgtctgtgttatgacaaatctgattcccttttcttttttaactgataaacaagctgcttaaatcttttttgtactcttctctttcttttttccttgtagaaaagagaggaagctattatttgtatgattgtatctacatggacaaaaaaaaggtacattgacaaggagatatggagattttttttccacttgctccatcacaagcttttaaaaaaatgaacaaatgggggtcccagcaggatcatgtttcaaaaccgatcaaaacacattttgcacatgagatgtctgtgtccagcctttgcttccaggaaatggggcatcgctgtcaggctggttcctctctacttccttgagagcctcttccactgccttttccacttcacaagccgcaatcgtggtctcgacgttcatctccgtccacagcctgttcccggacatgctcgaccggatcccgcgcgccttgacgctcatgcccttgagccgccggagcgcggcgatcatggagtcgatcgacgacgacggctcgtcgacctcgaactgcaccgtgacgcacggctgctgctcgtcgtggcccatgatctgggccttcagctcctcgttcctcctctgcagctggtccctcgcgaccttcagctcgtggatgtagatcgccgccgactgcacgatcgagttcttgtccccctgcaggggcgagaacggctttgtgtcggcgccagtgtagtaaacactccatttaagaggtattaaagggggatttcgaacattctgaagcttggagcgagaggagaccatggcgtagaggtcggcgtagctctggctgagcttctcgcggcgctggcgctcgcgcatcatgtggcggaaaccgcggctgctctccacgtcggcgccctgcccgcgccgccgccgctgcggcacctcctcctcctcctccatctcctcaccctcccccttctcccccccgccgccgccgccgcccatcctgcccagcacgtccatcaccctccggtggatgttcgtcccaccggtggtgacagcccccgccgccgccggcgctccggcgtgcaccgcgccgccgtactcctggaacgcgctctgcctcgcctccgccgccgcctgctccggctccggctccggctccggcgacgcaatgaggccgaacggcagctccggcgacgccggcacgtggtgggggaagaagaacgcggcctcgtcggcgtggaacgcgccgtagtacgactccat

SEQ ID NO: 47126 - DNA, 404 bp, Oryza sativa
  Clone ID: PAT_MRT4530_49925C.1
aaaaagggaacacagccggccgggagttatttcttgttggaacaaaaagggcccggaatttttcctccccccccaaacccttgaaccttttgccttgcgggcatttttttttttttttaaaaagaggatccaaatcggtgccactttttttcccccccccctttgtacaaggccgggcccccaaaaaattttcttagggcaaatttgggaggattgcaggggccctttaacccttgagggtggccccaaaaatttttttttttttggcagaaacagaagcccccttgtttttggggttctaaaaacctttaagccccccaaaagattggaaaaaaaacaacctttggggaaaggggcaaaggaatttgccaaatgaccttttaaacaggaaaatgtttttaaaa

SEQ ID NO: 47127 - DNA, 689 bp, Oryza sativa
  Clone ID: PAT_MRT4530_49926C.1
atatgtaagttactctaaaatatcagataaatttttcaaactcaattaattatacattaataccaccttgttttacgtaaatcacttaatcttcatctttatcctcatctacttgagttactgtccttcgtgtctgattcggcaacatatattttttgacggaaagattcggcaatatatatttttttgactgaaagattcggcaatatatttgctcaagaactttattcttttgctgttttgcacttgcacactaacctgcctatcctgcaaaatcaaacccacaaaccagtgatagttttcaagaaaaatagcaataatgaagccaatgccaagacagctctcttcaagcagcaaccgagataatagcagattctgcatgcctcccttcggccaagctctgctgctactcctgctttgcttcgtctgtcatgccggttcatgcaccgagcaggagagggaatctctcctccagttcctctccgggctatcgaacgatggcggccttggtgtgtcatggcaaaacggcacagactgctgcacctgggaaggcatcacctgcagcggaaacggagcggtggtcgaggtgatctctctggcatcaagaggcctttgaaggagcatctcaccatccctcggcgacctcaccggtttaactgagctgaacttgtcccgcaactcgttgtccg

SEQ ID NO: 47128 - DNA, 363 bp, Oryza sativa
  Clone ID: PAT_MRT4530_49927C.1
atataataataaaatataaatgaaaaaaaaaaaaaaaaaaaaaaaaaaaaaaaaaaaaaaaaaaaaaaagaaaaaaaaaaaaaaaaaaagcatataaaattgtctaaaaaaaaacaaaaacaaaaaagcaacaagaaaaggaaggggaccaaaaaaaacatccaattatacaaacagaaaaaagataggttggagccaaataacttctacaaaggtactgcaaaaatgctaagaaacaaggctataaaaaggagataagaaagcttgaaactgccttgaatgagttgcacaaggcttccctagacggcagtcacggaacccaactcgaaggagcactgaaagggggtgggataaaagaggtaa

SEQ ID NO: 47129 - DNA, 501 bp, Oryza sativa
  Clone ID: PAT_MRT4530_49928C.1
ctattctttagcctttccgttctcccatcttgcgctcatcctagacttcggccgccgtcctagagcccatccgccccagcagccctcgagaatgcccaggccggcactttcgagcagcggagctcgatcgccataggctgccatggcgatgctcgtgtctgggctcgccatgctcatgataacacgtcaccatggccaccggtaattaagttcttgttcctggtgagcagttgagacgatgcaggttgcattcgcatcgtccctggcgttcgtggtcagccgcttgcctctactagtgagcactgaacagcatcggcctggccgatttcagcgtgggcggacgcctacattgttagaaacacagatatgttagttaaagataagagtcaaatacaaatatagggatatgatacaattctagagatagaatcttagagatacaatagagtcctagagatagaatcctagagataatctagagataaatctgctcttacttga

SEQ ID NO: 47130 - DNA, 2196 bp, Oryza sativa
  Clone ID: PAT_MRT4530_49929C.1
atgcccgtcaagaactgcttctcctacaactctgttatcacctcccacctcaattccagagaccaccatgcagcgcttaatatcttccgatccatgcccgagaggaacaccttctcatggaatacaatcataactggcattgtgtccacaggcaatctcgacatggcccgttcactgctgattgaaatgcctgtcaaggatcctgtggcttgcaatgctgttttgcataggtatgtccggcgtggccgggcggatgaggcgtttgcattactcaggacggttggtcaatgcagtggtgcagatgcctcttctccatggaatgacccttttgtgcttgcgacaattgttggtgcttgtgctgattggatgaagtatgattttgggaggcaggctcatgctcggatggtggtttccaagattgaacaggatttggtgttgagttgcgcattagttaacatgtactgcaaatgtggggatttggattctgctcgctatgtccttaatggtttaactcaggttgatgagttctcactttctgcactcatatatggctatgcttcttgtggacatttgcatgaggcgatacgactttttgacagaaaggaggaaccaagcattgctatgtggaattctcttatcagtggctgtgcatttgcctgttgtggaaatgatgcttttgctctttttgcaaggatgatgcgatcagatgtgttacctgattcttcaacttatgccagcattttgaatgtatgtggtttttcagtcatggtgaatcctgggcaacagattcatgggtgtggtctaaaatgtggagcagtcaatgacataatagtagcaagtgcactcattgatttctactcaaaatgtggcctctgggaggatgcttgcagagcttttagagagcttaggtttcatgataccatagtgctcaactcaatgatcactgtttactcaaactgtgggcagatagaagaggcgagaagaatttttgatatgatcactggtaagagtgtgatctcatggaattctatggtggttgggttgagccagaatgggcatgctagggatgcacttgggttattctgtgagatgcatcggcttggtttgcggcttgacaaggttgctatagccagtgctctgagtgcatcgagcagcatttgctctatcagttttggagagcagatcttttctctagccactgttcttggtttgcaatctgatcatgttgttgcgtcttcactcattgatctgtattgcaaatgtggaagcctagcaaatgggtgcaggatctttgaagaaatcgataagccagacgaggtcttatggaactcaatgctgattggtcatgcttccaatgggtatggacatgaagcattggaactcttggagttgatgaaaactaagggcataaaaccaagtgaacgaacatttattgctgtcctttctgcatgctgccactctggactcgtgaaagagggactgacatggtttcaccggatgcaagcggacttcagtgtgagtccatcagctgagcattacgcatgtgtgactgatctcttagtccgcgcaggtcggctagaggaatcagttgaattcattgaaaatatgccctttgaagctgatgcggttagctggacaactgttattggtggatgcaaagctcagggcaatgaggccatgatgcggaaggtggcgaagaagctgatggagatggaatcgtcacatcccagcttcacacttagttacttccatgtgttgtgttgtcaacctattcctggcccccatgttggtggaagtgctgcagcaaaggatgtgaacaagtggcttgatgagattattggaggctatgattcctctatcagggagttccatggaggagatgatcagaagttgcttatttcactgcttaaaatattgtgccgacactatggaagctccgttcaccttttgggtctgatccatcgcaggaggaatattgaatttctttcgaattcttggttacagggtatagctggtccagagatggcagtgacaaaacttttctcatcttgtaagagcagtggtgctcataagggagagtatggagccattgtccattgcatgaaaaacattccgtcagaaaaccagattcaggctactgctaaggaggttcaaaatcccctagtttctggtagaaggaaagaggctcttcagtga

SEQ ID NO: 47131 - DNA, 435 bp, Oryza sativa
  Clone ID: PAT_MRT4530_4992C.1
gggaaaaggggggggtttttgggtcacaccaaaaaataaaaaaggggggggttgcaattaaggtgaaacattgaaacaaattaaaaaaaaaacacaggattccgaaaataaatttttggttgggagatggatccgttcttttagttaggtagaaaacgaaatttttttttgtttccacaccttaacaaattaaaaccaacaataaattaatacccctggtacttattattaacacattaataggccgagatggggtggccaaaaaaaaaaagtttgagtttgggcgccatccatggggaggcaggggaatgggggttaaactaaatggaaaaggtgtacccggggggagggtttttgcccaaggtgaggaggaattggaccgcaaggggcaggtaaattttgatgttgaggaacttgaacctgatgggggggaaa

SEQ ID NO: 47132 - DNA, 303 bp, Oryza sativa
  Clone ID: PAT_MRT4530_49930C.1
atggtcggcgtgagcttagcgctgactggatccggccaccccgccgccactcctctcgcgtggtcgctgcttgccgccactgctcgatgtcgggggaaagggaggcaccgctgccactccgctgcactgctcgatgccaccgccgtcattcgtcgcgccgctcaacgccgcgcgccgtccgccgccgcgacctgcgaccaccctgtgcgccactcgctgtgtggagggagagagagaggcaacgacgagtggaaggagagttgcggagtcggtggcgggcgcgacggaggcggcgacaggtag

SEQ ID NO: 47133 - DNA, 2951 bp, Oryza sativa
  Clone ID: PAT_MRT4530_49931C.1
gttgaggcgaggagaggagagcgaaggagcagaggcgaagcacgagtccaatccaaacccgaaaaattcgcgtggcggccaagccatcgacgcgagcgaaacgcacgagcgcgtcgcctacgcctccgccgcgcctcgccatggcggcggccgtctccacggcgccgcgcgcgccgctccccgccggcgccgtgtcgtcctcctgctgctcgtcgtcgtcctcctccgcgtcgatgtcgcggaggtgggatccgagcccgaaccctagcagcggcagcggcagcaggttgttcctcgcggcgcggcgcggggagcggctgcgcgtgcgccggcttgcgggcgccgcgcccgcaccggcaccacgccgccgcgtttcgtccgtggtgcggtgcggcggcggtggaggcggcgtgcggagccccgacgacgcggacgccggcagcggcgagcggcggaggggctgggacgcgctgttccacgacgcgttccagggcgccgtgcggcggtggagcgagtacgtcggcagccactggcccttggcgcctgccgggaaggatgctgggctcgggaagagggttgagagtcgtcgcgaagagcaggttaggggcgaggtggaggaggaagaggggaagtggagctgggagaggtggaagcagcacttcgcgctaatcgaagagagcgagcgcctcgtcgatgagctgcagctacaactacggactgctgtttatagagaggacttcaggagtgctcacaaactgaagttggctattgcggctacatcaaaaaacgatactgtgggcagagcaatttctgacttaaatagtgcaatagaagaggagcgctacatggatgcaacttatattagagatcatgctggcgcaggattgttgggatggtggtctgggatttctggaaatttgtctgatccatatggtcttataattcgtataagtgctgaacatggtcgatatgtggcgaaaagttacgataccaggcagctgaattcagatggccctggtttccccatatttgaaatttactttgctgaggccaatggagggtacaatctgcaggcagtgcatctgaaaccagatgacagtgattctcagcagttgtcaaatacgttgagagagaaactaggcatggatagtataaacatatctagcagttcatttggagctaaacatgaggatcacaatgaaggtgtaaacatggatgatcaaaatagtgatgatagtgatatttctgctggtccagctggtttcaaaaacttgccaagcgattcaactccagttcccagggttaaaatactaaaagtggtgcccatggaaaatgttaatcaggactatataatcaaaatttttgatcagatgtcggatgaagatgatgaaaatgataatcctgaggatgaaattgaatcatcagaggacattggtgatggagataacgttgaagaagcagaagcagcttctgcagaagataatgttgatgaatctggcgatgaaagtgatattgaagccttaatatcaattgattttatcacagaggacgacaaggattttatgtctccatcatccacaaaagcctttgaacgaatgccagctagattagaaagaagagaccgtttttcattttcgttctatactgaacaatatagtaaaaggcaagatgtggaaaaagttcaggggatttccaaagaaaaagttggactccgaactgctcagcaggatgatgatgatctccaatttgaccgtgtaaagttagtaggcagcaacagaaaattatcggtactacaacttggcatcaagcaacacaataataaggttcagcaaaaattgtacggagttactcacttcagccgtattcagatacctgtctcctcagatcctcttactggtttatacatgacggcatcaggttttgactcagaaattcttagcttacaacgaaaatttggtcaatggcgagaggatgattcatctgaagagcacagggacctacagttctatgagtatgttgaggctgtaaagttgaccggtgacaaccttgtgccagcgggtcaggttgtcttccgtgcaaaggttggcaaacattatcagcttccacataagggaatcatccctagagaacttggagtggttgctaggtacaaaggggaaaggagaattgcagatccaggtttccaaaaccctcgttgggttgatggcgagcttttgatactagatggaaagttcatcagagatggtcctgtgatagctttcttttactggacatcaaactttcatctttttgaattctttaggcggttgaagcttcctgattagtttcagagatcagttgaaggccattccacaatcttgcatgtcgatgtacataacagaatgtacataatcgtcttcgttaaaaaatacagttgggaagaatttgcgcaacatcacagttccttttttttggagaagaatcccagtggaatgaggacttgagcggcggcatctccaatctcactggaagatgccacttttaaggaaagaactcgcacaaaggaagatatgaagagtgaactcgttgttccatttcctttcagctcaccaacccggtttggagttggaggccaggtccacagatagtttagtaagaaagaaaagtaggttgaaagctcccaaatgaaaagctagaattattccagggtttcaactgttgctttttcgagccatatcacacaggaaccattgtacgtgaaatataagtaggaacagttttggccagtgtgatcaaataattcaaccggtggtaataacgggcacttcgtgttttgtaaatcccaccagtagcaggggggataactgctgtgtgtatatatataactcagcatgaattttgttgaactttggccttgtttagtttcccagataaaaaacttttcacccatccaaaaaaaaaaaaaaaaaaaa

SEQ ID NO: 47134 - DNA, 157 bp, Oryza sativa
  Clone ID: PAT_MRT4530_49932C.1
tcctggtttcctatttacacgttcccgccgcctagcctatagtgatcaagtgacgacagcaaggcagcaagggcgggacgcgagtgcgccggccggtgacggcacggtgtcacagtgtgcagggacacatcaagaaagaaaggcaagtggccaaggg

SEQ ID NO: 47135 - DNA, 339 bp, Oryza sativa
  Clone ID: PAT_MRT4530_49933C.1
atggcgagaggtcggcaacgccctagtcgtaaggagcaaaggttggagaggatgctggcgatgggtgcttgtctccacaatcttcggctagagggtgcgacaaaggtggaggatgggacatggacgacaggtctgacgcacaagcaaggaaactggcggagaggaggtatcgacgacggtcatcaaatgaagttgaggcggtgtggtggtggaggtgaggcagtggctgtgttggatggtgcgttggagtcttgtcagcaatcgtggccttgcggtgtggtggaaacatcccctgaccagagattggaggggtggcagggcccagatctacgaggctag

SEQ ID NO: 47136 - DNA, 1586 bp, Oryza sativa
  Clone ID: PAT_MRT4530_49934C.1
atctcctggaggtccttcgtcatttcggatttgggagttggatctctaatctgttttccacctcctcgtcccaagtgctcctaaatggttccctagggatgagaattaatcatgctaggggactcactcagggagatcccctgtccccaatgctgtttattttagctatggagccttttcaccggatcattaaagcagcgaagagtgccaatgtgttaagcctcgattggagtgagaaatggcagatttagatgttctctctatgcggatgttgtcgcagtttttgctctcccaaatcccgatgacctgaatgctctttctcgcatcctttcgtgttttgcacaaatttctagtttacattctaacatcaacaaaactgagattttccccatgagttgcaatggaatcgacatgcaacagcttcttgcctgctggccagggcagatcaagaatttcccttgccgctacctaggcctcccgctccacttcaggaaattaaggaaaattgatttccttcctcttatagacaagattggggccagactaccagcttggaaaggtcgcttctttacctctgcaggtcatcaaaccctagttaactcggttctgagtgctatgccgatgcatcatcttacaatccttcatgcgccaaaatgggtcttcaaaagaatcgaccgtttcagaagatcttttctgtggaagggcgaagaccctaatcattcaaattggaaagaagttgataaaccctgggtaggcatgaatgtgccttgcgatgagatggacacaagactctttcaagcggcaacgacaataacgattggtgacagagcaaaaactagcttctggcatgataattggatccaacaccgttgtttaaaagatattgtgcccagttgttttagcctggcaaagagaaagcaaagaacagttcagatggaaatgcgagataatagatggctcacttccttccttcagacaattcacttccgtggaacaaattcatgatttggtacagcttggtggcttactccaattggtctcgctttcccaggatcctgatgacatcacctggaattggaccgagtctggcgtctacacaacaaagagtgcttaccttttccagttcgaaggctcatttgccaccaatgagtttgattctctatggaaatccccaactgaaccaaaaataaaattctttggttggctagttctccatcaaaaaactttgactacccaaaatctgctccgcttggatatgttgcctttgtggttgtgcctttgaagatacaaatcatttgttcagtgactgtgtatttgtcagacaagtgtggaccctaatttgtcaattccaaaacttgtcttcggtcggaataaatcctgtcctggatgtgtcaacatggtggtctggaaccaaatttgcaggctctaagaaggttgtgcagctggtcaggggaactcttctaactacttggtggaatatttggttggaaagaaatagaagaattttccaaaactcttcctgttcagatattgaagtagcttattttatcaagaaagctattgatatgcgctgcttggcctttaaa

SEQ ID NO: 47137 - DNA, 543 bp, Oryza sativa
  Clone ID: PAT_MRT4530_49935C.1
tataccatggagaacatctgaatctgccacttctcacgcgattgagagtgcttaccttttccagttcgaaggctcatttgccaccaatgagtttgattctctatggaaatccccgactgaaccaaaaataaaattctttggttggctagttctccatcaaaaaacttgactgcccaaaatctgctccacaggcattggccttgcaattggatatgttgcgtttgtggttgtgcctttgaagatacaaatcatttgttcagtgattgtgtgtttgtcagacaagtgtagaccctaatttgtcaattccaaaacttgacttcggtcggaataaatcctgtcctggatgtgtcaacatggtggtctggaaccaaatttgcaggctctaagaaggatgtgcagttggtcagggaaactcttctaactacttgctggaatatttggttagaaagaaatagaagaattttccaaaactcttcctgttcagagattgaagtagcttattttatcaagcaagctattgatatgcgctgcttggcctttaaa

SEQ ID NO: 47138 - DNA, 278 bp, Oryza sativa
  Clone ID: PAT_MRT4530_49936C.1
atagggccacaaagtgagtccataacctaccatggttccgccctattccgtcctcttaccgtaccatagctataacccataaagtggcatctctagcccaccctatttgcccacagggttgaaagttttccgttaaaaagggccataactaagttaataacgcatattaaagttggcgccaaaaaccccccccccgtttcctgggccccataacccctaggcttaaccagttgttcccaattgggatttaacaacctatacccccattaagttcctaa

SEQ ID NO: 47139 - DNA, 4011 bp, Oryza sativa
  Clone ID: PAT_MRT4530_49937C.1
atggccgagcaagcaaaggcgcacgacctctctccgagtgtgagcggcgacgacggggagccgaatccacgccgtcgagctcgtactcccccacctcctccgcgccaaagccctaagcagggggaggcgcttgagaaggtcgacaagtccatggcatcaccagccgcaggtgatgcaggagaacggcgagatggggagcgtcgcctcctcgtctacggcgacggcagcacgcctcagggcgcgcttcaggctactggcgcgctcttacgacacccgcctgtcgtccatgacccggagtctccagcccaacgatggctggaagatgtggccaacttggtcatgacggctcagcagcgcctgggtgctggtggacggtccgccaccaccaagacctccggcgccgccaccaccggttccgtgtcatcaaggcggagggcgcggcgagcggcggcggctgcacgtcgttcggctgccactccctcgtcgacacctccgactcgggaggatcagcatggagagccggatgcccgcctcgacatcgagcgccggcgtaatagccggcgtactccccgcgcaacggagggcgcctcttcgtccagagtgtcacctcgacagggacgtgaggaccagccctccgtgcccccggctggtggtgtcggctgtagagcctttgtggcgagtcttcggaatgtccgttggcccccaaggttccggcccaccatcaccgagaagtatgatgggagtgtcaaccccaccgagtttctccaggtctatacgaccgggattgaggccgctgggggtgacgacagggtcatggcgaatttctttcccatggccctgaaggggcaagcacggggttggctaatgaacctgccacccgcgtcggtccactcctgggaagatctgtgccaacagttcaccatgaacttccaaggcacatatccgcgcccaggcgaagaagcggacttgcatgcagtacagcgaggcgatgatgagtcgcttcgctcgtacattcagcggttttgccaagtccgcaatactataccatgcatccctgcacacgcggtgatctacgcgttcagggggggcgtgcggcacaaccgcatgctcgaaaagatcgcttccaaagagccccagactactgcggagctttttcagctcgcggaccgagtggctcgcaaggaggaggcctggacctggaacccctccggttccggagtggcagcttcggccgcccccggatccgccgctcagacagggcggtgtgacaggaggaggaagaagagattaaatcagcctataacaagaagggggcctgaaggcctcggaagaagaaagaaaaagctattcaagattggcgggggcctgggggctcactccgacgcgcccgggtcaccagccttgtcgtcgctgtcatccgcaccatcgtcaccgcattcctcgtcggagtcgagggcgaacgcgaaccgaggggccgtaccctcgaagctgtggacgatgtggtcggcggcgtcccggtcctgcgcgcgtgcgccgtcctcggttccggaagggaactcttccagcgctgcccacggggagaagtcagggtccgagaggcccccaagccgaacggcggcccaaggcccccgacggccggagttggccctccgcctgcttgtcctacggtgtcaggcgcccccgaccctcaggatagcctcggggccactgcgggaaggccgcgcctgtcgccctcttaccccgagggtatcggcgcagaagccgagggcgccccgcgctgcctctcggatgaagagcgccctggagatgcggcccctagcgaagaggatcggccccgccgaaagtctggtcaagcgtgtcacgctgcatgcaacgcagtacagcacgctcttttatccggtctgtgaccggtcacagaccggcaaggcgttacacgaagaagggcaaacatgcacgttgttaaaccgacgcgtggtggacaagaatgaccggtctgacactggtcgcatcagcaacgggcagccacgatcccacgttgcacctgtctccgccgggagtggaggcagggcccgtctgccagagcatcttcgcaagggtttcgactctctcgtcctcctggtttcctggcagctatggaagaagtggaataccaagccttttgtcctcctcgcagcaattttatcctttatgcatctcaacacttctcaacttgcagaactgaactcagcctttatttgccttatccctaaaaaagatgatgctacagacgctgatcacttccgtcccattagcctcatgcatagcttcgccaagattatcaccaaaattctggcaaatagacttgctcctcaactaaatgaaatgatctcacaaaatcaaagtgcttttgttcgtaaaagggcgattcatgacaattttctgtacgtccaaaacatggtgcagatgcttcatagatcaaaaaaacagagtctattcattaagatagacatagcaaaggcgttcgacactgtgaattggccatatctcctggaggtccttcgtcatttcggctttgggcatcgttggttaagttggatctctaatctgttttccacctcctcgtcccaagtgctcctaaatggttccccagggatgagaattaatcatgctaggggactccgtcagggagatcccctgtccccgatgctgtttattttagctatggagccttttcaccggatcattaaagcagcggagagtgccaatgtgttagccccgattggcgtgagaagtggcagattcagatgttctctctacgcggatgatgtcgcagtttttgctctcccaaatcccgatgacctgaatgctctttctcgcatcctttcgtgttttgcacaaatttctggtttacattctaacatcaacaaaactgagattttccccatcagttgcaatggaatcgacatgcaacagcttcttgccggctggccagggcagatcaagaatttcccttgccgctacctaggcctcccgctccacttcaggaaattaaggaaaattgatttccttcctcttatagacaagatcggggccagactaccagcttggaaaggtcgcttctttacctctgcaggtcatcaaaccctagttaactcggttctgagtgctatgccgatgcatcatcttacagtccttcatgcgccaaaatgggtcttcaaaagaatcgaccgtttcagaagatcttttctgtggaagggcgaagaccctgatcattcaaatccaagtgatagtctagtcaattggcaaactgtttgcaaaccgaaaagcttaggagggttaggcctaccggatctggacaggttctctagagcactccgactccgctggctctggttcaagtggaaagaagttgataaaccctgggtaggcatgaatgtgccttgcgatgagatggacacaagactctttcaagcggcaacgataataacgattggtgacgaagcaaaaactagcttctggcatgataattggatccaaaaccattgtttaaaagatattgtgcccagttgttttagcctggcaaagagaaagcaaagaacagttcagatggaaatgcgagataatagatggctcacttccttcagacaattctcttccgtggaacaaattcatgatttggtacagcttggtggattactccaattggtttcgctttcccaggatcctgacgacatcacctggaattggaccgagtctggcgtctacacaacaaagagtgcttaccttttccagtttgaatgctcatttgccaccaatgagtttgattctctttggaaatccccgactgaaccaaaaataaaattctttggcattggccttgcaattggatatgttgcctttgtggttgtgcctttgaagatacaaatcatttgttcagttactccaaaagctccatgccattgcgattatgagttccatatagaaggggacttgcaacttgattctcaaatcttcaagtgcctcttggactga

SEQ ID NO: 47140 - DNA, 540 bp, Oryza sativa
  Clone ID: PAT_MRT4530_49938C.1
ttttttttttttttttttttttttttttttttttttttttttttttttttttttttccaatttttttttcccacccgggccgggacccggggggggaccccagggtcgaaccgggaaattcgggccgggacattgaggggataccaaattttcctaaaaggggggggattaaaagttgggggaaataagggcaaaaaaggtttctgggggaaaaagttttcccctcaaaaaaccccaaaaaaaaaaaggcggaaacataaaggggaaaagcgggggggcccaaagagggaggtgactcacattaattgggggggggtcaatgggcaatttttaagggggaaaactttaagggcaactggaataaataaatggccaacccccggggagaggggggctggggattgggccccccggggggttttttttttaccaaggggaaggggcaaaaatgattggccttcaacgacttgccctagaagaaaacactaagggggccaacctgggttgtcccccgaggggaaaaatctttttgaggggggg

SEQ ID NO: 47141 - DNA, 540 bp, Oryza sativa
  Clone ID: PAT_MRT4530_49939C.1
atggccggcaagatggacgagctctggatagggcgtatggagtggtgcgtgctggaatgtaacaagaacgccatcaacttctacgagggaatgggcgagccacgcagaggggagcggtgggcggacgacggcaggcgacggacgaggaaggaggcggcgggtggccaggcgaggagggaggcggcgcggcggccggaagaggaaggaggcgacacgcggcggccgggcaaggaggggcggtgcgcggcggctgggcatcgcgggcggagcggccgacggcgtggagctgccgcgctcgctagaaaagggatggcaggctccggttcctggtgcggagcccgcaatcgtgctcatcttcaacgcctccgctcgtctgccgtcagcgtcctctccgtcttcgccttcgatgtcgagggcgtagatgtccgccttcgacgccaccgcgtgccgtccctcctcgcccggccgccgcgcgccgcctccctcctcgcccggctgccacgagctgcccctcctcggggcggagctagcacaaaatga

SEQ ID NO: 47142 - DNA, 102 bp, Oryza sativa
  Clone ID: PAT_MRT4530_4993C.1
atgctaaaggtgccgtttcctctacgagtgtggaaacccagtagggtatcgcaccgggcgtcaatatccaacagcaacgccaacagcgtgcagaggctacgg

SEQ ID NO: 47143 - DNA, 361 bp, Oryza sativa
  Clone ID: PAT_MRT4530_49940C.1
ctgccgaaaaatttctgtcccccccctcttctaggctacaccttggatttcaggtgcagcttctgtacataagattataagtattatggatggcaatgcaggaaacaatcaaatttttaggctgaagaagatactccgaagactgcttttagatgttctggagcaattggcttatacgagtgggttgttatgactttttgggttaagactgctggtgctacatatcaaagatctatgaattatatattcatgatctcatcggcttgttgggtgaatctatatagatgatgtgattgtgacgtctaaaagtgttgatggacacttagctgatttatgaagggtgttagataggacaaggaat

SEQ ID NO: 47144 - DNA, 337 bp, Oryza sativa
  unsure (1)..(337): unsure at all n locations
  Clone ID: PAT_MRT4530_49941C.1
aatncctaagccggccggaaaatttttttccacttaaccaccaaaaaattggttttaaaaaccggggggggacattcttataacccatggcttttcccaaagttacttgtttggacagaaaaccaaccaaagacgggttgcccttttatttccccaaaagaaaaattacttttttgacaaaaacaattggagtactgttaaccccagactgttgacaacccctttttctttttggtctttttgggggggaaaaccttttgtccaataccatttgggtgagggagaacacctaaagggctggtgcgctttgcagaaacttttctcccttttttttttg

SEQ ID NO: 47145 - DNA, 291 bp, Oryza sativa
  Clone ID: PAT_MRT4530_49942C.1
gtctaattcttgggtggggttttaaacaatttaatttccacaaaaaagaaaaaggttctttcttaaaactttaaaacctaacacttaacaaacttttctttctcaaaataccaaaacaaatcttttaataaacaaacatttaattggttacccaaaacaaaattaaactgtattacaacctgttcctcctaaaattaacattaacattctttaaacaataacaaaagcaccactacttgaatttcactaaaccatctttatatctgttacctagttaacgaacttaattag

SEQ ID NO: 47146 - DNA, 555 bp, Oryza sativa
  Clone ID: PAT_MRT4530_49944C.1
gcgcccacgcgtccgatttattttgcatcttgtctacactagcagacttattttgtggctatgaatggatgaatatgctgcgttatgtaaaaaaaaaaaaacaaaaaaaaaaaaaaaaaaaacaaaaaaaaaaaaaaaaaaaaaaaaaaaaaaaaaaaaaaaaaaataggggcgggccctaatagagaaaaaaactaaccggccggtgccttgaaacataaagttttttaaatgggaccccaaaaaaaaaaaaattcgccccgcgttaaaaacaacaaaactggagcagcaaggataacccccaataaaaaccaattggaacaaaaccccctttcccaaagggggtgtaaaaaaaaaaggccccgccccatgccccttccaaaaaaaagcccaacctaaatggaaaatggaaaccccccctaatcggcccaaaaaaccgggggggcgggggggttacccccacataaaccagttaattttccagccccctaacccccggttcatttgttttttccccttactatcccgcccatttcggcggtttcccccctaaaa

SEQ ID NO: 47147 - DNA, 480 bp, Oryza sativa
  Clone ID: PAT_MRT4530_49945C.1
atggcacggcgagaagtcgacgactcctacaccaacggttccgtggtcgaggtcgtgtccatagaggaaggcagcaagatggacaaggaggatgaccaccaaaacccgcaggcgcctgacggcggcgacgtcgtggtttgtggcatgcccatgtcgttcaccttcctccagatgctgctcgccgagttcttggccacgttcttcctgatgttcgcggggctgggcgccatcacggtggaggagaagaagggcgcggtgacgttcccgggggtggccgtggcgtggggcgcggcggtcatggcgatggtgtacgccgtcggccacgtctccggcgcgcacctcaacccggccgtcaccctcggcttcaccgtcgccggccgcttcccgtggaggcgcgcgcccgcgtacgctctggcgcagcaagttcgtaactatttttcaatacagctatgcacgtatttctataatggccagttttaa

SEQ ID NO: 47148 - DNA, 465 bp, Oryza sativa
  Clone ID: PAT_MRT4530_49946C.1
agaggtacaagggaaccatgcttactagtgctcatgctggcttcgtgtgaaacaaagcgcagctaacttgctaaagcgccccccgtgcgtgcaccatatacatagatcgaccgatcgaagcagacaaccggacaacgccaacgccgtgcgcggcgtgcacgcacgcacgcacgcactcacatggatcctatcacacgaccacaacacactctgcatgtcacatagtcacagccggccttggacaacccgaacgtacacgtccacaacgatacacacacgaacagacacgatcgaacccgcggaggctaatgatctcgcgacgactctgcaacagacggcgcgcgcggaacacgcacgcacggcggagctatagcttagtcttggctcatcatgccgtggatggcgtggaagtatagctcgccgtcatcggcagggttgtaggcgctcataatggcctagcactcg

SEQ ID NO: 47149 - DNA, 1252 bp, Oryza sativa
  Clone ID: PAT_MRT4530_49947C.1
cgaatgatttttatttcgggatgaatttatcaggacgtgacaatgtgatccttgggatgaattggctggcccaattccaaggagtagtggattgcgcgagacgcactgtcactctgtaccgagggccggaacaaccggttgttttctttgcacccccaacctctgtcagaagttcagaactgcatcagatagggctgtcagaaatccccatagtcagagagttcggagacgtgtttccggaagaactacccggtatgccgcccaagcgagagattgagttccggatagatcttgctccaggaaccactcctctgcacaagcgaccctaccgtatggcagcaaatgaactggccgaagtaaagaaacagttggaagagttgaaagaaaaagggtatatacgtccgagtacttccccatggggtgctcctgtgatttttgtggagaagaaagacaaaacgaagaggatgtgcgttgactacagagctctcaatgaagtcaccatcaaaaacaagtaccctcttccccggatcgatgatctgttcgatcagcttaaaggtgccactgtattctccaagattgatcttcgttccggatatcaccaattacgtatccgtgaggaagatattccgaagaccgcattcaccacgcgatacgggctgtatgaattcacggtgatgtcattcggtctaaccaatgcacctgccttcttcatgaacttaatgaacaaggtgttcatggaatacttggataagtttgttgtggttttcattgatgacattctgatatactcacaatcagaggaagaccatcagcaccatcttcgtctggtgttgggaaaagtgcgggaacatcaattgtatgccaaacttagcaagtgtgaattcttggtgttcgaagtcaaattcttatgacacgtgatatctgcttaaggaagtgccgtggacccccgaacagtgacccgcggcacttgattgaaagaacccaagacagtcactccaggtcggaagttcttatgttttgcaagatacttaccggagttaatcgagaactttttcaaaaattgttctaaccaggaaacaattggttgaagaaagaagagaatattgtgtggaaccccgcatgccaggaagcctttccaactcttaaagaaaagctgggttccttgccgggtttaattttccgggtactttcaagagatctattgggttttttgtaaaccttcccgccacaggattgtggtgcgggcccatgc

SEQ ID NO: 47150 - DNA, 677 bp, Oryza sativa
  Clone ID: PAT_MRT4530_49948C.1
atctggagtacttcagccattccttgcatcttaggtggctctgatatgactggacggcagaagggaaaccttggcagggctccatcctaccatgcgatgaaacagacaaacaactcttcagggtttcaatgatcattactttaggcaatgggggtaaggcaaaattctggcacgacagatggcttgatggccaattccccaaagagataactctttccctttataagctggtgacgaggaaaaacaaaacagtggcccaagaactaaaaaatcataggtggttaaggccattacggaggatgagctcgacaaccgaagttcgagaattcattctcctatggcatttgatacaacaggtacaaattgatgaggagagggaagacgacctaacatagaaatggattgcaaatggaatctactcagtcaattggatctacagaatccaattcactggaagcatacaggacaatagatctaacttcatttggcgagcaaaaacagaaaacaaatgcaaattctttggatggctcatggttcaaaagaaaatcttgacgtctgacaagctacaacttctaggttgggacaacagcccgacatgctccctctgtgggacaaaatcagaaacaacggtacatctcttcatggactgccccttcgcgaaacaggtatggacaaaa

SEQ ID NO: 47151 - DNA, 639 bp, Oryza sativa
  Clone ID: PAT_MRT4530_49949C.1
atgtcatcgacgggaaggaaaaggaggagggaaaggggaaaggccccccactccagcctgctgcggcagctgctcaagttcaacaagctcacctcctctttcgcggagctcattgtcgggccctgccgccccgctaccgccatcgagcttgcgcccgccctgctcacgctgagctcaccgacgcctccccctgcacgcacggtcgcgttcggcgacccctccccccggggcgcggctggcgacacttccccttgcgcgcgcctcgaccgcttccgcatgaatgacgcgccgccgcccaacgaacggcgccgccccccctcgtcgcccccctccagtgcggcttgcaaggccgcgccacccccgctcatcaccatcgttctcgtcttgggcagcggcggaagaggaagtagagggagaaatcatatgtcgccgttggcggcggccgcctctccctctcctcccccctgggcctccgtctgcggctcctctccttctgccagccggcgcccgagcacgcgcgccgctcctctcctcaccggccaccacccgcgcacgcgtgctgcttctctcctcccgccggccggtgcccaagaacgcacgctgaccgtcgccggaaacctcgtccaccacgcaaggtga

SEQ ID NO: 47152 - DNA, 386 bp, Oryza sativa
  Clone ID: PAT_MRT4530_4994C.1
gacgcgggggcgggggtggaaccggcaaaccgggaccggcaggcgcacgaggaccacctataccgagagggagtagaactagacctaggcatggtcataagaatacccggtgccaaagtgaaatcggtttacaatcccaaacaacaaaaaaacacaaaccggaaacataaaaaccaaagccgcctaagcagaaagataaatcaaactaacagtaatggggttacggccactgaccgagttggaaaacggaaaccgccagtgccattaagaaaaaggaaaacgccaacccacagggagaagggagatgggtatccagggccagggtggtttttaccatcaagacggaaaacagcaaaaagcgattgaccgccagcccctgaaaaaga

SEQ ID NO: 47153 - DNA, 231 bp, Oryza sativa
  Clone ID: PAT_MRT4530_49950C.1
atgaacgtcagctcggagattgccaaggcgatgagctcggcgtccttcgtgcggtgggtcagggcgtccgccacgacgttcgtgcgacccgtggtcggggcggacgaggaacgcccgttcccagaggtatgcgcgccaatggcggatggcttggacaaggctgatcaactcctgctcgtaggcggcgagcccggcatggcgtggtgctactgcccggctgaagaaggctag

SEQ ID NO: 47154 - DNA, 720 bp, Oryza sativa
  Clone ID: PAT_MRT4530_49951C.1
atgtggtaccaacatggaaaaactcatcagaatgtggtgatgggagaaagagcacgagtagtgcgatgtgctgtggataggtactttttgttggacgggagcaaatctcaccacattatatgtttagaaggtgttatatataatgcattgactagcagtgaccaatcatccaaggaatcaagaaaaatggcactatggaccatggagaaaatggttggtgtggccatgtgtgggtgggttggcggcggacacaaggcaaataagtgtagtgaacacattttaagtcgattgctagaatttggaggggaggattggagggcccacaagtcagtggaaactggcttaaaatgggaccgaaccatcctaaccgtcataagggccccaccaatcaggctcttggccaaaggtcataaattaccctcgtttgttgggtgctccacggaaagtgagggtacatggtacgcaattatctcatgttgggcctttatgccggatagtaaggggtgggtgttggcgactgttattgacaaattttatgccaccaatacctgcatcaatcaaagaaataaaacatccaacatagtgatagggttaattctgacatattccatgagtgttggtgtatatttgtatgcagagtgggctaggaactacactcaaaaagactccaagggccttcattcgcagaaatggatagaggagacagagaaggagcaatag

SEQ ID NO: 47155 - DNA, 572 bp, Oryza sativa
  Clone ID: PAT_MRT4530_49952C.1
gcagtgaattcatgttacttttgaattattttaatttttactctgcctgtattatcaaacatatgggtgccgccggagtcgctgccgccagatcgagcaccggccgagcaccaccgccacccattggatctgggagaggggagggggttagaggaagccgctggaaccttcgaggcccggccgtcgtcgtcgtgtggcagccgctgctggatccaccgcgaccgccactcttcgccgccgcccgcacccctccccgccatgggacccaccacgccgctccccgccgccagatccacctctccaccacaaccgcccctctccttcaccgcccaccgcctcctgcgactccccgggccgccagatccgccgcccatggcccgagtcgccgcagctcacgttgtcgccgcaccacgagcttcgtcgctgcacctcgttgccggatcagcttccgtgccgccgtcgccgttaccactgcaggcaccctttcaccgcctctgagaagactagagaggagaggagagggagacggccgtgtatgggaggagaggagagggaggcgactgggagaggag

SEQ ID NO: 47156 - DNA, 375 bp, Oryza sativa
  Clone ID: PAT_MRT4530_49953C.1
atggttctgcaggacagtgctgtcatacagggtgtcagggacgtccttgataatagcatgacatgtgagcagagacctgaaggaagcaaaggaggaagacaggcaagttccaggcagagggaacttcaagtgcaaatcccacggaagggagtgtgctctgtgtctttgaggggcttccaggcaatgggagtggtgcaaggtgaggtcagtgaagtcggcgaggcccaggtcttagaggacttcatccatgtgaagttcatagaagttcactttggctaccatgtggagaatagcctgggaggggccacagcagcagcggggagccctgtggggagaggaggtggtggcctggggcacatggcagtgctgggggtg

SEQ ID NO: 47157 - DNA, 439 bp, Oryza sativa
  Clone ID: PAT_MRT4530_49954C.1
ggaaagccaccttctatgacttgccagtattggcgacgctaataaccatttcggggggttcatatacaacttggtgcgaaacgcaagtcaaaccagatggctgcatacagcaatggagagtatactgcgtgctattgtaggtgggcctacttattttggatagcactctactacattagctaaataaaagtgtaacattgcattctgagtgaagctgctgggactaataactgccgcaagccaagagatcactctcatttaacggtccttccatgaggaagcttgagcacatcggcacttgcatagcatagcttcctttggatggaaacacccacaaaagctgctatcgtgtaagccagtggaatgaaagggctaccaccagattcttactttacttttgaggagaccatgcaaactggcccttataaatgactgaccc

SEQ ID NO: 47158 - DNA, 381 bp, Oryza sativa
  Clone ID: PAT_MRT4530_49955C.1
atgaccgatgagctaaatgtatgcaatgcagatttttcaccaaagatcataaccaaactagcccccaagggatggcagtcgggtacgacgggcacgggtagtgactacccatatccatgcccgcgaggtaattcatgcccgcgggtatacccgttactatatgacgagcaaggaacactacccatgcccgttgcccacaggcgccatgtgcccacgggcatgcccgtttacccgtcacaaactcacagttcaacatttcaaccacaaatctccacaagcagagagacattatcacaatttaaagaaagggtacagttgtaccaagttcaacaatacaagcattacaagttcatcaatactagatggtggcatttatactaa

SEQ ID NO: 47159 - DNA, 556 bp, Oryza sativa
  Clone ID: PAT_MRT4530_49956C.1
gtgagaccatgactactgaccagaggaaataggatattcaccacttcaaacatccaactcaactttgattctggtgaatgaggaaagacgtgaaagagcttgctcaactcttgcaagatctacagtatatcaaggtatccactatcatcgaccaactaggctgccgaccagttgttgcagtcgtcgtgcagttacaaccggtggtaccactgtatttcagagagagcctatgacatattcgactaactttatccaaacacatagaacaactccaaatcctacactataattgactttgtatatgcattccatatacaaattctaacaccatgactgccttggtagtacatagttaagaacacacacacacacacacacacacacacacacacacacacacacacacacacacacacacacacacacacacacacacacacacacacacacacacacacacacacacacatatatatatatatatatatatatatatatatatatatacccacccccacacacacacacagacacaaaatcaactacggttcacatc

SEQ ID NO: 47160 - DNA, 345 bp, Oryza sativa
  Clone ID: PAT_MRT4530_49957C.1
atgcgtcgcgaggggcggatgcacgggtgggtgtacgcccacaagctcgtcgacccgatggatcccgacggcgccggcggcaaggccaagcggcgcgtggtgcacgatatcacgaagcagatggccaacggagggttcgtccgggtgtcgaggaagcccactaaccactccaagtacaccgggagggacccgtacgaggcctacaccaagaggaagacgtgcaaagggaggaacaagttcaagcatgacgagatcaagatgtactacctcgacgtcgaggggctcgatgacgatgacgaatatgaggagccgtatactattgtagctgttggtagttccccttga

SEQ ID NO: 47161 - DNA, 354 bp, Oryza sativa
  Clone ID: PAT_MRT4530_49958C.1
ggggcaaaagcaacttaaactttgttactggcccactaggttcagaaccttgattggataaccttcaaatgatagtaggggactagcaatacaggggcgccctgaattatccaaagcttagcatgaatgcatgatcatggtttcacagctaaaaaaccgttgaaaaaacgtatgctagcccttgggggtataaatgggactagtatactttggtggtggtttttgggattgaattccaccaaaacaggaaagggcaatacacaacccctaatgggtactgggacaaaatccactgacaggtttttttcccaattgagatcccacctgattttgagcccttccaaactgggtttt

SEQ ID NO: 47162 - DNA, 1913 bp, Oryza sativa
  Clone ID: PAT_MRT4530_49959C.1
aggtgtatgttgacaaatcacaactatctcatcaggaccagataccaccatttcctactcgtatcgcaatcaggactattgagtctcaactgggttctcgaatttctgatctatttgctgatatcagcccagagccagttgctgcagcatcgctggggcaagtatataaagctcatctacactctggagagcttgtcgcagtcaaagttcagaggcctggaatgactcccttgctgactctagatgcacttttgttccatatgatcggaggacagttgaaacggtttgcaaaggctcgcaaagatttactggtagcagtcaatgagattggaaggaatgctgaaagatttgcgagactttattctcatgatttaggtgggaatagctccggagatgggacaagtatcaaagtcccaaaggtctactggaattttacacgtaaatctatattaactctagaatggattgatgggatcaagctcactgatgctgagcgcattggcaaagccaatctgaacaggaaaaggatgatcgatgagggtctctattgttcattgaggcagcttcttgaagaaggctttttccatgcagacccccatccaggtaatctggttgcaactgaaggtggatcactcgcgtattttgattttggtatgatgggggatattccaaggcactatcgtgtagggcttatacaaatgcttgtgcactatgttaaccgtgactccttgggcttggcaaatgacttccattcacttgggtttgtccctgagggaacagacctacatggggttgctgatgcattacgtgtttcctttggtgatggaaggaggcaatcaaatgattttcagggggtgatgagccatctgtatgatgtcatgtatgagtttaatttctctcttcctccggattacgcactggtgataagagcactgggttctttagaagggactgcaaaagcattggatcctgacttcaaagttattgaaagtgcatacccatttgtcattgggaggctacttgaagaccccagccctgatatgaggaaaatattgaggcagctcttgatatgcgatgatggatccatcagatggaatcgactggagcggctgattgcagctatatccgaacagtcagaatcttcaaataagtctgaagatagatctggtgaaaatgctgccaacaaacctgggtggagatcattcgacatgcattctgtggttgcagctacagaagacctttttcatttcattttatcaaggaaaggctggagggttcgtgtttttcttgttcaggacattgtaaaagcttcagatgcattcctacaagaagcaacatttccaggtatattcgatgaagaggggactacaggggagctacatccagagagaagtaaaatgataagaagggtggtacatggtgttcaatcattccgtcaagctatcagtttggccccagatgcctggactgctatgctattccgtaccttgttgaaacctgaatcccagaaatttattcttgatgtctttctagccttggcaatgcattcctgttacaagattccagaaacaagctggatttgtatgtcgagattcctgaattacttggacaggcaggaggccaatatgctcatttttgtgagagctgctaccgatcttctaatgccactgcccactagtttcatttctgttcgagtcaggacagccggggaggttgtcaaccaaaatctccgacttctcgtcctcgtctgccttcagccgcagcttcatgcatcgaaaaccattgattccgcagaagtaatcacagatctgccacacgacaaatctcacaagagcgatatgggcgaacctagaacaaaacttgctagggatcctattatatacttcctccgttacaattcccaaattgtatag

SEQ ID NO: 47163 - DNA, 942 bp, Oryza sativa
  Clone ID: PAT_MRT4530_4995C.1
atggccggatccggccctccctcgcctggatctacgcggcggcggtgcgaggaggcctggggcggcgcgacggcatgcggccgtggtggcggccggcggccggctgcggctaggccggctcggcactggcgcggaggcggcggacagctgtggctcggcgtggaggcgtctcgtcagcgacgggcgcgggcggcggatggccgcggctcgtcgtggccggtggggtcgcggaggcggcgggcgcgcggaggcggcgggcagctaagcctgcccgaagcggcaacggcgcccccgctcactcgctcggcctggccgcccggcgccagcccatggcgcggtgggtcgtccaggcctcggtggcggctcggtgtggtggccgggcagccgggattccgtcgcggtggccaggtgaggctcggcggccggacttcgggggcgccggcgggtggcgccggtccggagcagcagcaccaccggcggccagatggcagtgcaaagggagctggcggcgatgggccgtcttcctcgttgccggtcggcaccctcggccttcgtggagctcctccccttctttgcggggagtttctaggttggattgaggcggcagctcgtcagtgggggaagctcaggctgccgaagcaatgccacctagtcccgggttctccttcggccaaatctggcgaggcggccggcgggtggtggaacggaggagtcctgggccagctttcaggggtggtgggccccaggcgaaagcctagtccggtggttcaccgggccggcagcggctacgtcttcgggcgtcgtaatctccttggagcgttgtcgagggttaccctctccctttcttggcgagcttctctgggcctagcggcgttcggccacgctcaacgggggtcgtttggtgctaggtttcaccctcagcggtttgtgcttgggtggtag

SEQ ID NO: 47164 - DNA, 232 bp, Oryza sativa
  unsure (1)..(232): unsure at all n locations
  Clone ID: PAT_MRT4530_49960C.1
ctagaagaagatgaagaccgacatgactacttccccccttctgttcctgcttctggggggcctcaccgccggcgccctctgcacgtcctacgactacgccaccgccaacaccatactcctgccgaccgactgaggatcagcccagcnggcgtgtaagacagacgaccccgcccggtgctgcgacaacatctagcggttgccgacgaagaccaacccgccgcattggcgctgc

SEQ ID NO: 47165 - DNA, 2573 bp, Oryza sativa
  Clone ID: PAT_MRT4530_49961C.1
ctaaaaccccacctcccgtctccccggggcggcggagccgatgagatcccggccatggcgggccccacctcgcgccgcctcctcctcctcgtcgcccgccgcgctggtcacctctgccgccaccaccaccaccaccaccaccgcgacggactcgtcctggcccgctcgctccaggccgctgccgctgccgccgcctagtcgccaccaccgcttcccgcctcgcccccggccaggagttctattcgcatgttggaccattcttttctagtgcattctcaagtgttcatggggagagaccgtcctcagaatatgcaaagatcagaaaggagtcgttagaaagccagtttggaaggatcttgggttcaagctcacgtacactatttgcagatcgtggctttggtccattccttgcaatgtacagggcagcaattatctcttttcatgttatgaagctcactatttggcatttattgctcagtgatgtgcacaaacgggctgagaagttccaggagaccttgatccggttggggcctttttacatcaagcttggacaagcattgagcacacgccctgatatattgccgaatgcatattgtcaagagctctctaagctacaggtgtatgttgacaaatcacaactatctcatcaggaccagataccaccatttcctactcgtatcgcaatcaggactattgagtctcaactgggttctcgaatttctgatctatttgctgatatcagcccagagccagttgctgcagcatcgctggggcaagtatataaagctcatctacactctggagagcttgtcgcagtcaaagttcagaggcctggaatgactcccttgctgactctagatgcacttttgttccatatgatcggaggacagttgaaacggtttgcaaaggctcgcaaagatttactggtagcagtcaatgagattgtcaggcacatgtttgatgagattgattatgttttagagggaaggaatgctgaaagatttgcgagactttattctcatgatttaggtgggaatagctccggagatgggacaagtatcaaagtcccaaaggtctactggaattttacacgtaaatctatattaactctagaatggattgatgggatcaagctcactgatgctgagcgcattggcaaagccaatctgaacaggaaaaggatgatcgatgagggtctctattgttcattgaggcagcttcttgaagaaggctttttccatgcagacccccatccagtgcagtctggtgcatttctgcacagttttgcatcttcaaattttgaattgaaaattcgaaatgactggagattcaaacaccacctcaggctaccttgggtcacgcttgtgcactatgttaaccgtgactccttgggcttggcaaatgacttccattcacttgggtttgtccctgagggaacagacctacatggggttgctgatgcattacgtgtttcctttggtgatggaaggaggcaatcaaatgattttcagggggtgatgagccatctgtatgatgtcatgtatgagtttaatttctctcttcctccggattacgcactggtgataagagcactgggttctttagaagggactgcaaaagcattggatcctgacttcaaagttattgaaagtgcatacccatttgtcattgggaggctacttgaagaccccagccctgatatgaggaaaatattgaggcagctcttgatatgcgatgatggatccatcagatggaatcgactggagcggctgattgcagctatatccgaacagtcagaatcttcaaataagtctgaagatagatctggtgaaaatgctgccaacaaacctgggtggagatcattcgacatgcattctgtggttgcagctacagaagacctttttcatttcattttatcaaggaaaggctggagggttcgtgtttttcttgttcaggacattgtaaaagcttcagatgcattcctacaagaagcaacatttccaggtatattcgatgaagaggggactacaggggagctacatccagagagaagtaaaatgataagaagggtggtacatggtgttcaatcattccgtcaagctatcagtttggccccagatgcctggactgctatgctattccgtaccttgttgaaacctgaatcccagaaatttattcttgatgtctttctagccttggcaatgcattcctgttacaagattccagaaacaagctggatttgtatgtcgagattcctgaattacttggacaggcaggaggccaatatgctcatttttgtgagagctgctaccgatcttctaatgccactgcccactagtttcatttctgttcgagtcaggacagccggggaggttgtcaaccaaaatctccgacttctcgtcctcgtctgccttcagccgcagcttcatgcatcgaaaaccattgattccgcagaagtaatcacagatctgccacacgacaaatctcacaagagcgatatgggcgaacctagaacaaaacttgctagggatcctattatatacttcctccgttacaattcccaaattgtatag

SEQ ID NO: 47166 - DNA, 111 bp, Oryza sativa
  Clone ID: PAT_MRT4530_49962C.1
cgcaacgccacaggggaggggagccgatcacggcgaacacggtggcctggtagcgtggctgggctgatgagcgcacgtgttcctggctcgtttcctcatttcggcgactaa

SEQ ID NO: 47167 - DNA, 1026 bp, Oryza sativa
  Clone ID: PAT_MRT4530_49963C.1
agaaaaatagaattggattccccagagaaggagattgaagcgtctgacttttgcatgcgggcagtatatgttcaatctcatacagaatctaagttcgcattgtacaatttgcagctacatccaaatgaacaattcgactttgtatgccaattatgagccacaacaaatcggatctccaaaactgtaacagtataatttcacttagtaaacactaatgtatatatacatttagtagaaaaaagaaactaagattaccatagttcacagatgctgcataccattatccaaaaaaaacaggtgatacatgcagcttactgtgacctacacaaatggcagtattaactagtactataacctacagcagcggccagaagtgaaggaaccctagccatggagccaacacgctgggcttcttggcagagttggcctcgtcttccccggacaagccgccggtgtcttcgcccgacgagacggcagccacggcggcggcggcggccttggggcagaggaagaagctcctgctgccgagctccatgagcttctcctccgggttcaaactctgcaagctgaactgggagaagtggagtccgaaggcggcggggtcggcggacggcagcagcggccggcgcccctcccggatgtagagctccacggcggcggcgaccaggtcggccacgctccactccgcgcgcgccatcacgtgcagcggccacatgctctgccgcaccgccacggtcagcagcaccctgctcggcctcgccggcgcccgcccctcgccgccgcctcgccggaagctctgccccctgaggccggcaagcaggtcgggctgcgtccgcggccgctgcttcagcagcgagtgtcgctgctccgcctcgccgcgcccgtggaacgacgccgaccgctgccgcggcttagccaccgccgccgctgcatgccgctgcctgtccttgtgctccatcgtcgatcaatcaaaccagaagcaaacagcgaggaaggaagcagaggagtgagctccggccctcgtgc

SEQ ID NO: 47168 - DNA, 342 bp, Oryza sativa
  Clone ID: PAT_MRT4530_49964C.1
catgggcggacgcgtgggcgagcagacgccgcctgaagcatccgcaggcgattgggtgattggcgagagctccgagcggtggcgaaagattcagcgggggggagggggagtcaagaacggctgcgcggtgcgcgcgtacgtgtgcttttcctgatccactaattctcaggccatagctgcagacaggcagacatcctctgatcctctccatccagagaggcaaaacggggcctcttatcattatggagcctccatgagacgagcgcaatgaggaagctgcgaaaaacagctcggcgacatgcaggaagaatgaagaacatcaaggccaagggaggtatctag

SEQ ID NO: 47169 - DNA, 3003 bp, Oryza sativa
  Clone ID: PAT_MRT4530_49965C.1
cgaagcagaaagtctaacaggcaatatggtctattttctcatgttcctcctgctgctctcgattcctctatgcaaaaccgatgaccagctgacactgggaaagccaatctttcccagcgagatgctcatctccaagggcggcatctttgccctcggcttcttctccccggccaacttcagcaatagcctctatgttggagtctggttccacaacatcccccagcgcaccgttgtgtgggttgccaaccgcgacaacccaatcaccaccccttcgtcagcgacccttgccatcaccaacagctcaggcatggtgctgtcggactcccaaggccacattctttggacaaccaagatcagcgtcaccggagcctccgccgtgctgctcgacacggggaacttcgttctccggttgccaaacggcaccgacatatggcaaagcttcgatcacccgactgataccatcctcgcaggcatgatgttcttgatgagctacaagtccgagatcgtcggacgcctcactgcgtggaggagccatgatgacccatccactggagatttctccttcagcctcgaccccagctcggacctccagggcatgacctggaacgggaccaagccatactgccgtaacggcgtcagaaccagcgtgacggtgtccggcgcccagtatccgagtaacagcagcttattcatgtatcaaacactcatcgactcagggaacaagctctactactcatacactgtctccgacagctccatctacacacgcctcacgcttgacagcacgggcacgatgatgttcctgagctgggacaacagctcgtcgtcatggatgttgatcttccagcgccccgccgccggcagctgcgaggtctatggctcgtgcggcccgtttggctactgcgacttcacgggggccgtcccggcgtgccggtgcctcgatgggttcgagcctgtagatcccagcatctcgcaatcaggatgccggagaaaggaagagctgagatgcggagagggcggtcaccgcttcgtgtcattgcctgacatgaaggtccccgacaagttcttgcagatccggaacaggagcttcgaccagtgcgcggccgagtgcagcagcaactgctcttgcaaggcatatgcttacgccaacttgagcagtggcggcaccatggctgacccgtcaagatgcttggtttggacaggggagcttgtcgactcagagaagaaggccagccttggtgagaacctgtacctccgccttgctgagcctcctgttggaaagaaaaacaggttactgaagattgttgttccgataacagtatgcatgctgctactcacatgcatagtccttacctggatatgcaagcacagagggaaacaaaacaaggaaatccaaaagagactgatgctagaatatccgggcacctccaatgaacttggaggtgaaaatgtgaaatttccatttattagctttggagatattgtggctgcaacagataatttctgtgagtccaatctacttggaaggggaggctttggcaaagtttacaagcgtttccctatttatattgatgacaacatgaagggaatattggagggaggcacggaagttgctgtcaaaaggcttaatgagggttctggacaaggcattgaagagtttaggaatgaagtggttctaattgcaaaactgcagcacaggaacctagttagacttcttggttgctgcattcatgaagatgagaagttactgatctatgaatacttgcctaacaaaagcttggacgccttcctttttgatgctacaagaaaatatgtgcttgattggccaacaaggttcaaaataatcaaagggatagcaaaagggcttctttatcttcaccaagattcaagactgacaataattcatagagatctcaaagcaagcaacatcttgttggacacagaaatgaaccccaaaatatcagactttggtattgcaaggatttttcatggtaatcagcagcaagcaaacaccactcgagttgttggaacatatggttacatgtctcctgaatatgtgttgggtggtgccttttcggtcaagtcagatacatacagctttggtgttcttcttttggagattgtcagtggcctgaaaatcagttcatctaaactcacaccaaactttttcagccttacagcctatgcatggagattatggaaagatggaaatgcaacagaattgttggacaagttttttgttgacagttatccacttcatgaagctttcaggtgtattcacgttgggctcttgtgtgttcaagatcatccgaatgatagaccatcgatgtcatctgttgtttttatgttagaaaatgaaagcacgctgcttcctgcaccaaagcagcctgtgtattttgaaatgaagaaccacggaacacaagaagcgacagaagaaagtgtgtactctgtgaatacaatgagtaccacaacactggagggacgctagactaagaggtcaagctttactatacgtgatttcagcatagataattctatgtttttacaatttaatgcttatgataatgaatttcagtgatgtgatatatgactttaaatctttaatggaaaacagtggagtttgctgcgtggtgaagaatgcttgtgaatattaatcttattgattggtatttatatataaaaaatgttacattgcagacaaggtattgcttacaaatttgcaaacactgtatttctattccacatgtggttgcttttatctgaagttaatcataaacctaaaagaatgtgacatgtttacaaatacacaaattataatggcatttttaaaaaccaattaaaccatttgttttagccaaaaggtcataagccggcttttaatagaagataataaccaaagactatggttggtattgaaatagatatccaaattagcaatgcctggccatgatttccattccatagaggccggatttctatccatttacctctaaaaaaaaaaaa

SEQ ID NO: 47170 - DNA, 453 bp, Oryza sativa
  Clone ID: PAT_MRT4530_49966C.1
aaagtctgatattttggggttcatttctgtgtccaacaagatgttgcttgctttgagatctctatgaattattgtcagtcttgcatcttggtgaatataaagaagcccttttgctatccctttgattattttgaaccttgctggccaatcaagcacatattttcttgtagcatctttcaacaagatcagtatgtacaaaatctaatgttagtcatcataaatatattttagtcaatgtaagaacctttttgcaatgggatagaaagtcataacacaccaaaaaggaaggcgtccaagcttttgttaggcaagtattcatagatcagtaacttctcatcttcatgaatgcagcaaccaagaagtctaactaggttcctgtgctgcagttttgcaattagaaccacttcattcctaaactcttcaatgccttgtccagaaccctcattaagcctt

SEQ ID NO: 47171 - DNA, 109 bp, Oryza sativa
  Clone ID: PAT_MRT4530_49967C.1
tcgcggatttctttcgccgccctcgtggtagaggcctgaagtcccagggggagagataggctagcacgccagccatggtaatcacttgatctgcccaggtcaagcatgg

SEQ ID NO: 47172 - DNA, 565 bp, Oryza sativa
  Clone ID: PAT_MRT4530_49968C.1
gttattgatgcaaaaaacttcaggctgcaaattgatgagcacaataagtcatcatcattccctgaagcatttcatcaaattgcatttgcggatgttgtgatattgaacaaaattgacctagtagaaggcagtcttgaggatttggaaaggcagattcatgaagtcaacgctcttgttacagtggtgcagtctgtccgctgccaggttgacttaaataaaatatttgatcagcaagcatatggtgccaagaattcatcgcagctgcaagaacttctggagtacagtaaatcagtaccacctaatctccgtcatgataacagtatttctaccttgtgtatttgtgagcaggatccaatttccctgtctaaggtggaatcatggctcgaggatcttctttgggaaaggaagttggacatggatatttatcgttgtaaagggattttacatgtccataactcggatcaagttcatacattacaggtcgcaacttggatatcaatatccttcaagattcatttagtcgttgcaagcactgatatcgaagggtttgttcatcctgtaccct

SEQ ID NO: 47173 - DNA, 375 bp, Oryza sativa
  Clone ID: PAT_MRT4530_49969C.1
atggacctcctcccctccaagctcctccgcacccctctccactcctcccctcggcatgccaaagagcccaccggcactagcaccgctatcatccatgacactccggatgagacccttgttggccattgcgtcgccgcccccgatgaggttgtggccatcatccttgagctcgtcttgctaatgaactcccttcgatatgagcatgatgatgaaggagtcatcgacattgggaagccggcaacaatccattcatccaatgccacctccaaggagctggagcaagagctggtgttcacggataagctcaaggatgttgtagcatatctcaagaccctaaaggagcgatatctgctcgccattttggtggccggatag

SEQ ID NO: 47174 - DNA, 1050 bp, Oryza sativa
  Clone ID: PAT_MRT4530_4996C.1
atggccggatccggccctccctcgcctggatctgcgtggcggcggcgcgaggaggcctggggcggcgcgacggcatgcgcggcgggcgcgggcagcggatggccgcggctcgtcgtggccggctgggtcgcagaggcggtggccgcgcggaggcggcgggcagctaagcctgcccagagcggcagcggtgcccctgctcactcgctcgccctggccacccagcgccagcccatggcgcggtgggtcgtccaggcctcggtggtggctcggcgtggtggccgggcagccgggatgccgtcgcggtggctaggtgaggcgcagcggccggacttcaggggcgccggcgggtggcgccgctcatcaatgggggaagctcaggctgccgaagcaatgccacctagtcccgggttctccttcggccaaatctggcgaggcggccggcgggtggtggaacggaggagtcctaggccagctttcaggggtggtggttcgttgaagtcgaccgacggaggggcgtcggtgcggtgtggtggatgccacgtgctgccatttgtctgtgtggtggttctgagttggtggatggcgatctgcagtcaaggttgtagggacccaggcgaaagcctagtccggtggttcaccgggccgtcagcggctacgtcttcgggcgtcgtaatctccttggagcgttgtcgagggttaccctctccctttcttggcgagcttctctgggtgaaaaccacatctttttttatgggcgatggcggcatcttggatgtcgtgaccaccatggtggcatcgttttcggagcctcgtctctgtggtgttgctgtaggcctagcggcgttcggccacgctcagcgggggtcgtttggtgctaggtttcaccctcagcgggtgatgtttgcaaagatgccaccttctggtattggaccatgttcaggattgaaggccaagggtgtcaagattactaagattacccaatgcagatgggatcggaccaacaagcatggggaggttgaagctcttgttaccagggatagatccatctag

SEQ ID NO: 47175 - DNA, 721 bp, Oryza sativa
  Clone ID: PAT_MRT4530_49970C.1
tcaagcttgcatgcctgcaggtcgactctagaggatccccgcccaatatcccttccttgtggtgcacttgggcctctatggtcgttgggcctagtggcccttcgactcttgtctttggcttgcttcgttggttgacgaacccctttcagcaatccccttcgttccttggtgccgaggtagcaattgaagaccttggaggtggcattggatgaatggattgttgccggcttcccaatgtcgatgactccttcatcatcatgctcatatcgaagggagttcattagcaagacgagctcaaggatgatggccacaacctgcgacgacaacctcatcgggggcggcgacgcaatggccaacaagggtctcatcctgcttttgcacccctgtccctcacccttcttcatcgaccgcatccccaaaaagttgccgatggtgccaggaaaaatgagtcgccgccgctgcttggatgggttgccgctagtgtgccgatcttgatggtgagtattgcactctcgaggagcagctccgctgcctattgtttgctcaacctcctcaccggcctgtcatggatgatagcggtgctagtgccggtgggctctttggcatgccgaggggaggagtggagaggggtgcggaggagcttggaggggaggaggtccatgacccgtccggtggtcccgatggctcggcggcaagaattacagcttcaacgacatcctaa

SEQ ID NO: 47176 - DNA, 720 bp, Oryza sativa
  Clone ID: PAT_MRT4530_49971C.1
atggcacctacactgccggccttctccaccgccgccaccaccacctcgcccggcctccacgccgtgccaaccttcgcgccggcctccacgacgtcaccgccacgaggagaggaagccgagaggggggggaggtcccctgggagagaggccgccaccttgccggggccggattgttatcaaggggggaggtcccctaggagagaggccgccacctcgccggggccggattgttatcaaggggggaggtcccctgggagaaaggccgccacctcgccgcggcggccgccaccccacgccatgctagaggagaagaagggaagggaggcgaggtcccccgggagagaggatgctggcgagatccaggcctactccaccaccactgccgtcgccgccacctcgccgcgccagccttcgcgctatcgccaccgcgaggagaggcagccgagaggggtgagcctcctccagctgtcagccgccacgccggccaaccttctccaccaccgcaccgtctcttcgcccgcgtcggtcggccttctccactgtcgagccaccctggaggaggagagaacgggggagggcccccaggccgagagaggaccgccgcgccattcttctccgtcggccgccgccactactctgtcaccgtcgctgcgcaatgggagaggaggggcgagcgagcgagagagagggagggaggtcagaggtggatggatggattaa

SEQ ID NO: 47177 - DNA, 508 bp, Oryza sativa
  Clone ID: PAT_MRT4530_49972C.1
atccttcgcacaattccaacattataagtgaatcataccagaacaatcctacaaaaatgaagatcattttcagatgtgctctccttggtattgtggtatagcaacgcttctcgaaggattgatgccctctacttgagctatagatcatatcagctacgatcatatctcctgatacagtgaccagtgctcaccccatgctgtgagtgcgaaaggcagcacgcctaccataacggcaacccccttctgccaaacaactacggtttctaccgctaaacaaccaagtcatgccttatccgtgttgccaacagctcagggtgggagccctactatctcactaccacgccattagtagcggtctcgccattgtgccccaactacaggtgcaacaggacgctgctggctactttgatccgactcaagcttcaagccccagctttgctggccctaaactcgccatccatatgtgggatctatcccaactactagattgctcccacgcggattccca

SEQ ID NO: 47178 - DNA, 835 bp, Oryza sativa
  Clone ID: PAT_MRT4530_49973C.1
tcctgtatagcgtacagcgttcgccctattttttttttttggctttttgatttaaaacagcgtcttttttttcttggaaaatagacagcatttgtcacacatgcagaagagaggaaaaaagaacacttccaaaagatcgaggttttttttttttttttttcaagaaagctgatatgcagcctatggttgcacttctcttgttgtgtagttttacaagtgtgtgatccaaaaatatagttctactttgcaataataaaaaaaaataaaagaaccaatgctacctcatcatacatatgaagaaaataaatcaagaaaggttaaggttacaaaagaacgccctacttatagaactgtgtacatgaaacacgctcgtgttatacatggaatcaccctcgaatgttcttgcagcccataggtgaaacctacagatgatgggagttatctattcacatcgatgtctaatgaagtgttccataggtgggtgattcctgagtaccttcatccaggaactaccgaagctcatcatgaaacccataatcatcttctgtgaataaagcactgtagaatacatatgggttctcaatcatctcttggcaaactcagttgcccatctttgtttgtgtcagcctgtgttatcacatagtcagcttgttgcttggcatagaagtgttctggtgggtgggagatttccaatagtaggttttagctcaatctggcgtgacaaaaagccccatcatttatccaggtccaggttggggtaaatgattttcttgcgggtggcatcaaaagcattggagtcatctgttgaagcctcctcatcaaaaatgccgaatga

SEQ ID NO: 47179 - DNA, 567 bp, Oryza sativa
  Clone ID: PAT_MRT4530_49974C.1
gccgcttttacattattgtcttgagctctgttttggcaattggcaatttggcatgtatattggtcttgtgcttggatttttgaagtatgggcttgggctctgtttccgtatgggatacattgggggtgaaggtgccgttcgtgttctacaatatttgtatattttgtctaagaagagtttagaaactgacatgagtacatgactaagaacttttcacaattcgtgcccttccctaatccccaataaatgagtgacgcctgttggtaatgaaactgtcatctcgtccatacatcagtggcaagtatctaacctacctaggatgatgtcaacgaatgcatacatggtgtatgaagttgtaggcatttaatactacatgaatgcacaaagtaaacatcattacaatcattgatcaatttacatacttattgatgtttcacttatatctgtcctgatattatgatagttatctttctgttttcctacttctgaaagcaaacctatttgaaacggatgaatgggtgattcctgtgttgccttccagagttttttgcttcaacttaaccattg

SEQ ID NO: 47180 - DNA, 314 bp, Oryza sativa
  Clone ID: PAT_MRT4530_49975C.1
cggacgcgtgggtcttcgctggcttgcaaatcgcactcgacgaagaagaagaggaagacgcagaggcggatggatggcggcggcggcctctcgaggcccaccgcacaggcccgcctccgccgcgctggggacgtggctctcattccccccgccccccgccacggcgacctccaccggcgcctacctccccggcgtcgtggacgccccccaaacacccaccgggtcctttgaccccttgggcagcacctaccattgtcatctcctgctggtctcggagcccggcttgagtcctcactttgctatgacaacccatc

SEQ ID NO: 47181 - DNA, 180 bp, Oryza sativa
  Clone ID: PAT_MRT4530_49976C.1
atggcggacggtgtaggagcggcggcggtgatgtgccgcaactcctacactttttcttccttccttttcggtttcctcgacgtcgacagcagcctcatccccgtggaggcgcactacccatgctatgccatcgcctacgacgtcatcgacttcaccgaccattttttctcgtcgtcctga

SEQ ID NO: 47182 - DNA, 606 bp, Oryza sativa
  Clone ID: PAT_MRT4530_49977C.1
atgaggaggggctcccggcggcggaaggcggcgatcgggcggcggatggggaagagcgggacgcggcgaagccggcgatgcagccgatgcgtcgcagcggcagccggggtgaaggcgaacggcgaccggaggcggaaaaaggcggccggtagggtggtatggcggggaggtggttctggtggtggaggggaaaaagggatcggtggccgggcttgcccgcgcggcggcaaagccggctgcggtggtggcagggcgcgggagcggctcaggcggcgacgacatgcggctggaggcggtttagggtggtggcgactcgggtgcatggtggaaggggagtttcggcggaggctcggggaggagaaatcgtggccggacatggcggatttgaagcggcaacggccggcgacgtgggcgacatcgtgggcgaagtggggctcgatttggcaccaaaaattggtgaaaagtgggggatttggtggaggaggtagaggggaaccgattttatgcggtttgggcgcgagggcgcgagcgggaggagccggaatcggcggcgacgtgggtggcaatggcggcaatggcggtttcggctctggaggccgaaggtag

SEQ ID NO: 47183 - DNA, 5361 bp, Oryza sativa
  Clone ID: PAT_MRT4530_49978C.1
atgggttccatctccggcatcgacgacctcgtcttcccacccgggcagacgtttcggttcggcagcctcgacttcgtcaccagcaacttcggcaagatctctctccttgactcggagtcggaccagtcgggagagaaccagatttcggccccgtttggactcccaaacgcggctgaaagttacttcaagaccatctcgaccgagtcggcttcaaaccactcgggcgagatcgcaccttcaccaacgtcaccagatcaagatgatggggcttacccaccgatcctgatgaagctccccgacgatttgacggccgtctccatcacgacagcgtctctttcccgtaggcctaggcggaactctcccaccgtcgactcgcgccccaccgacatcgtggagtacgacgagtttagctctcgctaccacgacccggatctcgacgacttcgacggaagcctagatgacaactacacccctctctactttggcgtcttcatggccaataacgagacggaggagcaacgccaagcccgggagaccgaagcgcgtcgcgagactgagcgccgccgactggaagaggagcatcaagcacaagaacaagaacggttacggcatgagcagcaggagcgtgagcggaccgcgaaggaggctgaggatcgacggcagcgagctttggaagcagggcgccgggcgcgtgatctcatcggccagcaagatgttgaagggacgccgacgaagactatgattgcggcttcggtcccagttaactccgaaagcgtccatacgccgactggcagccgagtcccccacttccgatctcatgactaccgtcatccaagcctcagcatcaccggcgcaggatccaatcgcaggagcaggggccacgacgagcggtctgttcactcacctcccgatcaccatagggagcgccgagtggaacggcctcgctcaccacctcgtcgccgccccgtcgatcttcgcgacacaatcatacagcgccgagcagctcgaggctatcatcactcgccggaccgccacgacgacgaccttgacggagtagcagccttcaccgacgacctgcgtcgagtggattggccagccggcttcaagccgactggaatagagaagtatgatggtaccactaacccagaatcgtggcttaccgtctacggtctcgcaatccgcgcagcaggaggagacagcaaggccatggcgaactatttaccagtggctttagcggattccgcccgatcttggctccatggattgccccgtggtacaatcggatcttgggccgagttacgtgaccacttcatcgccaactttcaaggcaccttcgagcgtcccggcacacaatacgacctctacaacgtcattcagaagtccggagaatcccttcgagattacatccggcgattttctgaacagcgtaacaagatctccgacatcaccgacgacgtcatcatcgccgcattcaccaaagggattcgccacgaagaattggttggcaaattcgggcgtaagcctcccaggacagtcaagctcatgtttgaaaaagccaacgagtacgccaaagctgaagacgccgtcaccgcgtcaaagcagtcgggtcccagttggaagccaaaaaaggatacgccggcttcgggaggaggtggaagtaacaatcataaggaccgcaagcgtaagcctgcggaacttgttgcaaccgccagtcactcttctcgacagcattcgcgcgtcaacacgtttgacaagatcatgaactcccaatgcccgcaccatcctaactccaaccacgtggccaaagattgtttcgtctacaagcagttcgcggatcaatacaccaagactacacggaagaactccgatgaagaacaaagcacgtcgaggaagaaggacgacggcgacaccccggcaggttttcaagaccaccgcaaggagctcaaccatatcttcggcggccccctggcttatgagtctaaacggaagcaaaagttgaccgaacgggagatcaatgccgttcagcccgacacgccccaatatcttcgatggtcagagattgcaatcaagtttgaccgctcggatcatcctgaccgagtggtccacccggggcggtaccccctggtactagacccagtggtccgtaatgtcaagcttcgcagaaccctcatcgacggtggcagtgcactcaatatccttttcgccaagaccttggatgatatgcagattcctcgctccgagttaaaaccaagcaatgcgccttttcacggcgtaattccaggattatccgcaactccactcggccagatcaccctcccggtcacttttggcactcgggaaaactttcgcacagagaatatcagctttgaagtcgccgatttcgagacagcataccatgccatactcggacgcccggcattagccaagttcatggccgtcccgcactacacttacatgatgatgaagatgcctggtccccgaggagtcctatccctacggagtgacatcaagcaagctgtcacatgcgacaaggagagttgcgacatggcccaaacccgcgagatggcgtctgcccgagaggatatccgactggctgcagccacggcgagcgaaggagaaatacctgctaccaagacttctaaaagtggagaaagcgaagctaagactaagaagattcccctagatccctctgatcctgctaaaactgctgtaataggcgccgaagaggtgattgagcactcattacatgtcaaagaagacgccaagcctatcaaacaacgactccgccgattcgcacaagacaggaaggacgcgatcaaggaggaattaaccaagctgttagcagcaggcttcattaaagaagtccttcatcccgactggctagcaaacccagttctagttcggaagaaaacagggcaatggcgcatgtgtgttgattacactgacctcaacaaatcctgccctaaagatccttttgggttgcctcgcattgaccaggtagtcgactcgaccgccggctgtgagcttctcagttttttggattgctactcggggtatcatcagatccgactgaaggaatccgactgcttgaagacttcattcatcacgcccttcggggcatactgctacgtcaccatgccatttggactgaaaaacgcaggagcaacttatcaacgtatgatccagagatgcttctcaacgcagattggccgtaacgttgaagcttatgtggatgatgtagtcgtcaagaccaagcaaaaggatgatttgatctcggatctggaagaaaccttcgcgagcatccgtgctttcaggatgaaattaaaccctgaaaaaggcatccaagccaacccggagaaagttactgctatcctcaacatgaaaccgccaagtacccagaaagatgttcagaagctgactggatgcatggcggcgctcagccgatttgtttcaagacttggcgaacgggggatgcccttctttaagctactaaagaaaacagatgatttccagtggggacctgaagcacagaaggccttcgaagatttcaagaaactcctcaccgagccaccggtcctagcctcaccacacctgcaggagccgttgttgctgtatgtatcagccacctcccaggttgtgagcactgtcttggtcgttgagcgtgaggaagaaggccatgtccagaaagtccagcgaccgatttattttgtcagcgaggtcctagccgactccaaaacgaggtaccctcaggttcagaagctgttatatggtattttaatcactaccaggaagctatctcactactttcaaggtcacccggtaacggtggtcacatcatttccactcggtgatatactgcacaaccgcgaagcaaacggacggattgcaaagtgggctttggagttgatgtctttggacatatcattcaagccccgaatttcaatcaagtcccaagcgttagctgattttgtcgccgaatggaccgagtgccaagaggatacccccgcggagaagatggagcactggaccatgcattttgacgggtcaaaaagactttcgggcactggagcaggagtggttctaatttcaccaactggagaaagattaagctatgtactttggatacatttttcggcgtcccacaacgtcgccgagtatgaggccctccttcatgggctgcggattgcaatttccctagggataaagcgtctaatagttagaggcgattcacagctggtagtcaaccaggttatgaaagagtggtcctgccttgatgacaatatgatggcatatcgacaagaggtacgcaaattggaagacaagttcgatggactcgaactaagtcatgttcttcgacacaataatgaagccgccgacagacttgccaactttggatccaagcgcgaggtggcgccttccgatgttttcgtcgaacacctttatacgccgacggtacctcacaaagatactgctcaaattgcgggcactcatgacgtagctatgattgaagccgactggcgagagcccctcatacgatttttgacttctcaagaactccctcaagacaaagatgaagccgagcggatttcaaggcggagcaaactttatgttatgcatgaagctgagttatacaagaaaagcccttcaggagttctgcaacgttgcgtatctttagaggaagggagacaattgctgaaagacatacattctgggatatgcggaaaccatgctgctgcacgcaccattgtcggcaaagcttaccggcagggttttttttggcctactgcagtgtccgacgccgacaaaattgtgcgcacgtgcgaaggttgccaatttttcgccagacaaattcatttaccagctcaagagttgcaaactatcccgctgtcttggccgtttgcggtttgggggctcgacatggttggcccgtttaaaaaggcagtcggcggttacacgcatctctttgtggccattgataaattttccaagtggattgaagctaaaccggttgtcacaatcacagcagataatgctcgagacttcttcatcaacattgtgcatagatttggagtgcccaatcggatcatcactgataatggcacacaattcactggcggagtttttaaagacttttgtgaagactttggaattaagatttgctatgcctcggtggcacaccccatgagcaatggacaggtggagcgagccaatggcatgatacttcaagggattaaagcgcgtgtctttgaccggctaaaaccctatgccggcaaatgggtgcaacagctgccatcgaacgctacgaagaggaccgagtggatgacttgcaccgattggaagaagtccgtgaagcagctttga

SEQ ID NO: 47184 - DNA, 669 bp, Oryza sativa
  Clone ID: PAT_MRT4530_49979C.1
atggacctcgctgacgtcagcaaggggcggccggcgccgacaggtgggtcccaggcgtcagcggctcaagggggctcggtccaccatggaccggggagcggcggcgcgcagcgcgggaagcggcgagaggaaacggaggcagtgagggagagggaggtggcggagctcaccgaggggcacggcgacggcgagagcagccggcggagggaggcggcggcgctccacaggtcgacaaggaggaggggctcccggcggcggaaggcggcgaccgggcggcggatggggaagagcgggacgcggcgaagctggcgatgcagccgatgcgtcgcagcggcggccggggtgaaggtgaacggcgaccggaggcggaaaaaggcggccgggcgcgggagcggctcaggcggcgacgacatgcggctggaggcgcgcggcagtggctacggtgacggcggcgtgcagccggagctcgccggaaagcagcggagcgcgggctcgcgcggggaacacgggagagcggcaacggccggcgacgtgggcgacatcgtgggcgaagtggggctcgattcggcgccggttttggagggggaaagtgggggaggagagtggaggaggtggggcgacgcggtcccgcgggcacaaagaatattgccaaatattcccggccaatga

SEQ ID NO: 47185 - DNA, 829 bp, Oryza sativa
  Clone ID: PAT_MRT4530_4997C.1
cctctcggtccacggtggaccgggtgcacgcggctgacgccgaccggcgccgtgggtcccacgcgtcagccgcaccgagggcgcgggcggctgacggccgggccccacatggcagccgcggggcgcgcccgaaggcggcctcgccggcacggccgacgggaggcggcgcgcccgcgccccgatggtcaccgccggcgaccaccggcacggcggagcggcgcccgagagagcggagaagagagggaagcgaaaggggcggtccacggctcaccccgggacgacgaggatggcggaaacgacgaccggagtggaggaaagcggcggcgcggttcgggacggcgaggacgacggtgctccggcggtcggcgggtgaaacggaggcgcggacgaggtcgacgacgacgcggcgaagccgaagggagcgatgccgaagcgggagacggtccggagcgacgacggcggctgaccggagctcggcggcgacggcggagagaaggtgcgacggtgcgggcttgattccgacggggagagcgagcggcgagcggcggaaacggaggagagaggcacggggaacaattatatagcgccgggggagagagagaggggccggagggggaggaatcggccgcggaaatctcggccgccatcaaagacgccggcgaagattgcgggagcgattccaaacggatccgagggagagagagagagaaaagagggggaaaagagagagggaatcacggggagtgattccccccactttaatgcgcgcggggacggcgggaggcggcggaaacggaggcggcggcggcgctagggcatgggcgggcgg

SEQ ID NO: 47186 - DNA, 312 bp, Oryza sativa
  Clone ID: PAT_MRT4530_49980C.1
atgagatggaggatgaactggttagcctgtcttttttttttccccgttcttcttctggtggcgcgtctcgtgcgtcaggaccgggagaaatcgctacgcctacccggctatccggtcggttggagcagatggctagtgaagcccatcactcggtttagaaaaaatctcgttcatacaaaaattatttgtttgcctgttgtcacaaaacatagtaggtatatccatgctatgcagggtaccaaaaatcacatctcaggagctctcagccatctcagcgcctactgctacaccactttcttagagtctgtctag

SEQ ID NO: 47187 - DNA, 3174 bp, Oryza sativa
  Clone ID: PAT_MRT4530_49981C.1
gcagactagctgcaaagcgattagcattgcacattaaaatggatctggtcttttaagtgtgcacatgaatatataacataacagcatagacaaataaatttcaccatcatataactgattaacatagcctaccaaataagattgcaatttagcactggggaacaagatgcccttgacaatcttgcaaaacatcctctgtgatttccgccaacagatctggctcacaggacatgtcacagactttcattctctcgcactcggcaatgtctctgtgaagctcttcaagagcttcatcatcctccctaactaagttgttcaagccaagagcgaagtcatagtccttagaaggatcaaaatagatactgtcatcctcacataaacccacaaactcaatagccatcttctcagagataataagtcctttactgtcaatttcctgtttcccacaagacatttcctcgaagtctgtttcacgccctcggtatgttccaatagctggatgcacaatcttagttcctttgcactcacaatgaaagcacctaccagaatctgtaggcgactctagttcagcgcagcatgaaaatagtgtaccaatatcttcttcaccattgctgcactccaggaagaaaagactaggagcagtgttatcacgctgtgaaccctttggtcttgccagaaaattcacatgagcatatggaaatcctttgcgattccgaaagtaaccatatctgccattctcaggtacatcaaaatttgtaccgcagatgacatgaagttcatactcggttcccttttcttttgcatatctcttcaatgcagctttcacctttctgcagatgaaatattgattagccatgaaattttgctggctgcgtttgaccaactcgtcagctctgggaaccaattcaggaactgatggcacagatttggcagggtatgatttctgtgaaaaatatcttgaaatgagctccacctcattggaagtgagtgtgcggctaaccgctagcgatggcttgtcaatgggcaacagcattggatgggttgacacagcgaattcagcttgagcatcaggatgaggatgccatgccgcgtctgctgctgccttgtaagcatcctcatgagagcaggatatatcatgatcgcacattgctctaaaagtgacttgttcaaggttagcattggagtggaaaaggtacatcatggcatcgtgttcagataatgcagggaagaggttgtggaggaaagcaagaaggccgttgagggagcggcactcaatgcgcacgagactgttggtgcagatcatgtccagcttaagctcctcatgtggagggaatgtggtgtcgtaccagatggtgttgaggatgatgttggagacacggtcattagcaggaccaaagcaatggcctgccttgaggaggctatggtgatagcgtctgcgcaaatcatccctgggaagccgcgcgatcgctttgaggtacaacacatggattttctccaggagaagagttctcagagtatctgtgaattcatgggggaacttgttcaagctgctgattcctttgatgtagtgattcaagcgaagagccgcctgccggacaggtttcgggaagtcgggtggctccttgagaggttcctctgtggttggggaggagatcgggaacagcctgcctccaattccccgagtgtactcgatgaggtggagagccttggtcttccaacttcatcttcagctcagaagcactacacttctgaaaaaggggaataatagcaaggctgagtacaaccaccgtactcagcaggccacaccaacgatgcagacgtgcaaggggattcaagaatgggtttcacccccactcctcaaaaggcagtgggcggtcccctcttgcgccgcggtgaatctggcaactggacaaccggacaccccggccgacccaactccatcacgcccaccctcgccaccggtgcctaggaaagggtcgagctatacttcagatcaagcagttacccactcccgcttgtggcaagcgctcaaaaggccgccgctgacgtcatcaagtgaggtcggcgccgacaggcaggccccacacgtcagcgagacgaggtggcggtccaccgtggaccgggaccacaaggacggtccaccgccggtccacgggttggacggcccagatcggccaagccgatcgggcggctgaggagagcgatggccgggcacgggcacagtcggggctggcccgaccgaccacagagggcggcggcgcgcagtcactggcgacggcgggcggcgggcggcacagggagcaacggcgcgcagcgcgggaagcggcgagaggaaacggaggcagtgagggagagggaggtggcggagctcaccgaggggcacggcgacggcgagagcagccggcggagggaggcggcggcgctccacaggtcgacaatgaggaggggctcccggcagcggaaggcggcgaccgggcggcgggtggggaagagcgggacgcggcgaagccggcgatacgggcgatgcgtcgcggcagcagccggggtgaaggcgaacggcgaccggaggcggaaaaaggcggccggtagggtggcatggcggggaggtggttctggtggtggaggggaaaaagggatgggcggccgggcttgccctcgcggtggtggatctaacagaggcagtggcgcggcttgaggtggttgaggatggcggctagaggcggccggaggcggtaggcggtggtgcacgaggcggcggtgttccggaggcagagaggggaaatggagtagaggccgggctgcggcacggcgccgcgaagccgacggtggtggcggattggcgcggcggtgggtggagcagcggtggcgggcggccggagcttgccggaaagcggcggtgcgcgggagcggcgtggggagggagagagagagcgtggggcgccgacgtggggtggtggcggctcggccggcgccggttttgtgggacgagcgggggaaatggtggaggacgtggaggggatcgtgcccacgtcgttggatgcgagctcgggtgcgggagggcgccggattttgcggcgacgtgggcggcaatggcggttggggttggccggcgagaggtaggaggaggagctgacaggtggggctcacggtcccacctgtcggccggatggagag

SEQ ID NO: 47188 - DNA, 4512 bp, Oryza sativa
  Clone ID: PAT_MRT4530_49982C.1
atgggttccgtctccggcatcgacgacctcatcttcccacccgggcaggcgtttcggttcggcagcctcgacttcgtcaccaataacttcggcaagatctctctcctcgactcggaatcggaccagtcgggagagagccggatctcagtcccgtttggagttccaaacgcggctgaaatctactccaagtccatctcaatcgagtcggcttcaaaccactcgggcgagattgcatcttctccaacgtcatcagatcgagatgatggggcttacccaccgatcctaatgaagctccccgacgatttggcggccttcttcaccaccacagcgtccccatcccgtaggcctaggcggaaatcggcttcaacaccgatctcgcctagctccagggaagtcggcgtcatcctccagccactcggctcagtttcgacggaccagctggatggctactggagctctcccggcgtcgactcgcgtccgaccgagatcgtggagtacaatgagttcggctttcgcaacaacgacccggatctcgacgacttcgatgaaagcctagaagacaactacacccctctctatttcggcgtctttatggccgataacgagacggaggagcaacgccaagcccgggaaactgaagcacgacgcgaggccgagcgacgccgactggaggaggagcgtcaaatctccgacatcaccgacgatgttaccatcgccgcattcaccaaaggaattcgccacgaagaattggtcggcaagttcgggcgtaagcctcccaaaacagtcaaacttatgtttaaaaaagccaacgagtacgccaaggctgaagatgccgtcatcgcatcaaagcagtcgggctccagttggaagccaaaaaaggatacgccggctacgggagggggtggaagtaacaatcataaggaccgcaagcgtaagcctgaggaacttgttgcaaccgctactcactcttctcgacagcattcgcgcgtcaatacattcgacaagatcatgaactcccaatgcccgcatcatcctaactccaaccacgcggccaaagattgtttcgtctacaaacagttcgcggaacaatacaccaagactacacggaagaactccgacgaagaacaaagcacgtcaaagaagaaggacgatggcgaccccccggcaggttttcaaaaccaccgcaaggagcttaaccacatctttggcggccccttggcttatgaatctaaaagaaagcaaaagttgaccgaacgggagattaacgctgttcagcccgacacaccccaatatcttcgatggtcagagacagcaatcaagtttgaccgctcagatcatcccgaccgagtggtccacccggggcggtaccccctggtactagacccagtggtccgtaatgtcaagcttcgcagaaccctcatcgacggtggcagtgcactaaatatcctcttcgccaaaaccttggatgacatgcagattcctcgctccaagttaaaaccaagcaatgcgccttttcacggagtcattccagggttatcttcaactccactcggccagatcacccttccggtcacctttggcactcgggaaaacttccgcacggagaatatctgcttcgaagtcgccgatttcgagacagcgtaccacgccatactcggacgcccggcgttagccaagttcatggccgtcccgcactacacttacatgatgatgaagatgcctggtccccggggagtcctatctctacggagcgacatcaagcaagccgtcacatgcgacaaggaaaattgcgagatggcccagactcgcgagatggcgtctgcccgagaagatatccgactggctgcaaccacggcaagcgaaggagaagtgcccgcgaccaaggaaagcgcgctcgtcacctttcttcaaaataataaagatatctttgcgtggaaaccatctgatatgcctggtattcctagagaggtgattgagcactccttacatgtcaaagaagacgctaaacctattaaacaacgactccgccgcttcgcacaagacaggaaggacgcgatcaaggaggaattaaccaagctgttagcagcaggcttcatcaaagaagtccttcatcccgactggctggctaacccggttctagttcggaagaaaactgggcaatggcgcatgtgtgtcgattataccgacctcaacaagtcttgccctaaagatccttttgggttgcctcgcattaaccaggtagtcgactcgaccgccggctgtgagctactcagttttttggattgctactcacggtatcatcagatccgactgaaggaatccgactgcttgaagacttcattcatcacgccctttggggcctattgctacatcaccatgccattcggactaaaaaatgcaggagcaacttatcaacgtatgattcagagatgcttctcgatgcaaattggccgcaatgtcgaagcttacgtggatgatgtagtcgttaagactaagcagaaggatgatttaatctcagatctagaagaaacctttgcaagcatccgcgctttcaggatgaaactaaaccctgaaaaatgcaccttcggagtaccgtcagggaagctgcttggttttatggttgtgagcacagtcttggtcgttgagcgtgaggaagaaagccacgtccagaaagtccagcgaccgatctactttgtcagcgaggttctagccgactccaaaacaagatatcctcaggttcagaagctgttatatggtattctgattactaccaggaaattatctcactacttccaaggtcacttggtaacggtggtcacatcgtttccgctcggcgatatactgcacaaccgcgaagcaaacggacggattgctaaatgggctttggagttgatgtctttggacatatccttcaagccccgaacttcaatcaagtcccaagcattagccgacttcgtcgccgaatggaccgagtgccaggaggatatccccgcagaaaagatggagcactggaccatgcattttgacgggtcaaaaaggctttcgggcactggagcggaagtggttttaatttccccagctggagaaagattaagttatgtgctttggatacatttttccgcatcccacaacgtcgccgagtatgaggcgctcctccatggactacggatcgcaatctccctagggataaagcgtctaatagttcgaggcgattcacagctggtcgtcaaccaagttatgaaagagcggtcctgccttgacgacaacatgacggcatatcgacaagaggaacgcaaattggaagacaaattcgatggacttgagcttagtcacgttctccgacacaacaatgaagccgccgacagacttgccaactttggatccaagcgcgaggcggcgccctccgatgtattcgtcgaacacctttatgagccgaccgaagggagacaattgttgaaagacatacattctggaatatgcggaaaccatgccgccgcacgcaccattgtcggcaaagcttaccggcagggttttttctggcctactgcagtgtccgacgccgacaaaattgtgcgcacgtgcgaaggttgccaatttttcgccagacaaatccatctaccagctcaagagttgcaaacaatcccactgtcttggccgtttgcggtttgggggctcgacatggttggcccgttcaaaaaggcagtcggcggttacacgcatctctttgtggccattgacaaattctccaagtggattgaagctaaaccggttgtcacaatcacagcagataaagctcgagatttcttcatcaacattgtgcataggtttggagtgcctaatcggattatcaccgataatggcacacaattcactagcggagtttttaaagacttttgcgaagacttcggaattaaaatttgctatgcctcagtagcgcatcccatgagcaatggacaggtcgaacgagccaacggcatgatacttcaagggataaaagcgcgagtttttgaccggctaaaaccctatgcaggaaaatgggtggaacagctgccatcagtactttggtctttgcgtactacacccagtcgggccacaggccagtcaccttttttccttgtctacggggcagaagcaatgttgcctagtgaagttgaattcgaatctttgcgctttcgcaattttcgcgaagaacgctacgaagaggaccgagtggatgatctgcaccgattggaagaagtccgcgacgcagctttaattcagtcggcccgatatttacaagggttgcgacgttatcataatcgcaatgttcgatcccgtgctttcctagtcggcgacctggttttgaggaaaattcaaactacacgagatcggcacaagttatctcctctatgggaagggccatttatcatctctgaagtcacccggccaggttcctatcgactcaagcgtgaagatggtacacttgttgacaattcctggaatatcaaacatcttcgtcgcttctacgcttaa

SEQ ID NO: 47189 - DNA, 5205 bp, Oryza sativa
  Clone ID: PAT_MRT4530_49983C.1
atgggttccgtctccggcatcgacgacctcgtcttcccacccgggcagacgtttcggttcggcagcctcgacttcgtcaccaacaacttcggcaagatctctctccttgactcggtgtcagaccagtcgggagagaaccggatttcagtcccgtttggactcccaaacgcggctgaaagttacttcaagaccatctcaatcgagttggcttcaaaccactcgggtgagatcgcatcttctcccacgtcaccagatcaagatgatggggcttacccaccgatcctgatgaagctccccgacgatttggcggccgtctccatcacgacagcgtctccatcccgtaggcctaggcagaagtcggcttcaacaccgatttcgcctagcttcagggaagtcggcgtcatccttcaaccactccgactggcagccgagtcccccacttccgatctcatgactaccgtcatccaagcctcagcatcaccggcgcaggatccaatcgcaggagcaggggtcacgacgagcgccggcttcaagccgactggaatagagaagtacgacggtaccactaacccagaatcgtggcttaccgtctacggtctcgcaatccgcgcagcaggaggagacagcaaggccatggcgaactatttaccagtggctttagcggattccgcccgatcttggctccatggattgccccgtggtacaattagatcttgggccgaattacgcgaccacttcatcgccaacttccaaggcaccttcgagcgtcccggcacacaatacgacctctacaacgttattcagaagtccggagaatcccttcgagattacatccggcgattttctgaacaacgtaacaagatctccgacatcaccgacgacgttatcatcgccgcattcaccaaagggattcgccacgaagaattggtcggcaagttcgggcgtaagcctcccaggacagtcaagcttatgtttgaaaaagccaacgagtacgccaaagctgaagacgccgtcaccgcatcaaagcagtcgggtcctagttggaagccaaacaagggtacgccggctacgggaggaggtggaagtaacaaccataaggaccgcaagcgtaagcctgaggaacttgttgcaaccgccactcactcttctcgacagcgttcgcgcgtcaacacgttcgacaagatcatgaactcccaatgcccgcaccatcctaactccaaccacgtggccaaagattgtttcgtctacaagcagtttgcggagcaatacaccaagactacacggaagaactccgacgaagaacaaagtacgtcgaggaagaaggacgacggcgacaccccggcaggatttcaagaccaccgcaaggagctcaaccatatcttcggcggccccctggcttatgagtctaaaaggaagcaaaaattgactgaacgggagatcaatgctgttcagcccgacacgccccagtatcttcgatggtcagaaattgcaatcaagtttgaccgctcggatcatcctgaccgagtggtccacccggggcggtaccccctggtactagacccagtggtccgtaatgtcaagcttcgcagaaccctcatcgacggcggcagtgcactcaatatcctcttcgccaagaccttggatgatatgcagattcctcgctccgagctaaaaccaagcaatgcgccttttcacggagtaattccaggattatccgcaactccactcggccagatcaccctcccggtcacctttggcactcgggaaaacttccgcacagagaatatcagctttgaagtcgccgatttcgagacagcataccatgccatactcggacgcccggcgttagccaagtttatggccgtcccgcactacacttacatgatgatgaagatgcctggtccccgaagagtcctatccctacggagcgacatcaagcaagccgtcacatgcgacaaggagagttgcgacatggctcaaacccgcgagatggcgtcagcccgagaggatatccgactggctgtagccacggcgagcgaaggagaagtgcccgctaccaagatttcaaaaagtggagaaagcgaagccaagactaaaaagattcccctagatccttctgattctactaaaactgctaacaataaagatatctttgcgtggaaaccatctgatatgcccggtattcctagagaggtgattgagcactccttacatgtcaaagaagatgccaagcctatcaaacaacgactccgccgattcgtacaagacaggaaagacgcgatcaaggaggaattaaccaagctgttagcggcaggcttcattaaagaagtccttcatcccgactggctggcaaacccggttctagttcggaagaaaacggggcaatggcgcatgtgtgttgattatactgacctcaacaaatgttgccctaaagatccttttgggttgcctcgcattgaccagatccgactgaaggaatccgactgcttgaagacttcattcatcacgcccattggagcatactgctacgtcaccatgccgttcggactaaaaaacgcaggagcaacttatcaacgtatgatccagagatgcttctcaacgcagatcggccgcaacgttgaagcctatgtggatgatgtagttatcaagaccaagcaaaaggatgatttgatctcggatctagaagaaaccttcgcgagcatccgcgctttcaggatgaaattaaaccctgaaaagtgcaccttcggagtaccgtcagggaagctgcttggttttatggtgtctcacaggggcatccaagccaacccggagaaagttactgctatcctcaacatgaaaccgccaagtacccagaaagatgttcagaagctgactggatgcatggcggcgctcagccgatttgtttcaagacttggcgagcgggggatgcccttctttaagctactgaagaaaacagatgatttccagtggggacccgaagcacagaaggccttcgaagatttcaagaaattcctcaccgagccaccagtcttagcttcaccacatccgcaggagccgttgttgctgtatgtatcagccacctcccaggttgtgagcacagtcttggtcgttgagcgcgaggaagaaggccatgtccagaaagtccagcgaccgatttactttgtcagcgaggtcctagccgactctaaaacgaggtaccctcaggttcagaagctgttatatggtattctaattactaccaggaagctatctcactactttcaaggtcactcggtaacggtggtcacatcatttccactcggtgatatactgcacaaccgcgaagcaaacggacggattgctaagtgggctttggagttgatgtctttggacatatcattcaagccccgaatttcaatcaagtcccaagcgttagctgattttgtcgccgaatggaccgagtgccaggaggatacccccgcggagaagatggagcactggaccatgcattttgacggatcaaaacgactttcgggcactggagcaggagtggttttgatttccccaactggagaaagattaagctatgtgctttggatacatttttcggcatcccacaacgtcgccgagtatgaggcgctccttcatggactgcggattgcaatttccctagggataaagcgtctaatagttcgaggcgattcacagctggttgtcaaccaggttatgaaagagtggtcctgccttgacgacaatatgatggcatatcgacaagaggtacgcaaattggaagacaagttcgatggactcgagctcagtcacgttcttcgacacaacaatgaagccgccgacagacttgccaactttggatccaagcgcgaggtggcgccctccgatgttttcgtcgaacacctttatacgccgacagtacctcacaaagatactactcaaattgcgggcactcatgacgtagctctggttgaagccgattggcgagagcccttcatacgatttttgacttctcaagaactcccacaagacaaagatgaagccgagcggatttcaaggcggagcaaactttacgttatgcatgaagctgagttgtacaagaaaagcccttcagggattctgcaacgctgcgtatctttagaggaagggaggcaattgctgaaagacatacattctgggatatgcggaaaccatgctgccgcacgcaccattgtcggcaaagcttaccggcagggttttttttggcctactgcagtgtccgacgccgacaaaattgtgcgcacgtgcgaaggttgccaatttttcgccagacaaattcatctaccagctcaagagttgcagaccatcccactgtcttggccgtttgcggtttgggggctcgacatggttggcccgtttaaaaaggcagtcggcggttacacgcacctctttgtggccattgacaaattctccaagtggattgaagctaaaccggttgtcacaatcacagcagataacgctcgagacttcttcatcaacattgtgcatagatttggagtgcccaatcggatcatcactgataatggcagacaattcactggcggagtttttaaagacttttgtgaagactttggaattaagatttgctatgcctcagtggcgcatcccatgagcaatggacaggtggagcgagccaatggcatgatacttcaagggattaaagcgcgtgtttttgaccggctaaaaccctatgccggcaaatgggtgaaacagctgccatcagtactttggtctttgcgaactacacccagtcgggccacaggccagtcaccttttttccttgtctatggggcagaagcaatgttgccgagtgaagttgaattcgagtctttgcgctttcgaaatttccgtgaagaacgatacgaagaggaccgagtggatgacttgcaccgattggaagaagtccgcgaagcggctttgattcagtcggctcgatacttacaagggctgcgacgttatcataatcgtaatgttcgatcccgtgcctttctagtcggcgacctggttttgaggaaaattcaaactacacgagatcggcacaagttatctcctctatgggaagggccatttatcatctctgaagtcacccgaccaggttcctatcgactcaagcgcgaagacggtacactcgtcgacaactcttggaacattgaacatcttcgtcgtttctacgcttaa

SEQ ID NO: 47190 - DNA, 289 bp, Oryza sativa
  Clone ID: PAT_MRT4530_49984C.1
atgggtcctttctccggcatcgacgacctcgtcttcccgcccgggcagacgtttcggttcggcagcctcgatttcatcaccgacaacttcggcaagatttctctcctcgactcggaatcaaaccagtcgggagagaaccggatttcggtcccgtttggattcccgaacgcggttgaaagctacttcaagaccatctcaccgaatcaagatgacggggcttacccaccagtcctgatgaagctccccgacgatttagcggccgtcttcaccacgacagcgtcttcatccc

SEQ ID NO: 47191 - DNA, 4293 bp, Oryza sativa
  Clone ID: PAT_MRT4530_49985C.1
atgcctccccgcactcgccatggtcgtcgtgagcccacgcccgatcccgtcagtgagaatgaggattcaagcggagatgagtatgttcaaagtgatgatgacaatatggaaaatgttgagggtgatgagatggaagtaagtgatgatggtgatgacaatgagagtggaaatggtgaagatgatgaggcaagtgatgataggagtcctctcgattccaccatccaatttgtgcttaatttgaggaatgctcaacaatacactatcctccgtcatcataatcaattccgaaggcctaacgattgtaatgatccaagatttcatacacggttccaaaagtccgtgtatgcacaagtgtatgccaacaaagccttcgccgaacacaagtggatttcttggaagcacattggtgagacaccggagtttgagaatttgcaagagatgttccggaccgttgggattgatagaattgtcaccatgaagcaaccttttgatgaagatctcatccggcaattctatgccaccgtatgggtgtccggcgattgtgatgcaatgaagtggatgtcgaggaccctccgatgctctatcaaccgccgtgaatccaaggagctcttgcacattcgcttcaacaacggggatgaccttcatgatgagcacacccacaaccccttccccattgatcacttttctcagttttatgaagaagggggaaggcacacatatggcaaggtggcgggtttgagggctctcccaagtgtgatcaaccgcatagtaagggccaccatcctcccaagatgcggcaacaatgatgacatacgcggagttgcttggcatgttattgatgccattatggatggtcgtcggtttgatgttatcaaccttatgatgaaggagattgccatctcaaaggggactcttggacaaggaatctattatgctccctacataatgaggttgattcaaagcaagttgggacaaattggtcacaatttaaaagaacataaggagtacaagcctcgtctccaactctcctcccctagagctcctcgtgtgcgccaaccaacattcgatcaaggtgcaagctcaagtgcagcccccccttctcctcaagggtatgatccaagtgcttttttccatctacaatatgcctactttggaatgcaacccaatgacttcttcaacccggtccttggggctattcataccctaagtgaaagcattcaacgcttatccaccgggcatgaagcattgcatgaggatgttcgtggcttgtgcaccgatgttggcaacttgaatacttcggtgggaagattgcatactagggggcggtcagaccggccacatagtggcggtctgaccggcgtgccctggccggtggtgtgcgaggcttcgcaaatactagtggcgcattatgaatgtcctaaggtatacacgctgcacaattgcacagtacactatactgatggagtatgcaactgtgcacgatgtgagttctgtcccaaaaaaactgcgtttggatacaatgcaaaggagaaggccaagacgggtgttctgagaaatgccgcagcgctgctcgacgaaatgcagctcatgggagaaacacagggtgccaagaaggtgatcaactcggagctctggcacgcttgtgccgggccgcttgtgtgcttgccgcagcgggggagcctcgtgtactacttccctcaggggcacagtgaacaggttgcagcgacaactagaaagattccaaattcccgcattccgaactacccaaacctgccatctcagttgctgtgtcaagttcacaacatcaccttgcatgccgacaaggacactgatgaagtttatgcacagatgacccttcagccagtaaactctgaaacggatgtattccctattccaactcttggtgcttataccaaaagcaagcaccccactgaatatttctgcaagaatttaaccgcaagtgatacgagtacacatggtggtttctcggtgccacgaagggctgcagagaagttgttcccacaactggattactcaatgcaacctcctaaccaggagcttattgttcgagatttgcatgataacatgtggacattccgtcacatttatcgtggacagccaaaacgacatcttctaacaactggatggagtctctttgttggggcaaagcgtctaaaagcaggggactctgtcttatttataagcatgcacattggcgttcttgctgctgcagctcatgccgcatcaagtggtagttcatttactatctactacaatcctaggacaagtccttcgccatttgtaattcctgtagcaaggtacaacaaggcaacatatatgcaaccatcagttggaatgagatttgcgatgatgtttgagacagaggagtcaagcaagcgcagatacacaggtacagttgtgggaataagtgactacgaccccatgagatggcccaattctaaatggcgcaacttacaggtcgaatgggatgaacatgggtatggagaaagacctgagcgtgtgagcatatgggatattgaaactccagaaaacactcttgtgttcccttcgtcgaccttgaattcaaagcggcaatgtcttcctggttatggagtttcagtgcctgggatggaaattggatcagcaaatatgtcatcatttccaagggctcagggtaatccctatggcagtttgcagcacattccagctgttggatcagaattggctatcatgcttctcaaccaatctggtcaaacccttgggagtccccttagttttcaccagtcctcatattctagtattatccaaaatgtgaagcaaaattatatccctcctctaacagttagcacttcagcttgtttgacaaagcaagaaagcctgccttcagatgatgcccagcaccagttccatatggcaaatatgcagaatggtgatcttgaaggctctgaagtccagcctgtcattgattcgatttctgagtcaaagttgaatgctacatcaagagatccaagaaacacagattcatacacaagtcgaagtacttcggagcaaaacagtaagggtgagcctagaggcaagactcgtaggagtaagaagggcttgcctcacaaaaccgtttcagagaaatctgacctttcttcagccccttcttggatctgtgacaatcagcaggttggtttagaatcgaaactggttggttgtgatgaacaagtaaactgtggaaatattgaagattcatcaggtgcacttactcaaggtaattttgttggacagccgcatggccatcaggttgaacaaaagggagtgctgtcgccaccaaaggtagaatcatcaaaatcacctgatggaggaaagtctgtcaattcgtttccaaaccaagggtgtttttcgcagttcattgatggtcttgattggatgactcagccttcctactaccaagactccaatgtaattcaaccagccggtgtgtcagagaacattttcagttcttctgcagatatacctccctcaatgattgctgatactatggagacttttcaggcttcatgtctttctgattgccttcctaattccatacaagaattcatctccagcccagatctgaattcactaacctttctttcacctgacatgcaaaatttggaggtccaactccagcatgatggaagcaatttgccaagcacgtccaactcgtttgtacagatgagtttttctgaagagagtgcaagtcagagtgcaaacttaagtggacttcacatggaatctacacacagaagcataaacaccacttcatgctctcaaccaatgtctactgggggctttgatgcagggatgtactcaaagttgccacgtttaaaagaatcccaaatcttgtctttgccagagattcataccaattccatgggaacatcagcttgcagtatggatgcaaccgagtacagccttgaccgaagtgcgaagccgatgaaaccaccagtgcggacatatacaaaggttcaaaagcaaggatcagttggaagatctatcgatgttacagggtttagaaattaccatgagttgagatctgccatcgcttgcatgtttggtctccaggggaaattggagcatcctggcagttcagagtggaagcttgtatatgtcgactacgaaaatgatgttcttcttgtcggagatgatccatgggaggaattcatcaactgtgtccggtgcatccggattttgtcaccttcagaagtacaacagatgagcgagaatggcatgcatgttttgaacgactgtattcaagcagcttag

SEQ ID NO: 47192 - DNA, 2868 bp, Oryza sativa
  Clone ID: PAT_MRT4530_49987C.1
atggcgtcctcgcaggagaaggccaagacgggtgttctgagaaatgccgcagcgctgctcgacgaaatgcagctcatgggagaaacacagggtgccaagaaggtgatcaactcggagctctggcacgcttgtgccgggccgcttgtgtgcttgccgcagcgggggagcctcgtgtactacttccctcaggggcacagtgaacaggttgcagcgacaactagaaagattccaaattcccgcattccgaactacccaaacctgccatctcagttgctgtgtcaagttcacaacatcaccttgcatgccgacaaggacactgatgaagtttatgcacagatgacccttcagccagtaaactctgaaacggatgtattccctattccaactcttggtgcttataccaaaagcaagcaccccactgaatatttctgcaagaatttaaccgcaagtgatacgagtacacatggtggtttctcggtgccacgaagggctgcagagaagttgttcccacaactggattactcaatgcaacctcctaaccaggagcttattgttcgagatttgcatgataacatgtggacattccgtcacatttatcgtggacagccaaaacgacatcttctaacaactggatggagtctctttgttggggcaaagcgtctaaaagcaggggactctgtcttatttataagggatgagaagtcacaacttcttttgggtgttaggcgagccacgcgacaacaaacaatgttgtcatcttctgttctatctactgatagcatgcacattggcgttcttgctgctgcagctcatgccgcatcaagtggtagttcatttactatctactacaatcctaggacaagtccttcgccatttgtaattcctgtagcaaggtacaacaaggcaacatatatgcaaccatcagttggaatgagatttgcgatgatgtttgagacagaggagtcaagcaagcgcagatacacaggtacagttgtgggaataagtgactacgaccccatgagatggcccaattctaaatggcgcaacttacaggtcgaatgggatgaacatgggtatggagaaagacctgagcgtgtgagcatatgggatattgaaactccagaaaacactcttgtgttcccttcgtcgaccttgaattcaaagcggcaatgtcttcctggttatggagtttcagtgcctgggatggaaattggatcagcaaatatgtcatcatttccaagggctcagggtaatccctatggcagtttgcagcacattccagctgttggatcagaattggctatcatgcttctcaaccaatctggtcaaacccttgggagtccccttagttttcaccagtcctcatattctagtattatccaaaatgtgaagcaaaattatatccctcctctaacagttagcacttcagcttgtttgacaaagcaagaaagcctgccttcagatgatgcccagcaccagttccatatggcaaatatgcagaatggtgatcttgaaggctctgaagtccagcctgtcattgattcgatttctgagtcaaagttgaatgctacatcaagagatccaagaaacacagattcatacacaagtcgaagtacttcggagcaaaacagtaagggtgagcctagaggcaagactcgtaggagtaagaagggcttgcctcacaaaaccgtttcagagaaatctgacctttcttcagccccttcttggatctgtgacaatcagcaggttggtttagaatcgaaactggttggttgtgatgaacaagtaaactgtggaaatattgaagattcatcaggtgcacttactcaaggtaattttgttggacagccgcatggccatcaggttgaacaaaagggagtgctgtcgccaccaaaggtagaatcatcaaaatcacctgatggaggaaagtctgtcaattcgtttccaaaccaagggtgtttttcgcagttcattgatggtcttgattggatgactcagccttcctactaccaagactccaatgtaattcaaccagccggtgtgtcagagaacattttcagttcttctgcagatatacctccctcaatgattgctgatactatggagacttttcaggcttcatgtctttctgattgccttcctaattccatacaagaattcatctccagcccagatctgaattcactaacctttctttcacctgacatgcaaaatttggaggtccaactccagcatgatggaagcaatttgccaagcacgtccaactcgtttgtacagatgagtttttctgaagagagtgcaagtcagagtgcaaacttaagtggacttcacatggaatctacacacagaagcataaacaccacttcatgctctcaaccaatgtctactgggggctttgatgcagggatgtactcaaagttgccacgtttaaaagaatcccaaatcttgtctttgccagagattcataccaattccatgggaacatcagcttgcagtatggatgcaaccgagtacagccttgaccgaagtgcgaagccgatgaaaccaccagtgcggacatatacaaaggttcaaaagcaaggatcagttggaagatctatcgatgttacagggtttagaaattaccatgagttgagatctgccatcgcttgcatgtttggtctccaggggaaattggagcatcctggcagttcagagtggaagcttgtatatgtcgactacgaaaatgatgttcttcttgtcggagatgatccatgggaggaattcatcaactgtgtccggtgcatccggattttgtcaccttcagaagtacaacagatgagcgagaatggcatgcatgttttgaacgactgtattcaagcagcttag

SEQ ID NO: 47193 - DNA, 1559 bp, Oryza sativa
  Clone ID: PAT_MRT4530_49988C.1
ctcagaagcactacacttctgaaaagggggaataatagcaaggctgagtacaaccaccgtactcagcaagccacaccaacgatgcagacgtgcaaagggaacacaaggacggtttcacccccacccctcaaaaggcagtgggcggtcccctcttgcgccgcggtgaatccggcagctggacaaccggacaccccggccgacccaactccatcacgcccaccctcgccaccggtgcctaggaaagggtcgagctatacttcagatcaagcagttacccattcccgcttgtggcaagcgctaaaaggactgccgctgacgtcagcaaagggccggcgccgacaggcgggccccacacgtcagcgagtcaaagggggagggcgctggtacacgggcccactcggcagcggctcaagggggggcacggctgccggccgggcggccatggcaaggcggcggcgcgggcatgcgaccgccagcgacggcgagcgcgcgaagagggcggcggcgcacggggaaaaaaaaaagaagggaaggaaggggagggagacctcaccggaggggcggcaatggccggcggagaaaaacgagggaggcggcgaagaccggcgatgccgaggtgcggacgagcgacggcgacacctagggaaagagaggagaggaattagggcggaggaaaacccccacggcgaccatccacgccggccggagtcggaggggagagagaactcaccgacgacgcgagggaaatggggtttcggtggtattccggcgacgcagagcagcggccgggaagggtcttgcggcggcggtggggcctcgggggaaaggagagaggaggagacggttggggggagacgatgacaggtggggcctcgggtccacctgtcggcgaggggaggagggaggaggcggccgggaagggtcttgcggcggcgaagctagtggtggcggtggcttagtgcggcggcggctctagcgacggcggcacacggccggagtgcggcgacgggcggcggcgtaagtggcggcggtgcgagctcggtagggggcacgggatggagcggtgagagcggaaaacgagagaggagggcatggggagcatttggcgaagctagtggtggcggtggcttagtgcggcggcggctctagcgacggcggcacacggccggagtgcggcgacgggcggcggcgtaagtggcggcggtgcgagctcggtagggggcacgggatggagcggtgagagcggggcgacgtggcgtgggcgcggcgaaagcggaggaagtgggtgcggcggcggtttcggcgcggcggcgcaccgggatcggcgggaggtgggggaaggacccgacaggtggggcctcgggggaaaggagagaggaggagacggttggggggagacgatgacaggtggggcctcgggtccacctgtcggcgaggggaggagggaggaggctgggggttatgtggacttggaggagggggagctaagaaaatcgagtgagagataagaaaaaatctttcgagtgagatatagcaaaatcgatagcaaaatcgtaata

SEQ ID NO: 47194 - DNA, 1533 bp, Oryza sativa
  Clone ID: PAT_MRT4530_49989C.1
caatttttagaatcatttgtgtggattgtggaaggatttgggtatgcttgtgtcagtggcggtctgaccggacgcggtctgaccggccctatgcctccccgcactcggcatggtcgtcgtgctcccacgcccgatcccgttagtgagaatgaggaatcaagcgaagatgagtatgttgaaagtgatgaggacaatatggaaaatgttgagggtgatgagatggaggtaagtgatgatggtgatgacaatgagagtggaaatggtgaagatgatgaggcaagtgatgatgggagtcctctcgattcctccatccaatttgtgcttaatttgaggaatgctcaacaatacactatcctctgtcatcatgatcaattccggaggcctaacgattgtaatgatccaagatttcatacacggttccaaaagtccgtgtatgcacaagtgtatgccaacaaagccttcgccgaacacaagtggatttcttggaggcacattggtgagacaccggagtttgagaatttgcaagagatgttccggaccgttgggattgatagaattgtcaccatgaagcaaccttttgatgaagatctcatccggcaattctatgccaccgtatgggtgtccggcgattgtgatgcaatgaagtggatgtcggggaccctccgatgctctatcaactgccgtgaattcaaggagttcttgcacattcgcttcaacaacggggatgaccttcatgatgagcacacccacaaccccttccccattgatcacttttctcagttttatgaagaagggggaaggcacacatatggcaaggtggcgggtttgagggctctcccaagtgtgatcaacagcatagtaagggccaccatcctcccaagatgcggcaacaatgatgacatacgcggagttgcttggcatgttattgatgccattatggatggtcgtcggtttgatgttatcaaccttatgatgaaggagattgtcatctcaaaggggactcttggacaaggaatctattatgctccatacataatgaggttgattcaaagcaagttgggacaaattggtcacaatttaaaaaaacataaggagtacaagcctcgtctccaactctcctcccctagagctcctcgtgtgcgccaaccaacattcgatcaaggtgcaagctcaagtgcagccccccctcctcctcaagggtatgatccaagtgcttttttccatccacaatatgcctactttggaatgcaacccaatgacttcttcaacccggtccttggggctattaataccctaagtgaaagcattcaacgcttatccactgggcatgaagcattgcatgaggatgttcgtggcttgcgcaccgatgttggcaacttgaatacttcggtgggaagattgcatactagggtgggtgtattggattctcgcgtccaaaccttggagagtacccaagcttttgtctatcatcgccgccgtgatgcttctcatccttccacttcggcgcgtcctccttctcctccacaagagtga

SEQ ID NO: 47195 - DNA, 4804 bp, Oryza sativa
  Clone ID: PAT_MRT4530_4998C.1
cagctcggcgtgaacgacccgcgcgcggagctgacggtggagtgcccggatggcagcgcagcctgcccgacgcggcagcggtgaccccgcttgtcatgggcggggcagccgagataccgtcgtggtggctaggtgaggcgcgtggccggataacgggggcgctggcgggtggcgctggtctggagcggcagcaccaccggcggtcagatggtagtgctaagggagctggcggcggtggctcgtcagcgggggaagctcaggctgccgatgcaatgccacctagtcccgggttctcctttggccaaaactggcaaggcggccagcgggtggtggaacagaggggtcttgggccagctctcaggggtggtggttcgatgaagtcgaccgacgaaggggcgtcggtgcggcgaaagcctagtccggtggttcaccgggccggcagcggctacgtcttcgggcgtcgtaatttccttggagcgttgtcgagggttaccctctccctttcttggcgagcttctctgggtgaaaaccacatctttttagatgggcgatggcggcatcctggatgtcgtgaccaccatggtggcatcgttttcggagcctcgtctctgtggtgttgccgtaggcctagcggcgttcggccacatttagcgggggtcgtttggtgctaggtttcaccctcagcggtttgtgcttgggtggtagtgtgtggtgtgtggcaatgcaccttggtgcattttgatgttttttctcttgtaacttttattccttcttaatatactcggttggcctccttcggccttcccggcgaaaaaaagaagtccaggttggaacaagtggtgagtatcctaatcaagttgcgatgccgggccatgcgcagggcatgacactctgaatcgaagcttctaatagcttgttccagctccatgttgagaacttttattgccaccatagtaccgtcgttcagttggcccttgaaaacttttccaaagcttccagcccccaacaatttagtctcactaaaattatccgtggctcggacaatgtcatggtaagagatcaacctattgttgagcacatcttccatatcaggagaaatgattctatcttgttgcttggctttcttcctcatcatcatgtacatgcatgtggctataactccgacaacaataataacactggggagcaagaattttagtatttgccttttattactattattgttgctcttacatggcataaaccccaaacgtggaacaccaccacaaagggcggggttgcccatcaaagattgcagggtgatgtttgcaaagatgccaccttctggtattggaccatgtaggttattgaatgaaaggttcaagctagagagatcagtaaaatttgctaaatattgtggaattgtccccgacagatcattgtatgaaacatccagtgatttcaagttgatcaacttgtcaaaagagtttggaaatgaaccatttagtgagttgtgtgacaggttcaggtatgttgtcattagaaactgtccaaaggattcagggatcctaccaaacaaccggttggaagagagatcaatcctgtcaatatgatttagctgccctatatctactggcaatgcaccttccaaggagttctgagacagatcaacggttatcaagctattcatatggaataggcttgctggtatggttgatgacatatgatttttagatagaacaagatattgtagattactgaggtttccaagatcgtttggtagcacacctgagaagttgttgttattgagtattagtgtttgtaggttccttagatgacctatttgtcttgggattgtgccagacatgatatttccagagagattaagaacttggagcttgtccattagcatgattgattctggaatagtaccagtcagttggttgtttgaaaggtccaaccaaacgagattgcttaaattcaacagggtagaaggaagatcaccggataacctgtttcctactgcaaagaaatttattagagtacttgagaagtttccgacatagttagggagctcccctgtgaaataattcaagtcgaagccaacttcccagatattttgacagtttgaaagtgtagccaagaagtcgaggctcccttgtaggtagttgtctccaatattgaaccattcaactgatcctgtgctaccgattgcagttggtactgctccggtaaaactattagcaccaattaagaatacagctagttccgaaaagttggcaaaaaaggtagggatggatcctgtaaaatgattatggtcgaggaatagccctttgattttcctgagctgtgcaagttcttgtggaatctgtcctgttaaattgcaggattgaaggccaagggtgtcaagattactaagattacccaatgcagatgggatcggaccaacaaggttattactctctaaatcaagtaatacgaggtctggcagttttcccaaccatgctggaactgggccctcgaataaattatgtccaatgaaaatccattggaggtatttgcagtctgcaagccccaacggaatctgtcccatgaatctgttttcatacaagcagatcttttgcagcatggggaggttgaagctcttgttaccagggatagatccatctaggtacccgttgcctccgagatgcaacatttctagtttggacatgttgaaaattaactcaggtactggtccagaaaagtggttatatgctatttccaagtgttgaaggatgggcaaagtgccgataccaactggtattgtccctgacaaactgttattccggaagtttagatattttagcttaggggtgttgttgaacagatcattgggtagtggtccagtcaaataattcactagcaaatctatgtacctaaggttgcgaagattctgcagctcacgtggtatttgcccagagaggctgttataccctacgttttgggagaggagactacgccgccgcagcggcgacacagtcgggcgcatcctttgtgaccatgcttgccctggccaccgccgccggcgcgcagccttggatcgagaggggtgagacctccacgacgccgccgcgtagctttgcgacgtcacagctgcgcaaaagccggcagagaagttgttgttattgagtattagtgtttgtaggttccagagttgacctatctgccttgggattgaaccagacaagctatttccggagagattaagaagttggagcttgtccattagcttgattgattctggaatagtaccagtcagttggttgtttgaaatgtccaaccaaacgagattgcttaaattcgacagggtagaaggaagctcaccggataacttgtttccttctgcaaagaaatttatcagagtacttgagaagtttccgacatagtcagggagcttccctgtaaaatcattcaagtcgaagccaacttcccagatattttgacagtttgaaagtgtagccaagaagtcgaggctcccttcttggtagttccctccaatattaaaccactcaattgatcttgagctaccaagtgcagttggtactgacccagtaaaactattagcaccgattagaaagacttgtagttcagaaaagttagcaaaaaaggtagggatggatccagtaaaatgattatggtccagatacaatgcattgagttgctgaagctgtccaagttcttgtggaattagccctgataaggtacacgattgaagaccaagggagacaagattagtaatattacccagtgcagatgggatttgaccgataagattattgtaacctagatcaagtaaaaggaggtctggcagtttgctcagccatgttggcacagggccctcgaatgagttctctccaatggaaattatttggatgtatttgcagtttgcaagccctaatggtatctgtcccgtgaatctattcgcaaatagagagatcatttgcagcatggggaggttgaaggtattattgttacctgggatagttccagttaggccccagttgcctccaagagataatatttgcagcttggacatgttgagtatagttgttggaactgggccagagaagtggttagcctgaaaatcgaggtgttggagcatgcctaaggaacccacagaatacggaagtgttcctgtcaaactgttgttcccaaagtctagatattgtagcttagaattgttgctgaagagatcattcggtagtggtccagttaagtaattcgttatgaaatctatgtgcgtaagattgtgcagtttttgcagctcaagtggaatctgccctgatatgctgttgtgccccatgtcaacaacctcaagccttgtgaggtttcctaccactggtggaatgacgcctgacaagctattccggcggaaaacgagaacttcaagacgatgcagctttccgagatcggctgggatggcgccggtgagtcccgtgctagtgaggttgaggacagtgaggaaagagaggttaccaagatgaggcgagatgcttccctggagtggcacatcgtgcagcacaagggcaacaacccgtgcccggcggcgactacatgacacgccgaaccaatgacagaaagatgtggcagtagtccagttggatagaacgccgcgagggtcggcgagctgggctttgaaagccagcagcgcggtaacgtctgtgtcactgccgttgccggcggtgacactgtctggggtcgaagcaatggcaatagaagcaatggcaatagatgctaaaaaccagaggtacagtagcagcgtaatcatgatcgaagtggccat

SEQ ID NO: 47196 - DNA, 3111 bp, Oryza sativa
  Clone ID: PAT_MRT4530_49990C.1
atgatgcaactcaccaccacatggccatggcgtttctttttctgcttgtttttccacctgctgttcctcttcccaaccaactccttgaatcaaagctactgtgaccctggtgatgctagtgcactgctgggcttcatgcaaggtctcagcggaagcggcagcggctggacggtcccaaatgccacttctgaaacagccaattgctgtgcttggcttggagtcaagtgcaacgatggtggccgggtcatcgggctggacctccaaggcatgaagctaaggggcgagctggcagtctcgctcgggcagctggaccagctccagtggctcaacctgtccagcaacaacctccatggggccgtcccggcaaccctggtccagctccagaggctacaacgtcttgatcttagcgacaatgagttctctggtgaattcccgaccaacgtgtctctcccagtgattgaggtcttcaatatatccctcaactcattcaaagaacagcatcccacgctccatggttcaacgctccttgccatgtttgatgcggggtacaacatgttcacagggcacattgataccagcatctgcgatccaaatggagtgatccgtgttctccggttcacgtcgaatctcctatctggggagttcccagcagggtttgggaactgcacaaagctcgaggagctatatgttgatctaaatagcatcactgggagcttgccagatgatcttttcaggctgtcttcgctgagggacctgtctctgcaggagaatcagctctctggtaggatgacaccaaggtttggtaatatgtctagcctttctaagctggacatatctttcaattcattctctggataccttccaaatgtttttggtagccttggcaagcttgagtatttctctgcacagtctaacttattcaggggtccgttgccttcatcactgtcccattcaccatcactgaagatgttgtacctgagaaacaattcattccatggacagatcgatctcaattgctcggcaatgtcacaattgagctcacttgatcttggcacaaataagttcatcggcacaatagatgctttgtcagattgccatcatctgagaagcctgaatcttgccacaaacaacctcactggtgaaatccctaatggtttcaggaatcttcagtttctaacctatatctcactttcaaacaatagcttcacaaatgtgtcctcagcattatctgtccttcaaggctgcccaagcctaacaagcctcgtgctgacaaagaatttcaatgatgggaaggccttgccgatgactggaatagatggttttcataacatccaagtgtttgtcattgctaatagccatctttcaggatcagtaccttcatgggtagcaaacttcgcacaattgaaagtgctggatttgtcatggaataaattgtctgggaacatccctgcatggattggcaatctcgagcatttgttttatttggatctttctaataatacactgtctggaggaattccgaacagtctaacaagcatgaagggccttcttacatgcaacagctcacagcaatccacagaaactgactattttcctttcttcattaaaaagaacaggacaggcaaagggctacggtacaatcaggttagcagtttcccgccctccctaattctcagccacaacatgctcataggtcccatattgccaggctttgggaaccttaagaacctgcatgtcttggacctcagtaacaaccatatttctggtatgattcctgatgagctatcaggcatgtcgagcttggaatccttggatttgtcacataataatcttactggaagcattccttcttcattaacaaagctgaattttctatcgagcttcagtgtggcattcaataatctaactggtgcaattccattaggagggcaattctcaacattcacaggttctgcttatgaggggaaccccaaactctgtggcatccgctctggcttagcactatgccagtcatctcatgctcctaccatgtctgtaaagaagaatggaaagaacaagggtgtcatattaggaatagctattggcattgcacttggagcagcatttgtgttgtctgttgctgttgtacttgtgttgaagagtagctttagaaggcaggactatatagttaaggctgttgcagatacaactgaagctctcgagttagcaccagcttcattggttcttttgtttcagaacaaggatgacggcaaggcaatgactattggtgacatattgaaatctacaaacaactttgatcaggcaaacatcattggttgtggtggctttggtctagtgtacaaggcaacactaccagatggagcaacgattgccatcaaaagactgtcaggcgattttggccagatggagcgtgagttcaaagccgaggtggagactttatcaaaagctcaacatcctaatcttgtacttctgcaaggttattgcaggattggcaatgataggctactgatctactcttacatggagaatggtagcctagaccattggcttcatgaaaagcctgatggtccatctagattaagttggcaaacaaggcttcagatagcaaaaggagcggcgagaggtttagcgtacctgcacttgtcatgccaaccccatatactccaccgtgatatcaagtcaagcaacatacttttagatgaggatttcgaagctcatttggctgattttgggcttgctcggcttatttgtccctatgatacacatgtaacaactgatctagttggcacactaggctacatcccccctgagtacggccaatcttcagtagccaatttcaaagagttattaactggaaagaggcctgtagatatgtgcaagccaaagggagctcgggagttggtctcatgggttttgcatatgaaagaaaaaaactgtgaagctgaagtattggaccgtgcaatgtatgacaagaagtttgagatgcaaatggtgcagatgatcgatattgcctgtttgtgcataagtgagtcaccaaaactgaggcctctaactcatgaacttgtactatggcttgacaacattggtggtagcactgaagcgacaaagtga

SEQ ID NO: 47197 - DNA, 474 bp, Oryza sativa
  Clone ID: PAT_MRT4530_49991C.1
atgcggagcagccgcttccaccaatcctccctccgaccctccgcgagccatcgtcgcctgcctcaccatgcgccgccgccaccggtgttccctccctccccgcagaaccgcctcctccccaccgaagtccgccaccgccgcgccgccttcgccgaccgctggagccagatccatcgcatgtgcgtctcggcgccaccggatccgtcgcctcatcgccgagcctttgccggatccaccctgtcggcgtcgcccctcctcctcctcgtcgagccaccgccgccactccttcgcctcgttgagccactgccgaccctcctcctcatcaagccgccgtcgctcctcctcttcgttgagccactgccatccctcccatgccgctgtcgtcgcagccactcctccacctcatcgagccgccgccgaccgcagcgcggctgccgttgcacaaggagggcagcgggaggaagttgctcttag

SEQ ID NO: 47198 - DNA, 4578 bp, Oryza sativa
  Clone ID: PAT_MRT4530_49992C.1
atgggtcctttctccggcatcgacgacctcgtcttcccacccgggcagacgtttcggttcggcagcctcgacttcgtcaccgacaacttcggcaagatttctctctttgactcggaatcggaccagtcgggagagaaccggatctcagtcccgtttggattcccaaacgcggctgaaacctacttcaagaccatctcaatcgagtcggcttcaaaccactcggctgagatcgcatcttctccaacgacaccagatcaagatgatggggcttacccaccagtcctgatgaagctccccgacgatttagcggccgtctccaccgcgacagcgtcttcatcccgtaggcctaggcggaagtcggtttcaacaccgatttcgcctagcttcagggaagtcggcgtcatcctccaaccactcggcacggtttcgacggatcagctagatgaccattacagctctcccaccgtcgactcgcgccccaccgacatcgtggagtacgatgagtttagctctcgctaccacgacccggatctcgacgacttcgacggaagcctagatgacaactacacccctctctactttggcgttttcatggccaataacgagacggaggagcaacgccaagcccgggagaccgaagaacgtcgccgactggaggaggagcatcaagcacaagaacaagaacggctacggcgtgagcagcaggaccgtgagcggatcgccaaggaggctgaagatcgacgtcagcgagctttggaagcagggcgccgagcgcgtgatctcattggacaacaagacgtcgaagggacaccggttttccgcacccctcaacagaatgcggttgccgcgatcacccttctcgacaccctcctcaaccaaagcgagctaaatcgttccgaccacgtcgtcaacatcttgaaccagacgaagaccatgatcgcggcttcggtcccagttaactccgaaagcgtccacacgccgactggcagccgagtcccccacttccgatctcatgactaccgtcatccaagcctcagcatcaccggtccacccggggcgattcctcgctccgagctgaaaccaagcaatgcgccttttcacggagtaattccaggattatccgcaactccactcggccagatcaccctcccggtcacttttggtactcgggaaaactttcgcacagagaatatcagcttcgaagtcgccgatttcgagacagcttaccatgccatactcggacgcccggcgttagccaagttcatggccgtcccgcactacacttacatgatgatgaagatgcctggtccccgaggagtgctatccctacggagcgacatcaagcaagccgtcacatgcgacaaggagagttgcgacatggcccaaactcgcgagatggcgtctgcccgagaggacatccgactggctgcggccacggcgagcgaaggagaaatacctgccaccaagacttcaaaaagtggagaaagcgaagccaagactaagaagattcccctagatccctctgactctactaaaactgctaataataaagatatctttgcgtggaaaccatcggatatgcccggtattcctagagaggtgattgagcactccttacatgtcaaagaagatgccaagccgatcaaacaacgactccgccgattcgcacaagacaggaaggacgcaatcaaggaggaattaaccaagctgttagcagcaggcttcatcaaagaagttcttcatcccgattggctggcgaacccggttctagttcggaagaaaacagggcaatggcgcatgtgtgttgattataccgacctcaacaagtcttgccccaaagatccttttgggttgcctcgcattgaccaggtagttgactcaaccgccggctgtgagcttctcagttttttggactgctactcggggtatcatcagatccaactgaaggaatccgactgcttgaagacttcattcatcacgccttttggggcatactgctacgtcaccatgccgttcggactaaaaaacgcaggagcaacttatcaacgtatgatccaaagatgcttctcaacgcagatcggccgcaacgttgaagcctatgtggatgatgtagtcgtcaagaccaagcaaaaggatgatttgatctcggatctagaagaaacctttgcgagcatccgtgctttcaggatgaaattgaaccctgaaaagtgcaccttcggagtaccgtcagggaagctgcttggctttatggtgtctcataggggcatccaagccaacccggagaaagttactgctatcctcaacatgaaaccgccaagtacccagaaagatgttcagaagctgactggatgcatggcggcgctcagccgatttgtttcacgacttggcgagcgggggatgcccttctttaagctgctgaagaaaacagatagcttccggtggggacccgaagcacagaaggccttcgaagatttcaaaaaactcctcaccgagccgccagtcttagcctcaccacacccgcaggagccgttgttactgtacgtatcagccacctcccaggttgtgagcacagtcttggtcgttgagcgcgaggaagaaggccatgtccagaaagtccagcgaccgatttactttgtcagcgaggtcctagccgactccaaaacgaggtaccctcaggttcaaaagctgttatatggtattctaattactaccaggaagctatctcactactttcaaggtcactcggtaacggtggtcacatcatttccactcggtgatatactgcacaaccgcgaagcgaacggacgtattgctaagtgggctttggagttgatgtctttggacatatcattcaagccccgaatttcaatcaagtcccaagcgttagctgattttgtcgccgaatggaccgagtgccaggaggatacccccgcggagaacatggagcattggaccatgcattttgacggatccaaacgactttcgggcaccggagcaggagtggttttgatttccccaactggagaaagattaagctatgtactttggatacatttttcggcgtcccacaatgtcgccgagtatgaggccctccttcatggactacggattgcaatttccctagggataaagcgtctaatagttcgaggtgattcacagctggttgtcaaccaagttatgaaagagtggtcctgccttgacgacaatatgatggcatatcgacaagagcgcgagacggcgccctcagatgttttcgtcgaacacctttacacaccgaccgtacctcataaagatactattcaagatgcggacactcatgacgtggctatggttgaagccgactggcgagagcccttcatacgatttttaatttctcaagaactccctcaagataaagatgaagccgagcggatttcaaggcggagcaaactttatgttatgcatgaatctgagctatacaagaaaagcccttcaggaattctgcaacgctgcgtatctttagaggaagggagacaattgctgaaagatatacattctgggatttgcggaaaccatgccgctgcacgcaccattgtcggcaaagcttaccggcagggttttttctggcctactgcagtgtccgacgccgacaagattgtgcgcacgtgcgaaggttgccaatttttcgccagacaaattcatctaccagctcaagagttgcagactatcccgctgtcttggccgtttgcggtttgggggcttgacatggttggcccgtttaaaaaggcagtcggcggttacacgcatctctttgtggccattgacaaattctccaagtggattgaagctaaaccggttgtcacaatcacagcagataatgctcgagacttcttcatcaacattgtgcatagatttggagtgcccaatcggataatcactgataatggcacacaattcactggcggagtttttaaagacttttgtgaggactttggaattaagatttgctacgcctcagtggcacaccccatgagcaatggacaggtggagcgagctaatggcatgatacttcaagggattaaagcgcgtgtctttgaccggctaaaaccctatgccggcaaatgggtacaacagctgccatcggtactttggtctttgcgaactacacccagtcgggccacaggccagtcaccttttttccttgtctatggggcagaagcaatgttgccaagtgaagttgaattcgagtctttgcgctttcgaaatttccgtgaagatcgctacgaagaggaccgagtggatgacttgcaccgattggaagaagtccgcgaagcagctttgattcggtcggctcgatatttacaagggttgcggcgctatcataatcgcaatgttcgatctcgtgcctttttagtcggtgatctggttttgaggaaaattcaaactacacgagatcggcacaagttatctcctctatgggaagggccatttattatctctgaagtcacccggccaggttcttatcgactcaagcgcgaagacggtactcttgtcgacaactcttggaacatcgaacatcttcatcgtttctatgcttaa

SEQ ID NO: 47199 - DNA, 603 bp, Oryza sativa
  Clone ID: PAT_MRT4530_49993C.1
atgatgcccaatcacaccggaccatctccccacaacaaaaactcctcgattacgagcttacggctaactccattcggccgtggacacaacggaggcctctacaagaatccaagacgcaaatgctcaaatggcctaatgaacaaagaaagggacaaatggcctgaacagatcaacgccatcaaatatactccacacttccacagatcgacacgcatggatgccggattcgacactctttggccgatggtacgagctggatttgcacgcagcctcctgctacatttcgtctgtgtcgtctgtgcgctgcagtgcctgtgtgcccaccacattccactcggttctgcttctgctccttcgatgggttcccgcgacggatggcggctactcctcctcctgctcggcttcctgctcgtggcgccgacttgccgcgctcgggaggcgcagccgctgccggtactggaggaagaggagggcggtgccagcatgctggcgccctcctcctgtcacgtcgaagtcccaccaaccatcagcggctctgccgctgtactcctgtacgacccgcccgctgcctctcatataaatatttacgatgcatctacgaat

SEQ ID NO: 47200 - DNA, 1428 bp, Oryza sativa
  Clone ID: PAT_MRT4530_49994C.1
atgaaattaaaccctgaaaagtgcaccttcggagtaccgtcagggaagctgcttggttttatggtgtctcacaggggtatccaagccaacccggagaaagttactgctatcctcaacatgaaaccgccaagtacccagaaagatgttcagaagctgactggatgcatggcggcgctcagccgatttgtttcgagacttggcgagcgggggatgcccttctttaagctactgaagaaaacagatgatttccaatggggacccgaagcacagaaggccttcgaagattttaagaaactcctcaccgagccaccggtcttagcctcaccacacccgcaggagccgttgttgctgtatgtatcagccacctcccaggttgtgagcacagtcttggtcgttgagcgtgaggaagaaggccatgtccagaaagtccagcgaccgatttactttgtcagcgaggtcctagccgactccaaaacgaggtaccctcagaccgagtgccaggaggatacccccgcggagaagatggagcactggaccatgcattttgacggatcaaaaagactttcgggcactggagcaggagtggttctaatttccccaactggagaaagattaagctatgtgctttggatacatttttcggcgtcccacaacgtcgccgagtatgaggcgctccttcatggactgcgaattgcgatctccctagggataaagcgtctaatagttcgaggcgattcacagctggtcgtcaaccaagttatgaaagagtggtcctgccttgacgacaacatgatggcatatcgacaagaggtacgcaaattggaagacaagttcgatggactcgagctcagtcacgttcttcgacacaataatgaagccgccgacagacttgccaactttggatccaagcgcgaggtggcgccctccgatgttttcgtcgaacacctttatacgccgacagtacctcacaaagatactactcaagttgcgggcactcatgacgtagctatggtttcagccgactggcgagagcccctcatacgattcttgacttctcaagaactcccccaagacaaagatgaagccgagcggatttcaagacgaagcaaactttatgttatgcatgaagctgagttgtacaagaaaagcccttcagggattctgcaacgctgcgtatctttagaggaagggagacaattgctgaaagacatacattctgggatatgcggaaaccatgctgccgcacgcaccattgtcggcaaagcttaccggcagggttttttttggcctactgcagtgtccgacgccgacaaaattgtgcgcacgtgcgaaggttgccagttttttgccagacaaattcatctaccagctcaagagttgcagaccatcccactgtcttggccgtttgcggtttgggggctcgacatg

SEQ ID NO: 47201 - DNA, 435 bp, Oryza sativa
  Clone ID: PAT_MRT4530_49995C.1
atggggtcggagactggctctgcctctacctcggcccaaccatcacctgatcgtagctccaaccttgacctctccccgtccaatgaccacgacagcaccgacgcctgcaccgaccctaccgccactcctcctgttggcgcgacgcacctgcccctgatctcgtcgttgcacaccgcgcctaccctcaccaccatcgccactcctctagttggtgcacaacacactcgacaccacgccgctcaaaatctgcaccaccttggggccgtccacaggtacaatgtccatggccgccatgatgagaagaggaaagtacagccgttgccagatgaaaaaaaaagcaacaccagccgtaggtttggagttgggggctacttcgtgatgttcttatcccctttgatgatgccctcactgctcggctccgatggtcttcgttag

SEQ ID NO: 47202 - DNA, 171 bp, Oryza sativa
  Clone ID: PAT_MRT4530_49996C.1
acgaagagaaatttatgataattcacgagaacggcgggcaggacaacatggagggagaaaacatgaatgctcaggaaggaacgacaagccctggctacattggagcagatgcacgacaccctaaccttcacaagaaaatctgaataccacaaggagggggaggaacaggaa

SEQ ID NO: 47203 - DNA, 283 bp, Oryza sativa
  unsure (1)..(283): unsure at all n locations
  Clone ID: PAT_MRT4530_49997C.1
atacagntaagacctagcaggggaagccgaggctntcaatgntatccaatggtctgtnattacaagatttattctagaatttcccttnnaaaaangntcaggcnccccnggnagttgacgcagagggaaggagttgttactacacaccttgtgaagtatttgtaataataaaaatctctgcctatactcttcagggcggagtggtatcataaaaactacaatatgtcaattccaaccattcctcttttatacagcaaaaaaaaanaaaaaanaaaaaaaanaa

SEQ ID NO: 47204 - DNA, 333 bp, Oryza sativa
  Clone ID: PAT_MRT4530_49998C.1
acggcgctgatggggctgcgggctgcggcggcgtggagtgtcgatggagggcaggcccgacctcgcctcctccagcctgttggaggtacaccacgaagggccttcggccggacctaccgaaaccaagaacataggtgaaaggctcagaccggaggcaagcggcaaaggtcgagaaaagaaccatatgggcgaaagccacatggcgaaagccgtggctcggaatacgcggacttcgccaggcaaaggcctcgtcagaaggccgcacgggcgaagacggtgaggcgaaagccttggcacgaaggcacgggcttcgccaagtaccgaaccccaccg

SEQ ID NO: 47205 - DNA, 360 bp, Oryza sativa
  Clone ID: PAT_MRT4530_49999C.1
atgcactggaggttgccggaatcaggatggattaagctgaaatcggatgggggatttgctgcagatgaacagatgggaagtgggggagtgatagtgagaaatgatcggggtgagtttatgggtgcgaacaggattttcttcggggaagtgttaagtgcaactcatgctgaagcgttggcttgcctcgaagcgacgcgggtgggtgcaagacttgcagcaaccagagtagtcttcgaaacggactcagttgaagttgtgagtttggtcatgaataaaagttttgatcggtttgaaattgggcctgtaatccaggagctgaagaggggaatccagtcattccaggatttcaagctcatatga

SEQ ID NO: 47206 - DNA, 6233 bp, Oryza sativa
  Clone ID: PAT_MRT4530_4999C.1
tacatagaatttacgtagttggtcaatgttccaaaaatttgctaattcgcgaccgtcgccgtctgcgattttgaatgcgcctggccgcaagacttgtgtgatcgtgtaaggtcctttccattttggtgagagtttgtttcaccctgcttgggcttgaactcgtcggaggacatagttgccgatcgaaagtatgcgtgctcggatgtgcttctcgtgataacggcggagggactgttgatagctggctgctcggacggcaactcgctcacgatgctcctcgagaagatttgcatcgatgtctcactgttcctcctggttctcgtcggaatacttctgtactcgtgtactctgatgtcgtagctcgccggggagcatggcctcggagccgtacacgaggaagaatggtgtttccttattggacgttgtcggtgtggtgcgtacggcccatagtagggttttcatcccttgtagtactatgccgtttgccctttcgacttgtccgttgctttgagggtgagagaccgaggcgaaacatattttgactcccaacccgatgcagtaatcttggaagtcggcgctgatgaattgggagccgttgtcggttatgatgcggtgcggtactccgtatctgcagaatatccctctgatgaatttgatggcgttgtcggccttgatttccctcgtgggcactgcttctatccatttggtgaatttgtcgatcgccacgaataggaatctgtagccgccctgtcctcgtgggaatggcccaagtatatctagcccccagcacgagaacgaccaagtcagagggatagtctggagcgcttgcgcgggtagctttgtgtgtttacatgtcgcatgcatctttaagggcggttggccagaaaaagccttgtcgaaaagctttgccgaccaatgtccgaccggcggcgtgtgacccacatatgccttcatgtatgtcgaggaggaggtgtctgccgtcgtcaggagagacgcatttgagaagtaccccgtttagcgcttttttatataaatcgttaccgaccatacagtagatctttgctttacgggttattttctcggcctctgtatcgtcctcgggcaactccttgctgctgatgaatttgattaattggatgtgccagtcgtctgtggtttcgatgtcagcaatggcgcgttctgcctcggtgacctccgagctgatgtcgggggtgttcgggctaacttcgccgctaacttctttcaccgatggcttcgttaggatatcaagaaaggtgccgggttcgagcggttctcgtctggacgcacgtcgtgctaggtcgtctggctcgacgttgtccttgcgatagacgtgtcggacctcgatcccatcgaacctcttctctagcttcctgacttctgcgagatacttggataactcggggttagagcatttatagtctttgtgcacctggttcgcgactagctcagagtcccctttgacgattagtcgcttggccccaagtgcggctgcagctcgtatccctgcgagtagtccttcgtattctgcagtgttattggtcgccctgaagttgaggtggattgcgtgcttgaattgatctccggaaggagacgtcaagataaatcctgcccctggtccttggctgttgagtgcgccatcgaacgccattgtccatgtttcgttgtcgccttggttgtctgatttgttgtctggcatagtccaatcggcaacgaagtcagcgagtacttaggatttgatggctgttcgcggcagaaagtggacatcaaattggcttagctcgactacccatttcgcaatgcggccgacaacgtctttgtttctcacaacttctccaagggggaaggaggatacaactttgactctgtgagcttaaaagtagtggcgcagcttccttgatgtcatgatgactgcgtaaagcagtttttggatctgtgggtatcttgtctttgcgtcatggagagcttcgctgacgtaataaactgatcgctgtactttctctctctcgacaataatgacagtgctaacggaatatggcgtggcggcaatatagaggaataattcttcagtaggttggggagcaacaagtacaggggggtttgataggtagcgcttgagtgcaataaatgcctcttcggcttcctgtgtccatataaatttgtcttgtttcttcaatagagcgtagaaaggttgtgctcgttctcccatcctagcgactaatctgcttagtgatgtcatgcatccggttagcttttgtacctccttgagtctcgtgggctaattcatgttctcaattgctttgatcttctcgggatttacctctattcctctaccatagacaaggaatccgagtagcttacccgacggtactccgaacgtgcacttctcaggattgagcatgaggcgatatcgtcggaggttgtcgaacgtttcccgcaaatcgtcaatcaatgagtcacttgtcttggttttgacaatgatgtcgtcaacgtaagcctcgtcattgttgccaagctggttgctaagtgcgccctggaccgtgcactagaaagtattcctggcggttatcagtccgaacggcatcttaacatagcaaaataccccgaaccgcgtgatgaatgatgtcttctcttcgtcctcttttggcatgctgatttggtggtagccagagtaagcgtcgaggaagctcaatagctcgcaaccggctgttgaatccaccaattgatctattcgagggagaggaaaatgatccttgggacacgccttgttgaggtcggtgaagtagacacacattctccagtttccgttggccttccgcaccatgactggattggctagccactctggatgaagtacttctctgatgaagccagctttgagaagtttgtcgagctcttctcgtatggcttgtttctggtctggtgcaaatctccgcagtctttgctttactggcttggcatcgggtcgcaccattagtttgtactcaatcacctccctggggacccccggcatgtcagacggctgccaagcgaacacgtcggcattatcgcggaggaaggtgacgagcgcgagttcagtcttgtcgagattggcactggagagtggaacgatcttgatggcaccgtccggcttcggcgtcttatttgtcttgctcactttcttgggtggctcagtcgtggcgggtgggctgggcgtttgctcgactatgtcgaggctccgcttgtcgtactgcactgctagctttgcgtttccctgaatagtgattgttcccttcagtctcggcatcttgagcacttgatacgcgtagtgaggtgcggccatgaacttcgcaagtgcagttctcccgatgatggcattgtaagctgtatcgaattcagcgacatcgaaggtgatctgttctgttcggaagttgttggctcggccgaaagtcacaggcaacgtaatcttgcccaaaggtctggatgatgattagggagtaattccatggaagggttgatcagttggtgtcaactcactttgcggatgtcccattgcgcctagagtactggcgaaaagaagattgatcgagctgccaccgtcgatgagaactcgcgctaccttgatgttccaaatagtgggttcgaccacgatcggatatcgtcgttgtggagccgccgaaaatgtgtgagacgtggaggtcggagtctggatacgcagaatccgattcgtgaggagccgtctcttcgttcttctcgacaacgcgtactcgcttgcctttttcaaacgccatgtgcttctcgagcgactttttgaaaacaaggcaatcttccagagaatgtctgtccgtcttgtgtatggggcaccaagatttctttgtgtcgttgccttgtgggtctgggcgcttgggagggttcgcgtattctgctgcgaggacttcggcttgagctttccttttcccatttttgcgatttttcttcttgcttgactcagatgcgtctgtggctgatttcttttctcccccggtcttcggcttgtcgttcttgcgtcttaccgcaacgtccacatgggcgcatcgctcaacgatctcgaatagcctccgagtggttgtgatgcgtcttgtcgccaattcctgggtagtgtagcgatctctaacaccagatttgaaggcgcggattacagaagcgtcggtgatttcaggaattgtgtttctgcattcgttgaagcgtcgaacatattccctcaatgattcacctgagttctgtgtcaacgcgtgtaggtcgtcttcgatcgcgtggcgcttgtacgttccttggaaattggcgacgaattgttgccacaggcctgcccacgaagagattgagtagggaggaagatgcatcagccatgaacgtgcagaacccttcaacgtggttggtaaatagtttgctagcgcgttgtcgtctgctccggcaacataaagtactgtggagtagacttgaaggaattcttctgggtcggtgctcgcatcggacatcacgtagggaacgaccgaaagccctgcacccagcgttgggggcggtgggttgtcggtggtcgtgtgtcctttgtggatgtctgtctgacgatgaggaggacgcagatgatgatgatgacgatgggtcgcttggttccagcgtacgattacgaggatgacagcctggatctcgggaatcctgtcgttgtctctcgctgttgtctcggcgccgatctccattatcgtcgtcgttacggcggcggccatgaccagtattgtctggcccccgtcgttcgcgatcgttgcgatcgtggtggttgtcatgatcccggtcctcgtttgagcggtctcctcgatttccgttatcatggcgccgtgaagagacatgacgccgagagcgatttacattgtctcgtgtgcgtcgtgcttctcggcggccgttgatttgatctcggagatcgccagcgccgtgaggtggaggagtggctcgttgaggtgattccctccgttccggatcttcaccattggcgtcgccagttggcggctgatcttggtgcgctgcggtagcggcttcttcaaacgcgttgctgaggttggtcactgattcccgtagtcgttctgtccaacgctcgaggtcatcgttcagaacgggatcgtaaggagtttccctcagtatagcttgaatggccctgatgtgttgggctggagtagtcgattgattcgccgcttctgcgttggcttgcgctgacgtgccgacgtcatcgatagccaatacctcccgcggcacgctcgttgtcgatgacccatagtcttcgagaagatgtaagaccgatggttcgtgaggatcgatatcgattaccccaacgaatcgatctgaggccagagtcgctccttgttccttgccgttatccctgacggggacgtatgacttaggagacggatctttcatggcgccgaggaagactttgcagctcgagaggtcgtgattatttgtcttgtgaataggacaatagacatcccgagttggagaagtacgctgaattccacgttctttgcaggcgcgaatttcagcacggacgttgaggaaaacccagcaatcttgcagggtgtgtttcttggttttgtggatttgtggtttcggaagtcatttttgccggctcgtggttcatgtcggaaggacaaggtttggccgtatcagaatccttcccgagcttggatgtcgtcgatgatccgttctccgttttgacgggtggatttttcgacatggagtcgccttggtttgtagccactgtgttctcgtttccggtcattggaggaccagttgagatcggcgtcgtggtgtaaaccaggaagacaatttcaccgacttgagtccataccagcattgttgaagcagggagcgcttggctgaggctggtgttgacgttgttgtcgacgaagctggatgacatagtagtagaaccttgagtatcaagtccccctacctggcgcgccactgtcgacgggtgatacccgtagaccggatatagagggtattggggtacgttggtacaaggattttgtaggctgtgtgggttgtgttggctctaagattcaatgatctatgccctccccgggggggtcccttttatatcacagatctagaggtctccaagtaggactcagagatattagacccaatacgatatatcgacgacccagttctgtccgagaaggactcttcccatctgtagatttcgtgaa

SEQ ID NO: 47207 - DNA, 598 bp, Oryza sativa
  Clone ID: PAT_MRT4530_499C.1
tccccgggctgcaggaattcggcacgagtctatcttagctagcatcagaggtttgaggctgcagcaagctagatgaatctatttcatcagattgggtcattagccacctgatcttgctttctcaactgcaaattataggcctatgattgtgttgtgccctagtactaggagcctgcacattccttcctatgcttatagtccatttctttattgcacatgcttatatgaagagcaatgttttatgtaaagtcagaaaaaaatattctcaaaaaggccatgcacaaaatatgggatttgtcgttactaaaaaaggcatacagttaaggaagatatgagaacaggaaaggatatattgtgctttacgtgttctccatttcattcatgcttaactgagtttacataatcggtatgctcactcctgtactactgctgttaagaggaggatacagatggcagtagccaagaattcttgtgactacagttccttgcgatcgggtttcttattgcagattcagttaggtaggatctcctgattcagcacccactaaggtcaattcactgaacaaagcaggcaaatattattcactgtaataagaag

SEQ ID NO: 47208 - DNA, 330 bp, Oryza sativa
  Clone ID: PAT_MRT4530_49C.1
cacgtcctgccctacttgccgggactccattctcttcgtccatggagtcgtcgccggcggccgaacagagctagtaatataatttcttgaacagaagaggtctaaaatgtaaatagaatataggtggtaaagtactccaaaattgggattgcgtaaatgcaagggattggacacaatgtttgaagtgtctctgtcacttggattatccatctgtttagctgtttctatgagttttctcctttaatttgtgtgctagcacatgatatttcccccaagattcgctgttcgtttgttctgggcaaaataaaaataaaatttcataaaaataat

SEQ ID NO: 47209 - DNA, 372 bp, Oryza sativa
  Clone ID: PAT_MRT4530_4C.1
acgaaaagttaaagacgtttgaagtggaggatgattgtacatcacaacgtacaagttggtacgacgtaatttattactacatcagaaaagcaccggaaagaaattacatatctcgcggcacacaccgcgggagatctagaaaccaaacagaaagctactaggtgcatgcgtatacccgcgagcttaattacttgtatataacgatcatcggtaaatatcaacaagccacatgaagagcttacagtcgtacgtccgtcttcaatgcgtgcctgccgttgtcgttgtggccgccttcttcatcacaaggcactgtcgtcttctggcctgcagggccggcgccagtagctggaccacccaccgtaaactttttga

SEQ ID NO: 47210 - DNA, 237 bp, Oryza sativa
  unsure (1)..(237): unsure at all n locations
  Clone ID: PAT_MRT4530_50000C.1
ccccccntaagagcaagatcctttttaaaaagacctccccccaccctnttcnacccctcncattatctcatataccatataaaaaaacatctaaccagccttccctacaacctctttttacatattacaacaaaacttcacatcaaatacactcctttttctccattctaaactctcaacatttccacaccaaacataacttattcaactatcaacttatctcctcactctacatca

SEQ ID NO: 47211 - DNA, 714 bp, Oryza sativa
  Clone ID: PAT_MRT4530_50001C.1
atgcagctgttccatctcgtcgcggcgtggctgttcccatgcgcggtgtgcgcgacgacgacgatgacgacgcccgcggcggcggacgatggcgagggcggcagggcggccgagccgccgccgatcggagaccggctccagctcgggacgtcgtcgtctcggcagcagcgcagccgctccgcctcgccgccgtgcttcggcgcccgcacgcgtcggcagacagcggcggcgacaaacggcgaggcagtggtggccaacgacgagccgacgacggcggagcaccatccgaggaagagcgggcgccgaccggcgcccgccaggaacgccattgcaacggacgcgcccgccgtctcgtcagcctcatactcctcccccacgtcctcacctccctcctcgctccgcgaccggctccggctcggcctcacggcgtcgccgccgcgccgcgcgcacgacggcagcggcatgtcgcgctcgccggaggcggagaagggcggcgcggtcggaggctacctccgcaggatctccaagcggctgatgacgacgcgcggcgccaccgccgccgcggacgcggcggcgccgtcggccacaatgataccccgctcctctccgctcgtgggagaggggaggagaaaaggcgggagcgccatcgcgacggaagatgaaatccgagctttcgtcatcgcgaatggttcgcgcgcaattcccttggtctaa

SEQ ID NO: 47212 - DNA, 1500 bp, Oryza sativa
  Clone ID: PAT_MRT4530_50002C.1
acgaggctacgagtaccaattgagaaggctccaaacagcttatagtttggatggtaaacaatattaatagttttacacatgctaatatacattcgtattaatccaaatccttggcgaggaagaactaaaaccctatgcataaaataacaatagcaataaacagctctggaggagtaggtcaagatttatgggaaaacccgtatggaattttgaaaccttttgtagcatcctaaaagttgtggtagcaccctacaaatttacaacgttccacatctggtggatgtaatgaatgaaaataatgaatcggaagaatatgtaagcttgttagttaacacaattactacttgacaagattgaacctcagaggctttatacaattgtgacttcacaaaaggcacttgataaaatcttgaaagagaaccttgccctgctccatgtttcttacggatggatagaaacttcaattagaaccatgacctgacattttcttctctctgggaggtatcttcagtaaactcttcatcgtgtcatatgcggtaaaaccaatagccacagagggtaccaccttgatgtaattgaggctcaagccagcaaacaattgcctccatccctgcgtttgtttgatgatcataagaccttggaatgttccccttatctgtggcccaccaaatttatcgtgatattgttgactctgaacctgcatctgccttcttacaacatctagtgggtaagttagagtctgcccaaataatccagcagcagcaccacaggacaacttcaatgtgacagaatttttgtaatcttcaggtacatgtgccttcagtccttcgtatatgtagaatttaagaccagcataaggaagtattcccatgagcgttggacctactccacgatagagagctcgcactccaccttctgaataaacacctcgaaaaacatcctttattcctccatattttggttgaaagtttgtcctcttcaaaccactactgatttggtctgaactattgacctggaaggcaagtttagtcctagccagatccaagggataagtacacaacactgcggttcctccagatgctgaaccagctaaaaggtctactaagggtcctgtcccaagtgaggggcagttattcaagatccaacacctgtatcgttcatacgccatataatgtaatgcagcataaggaacaattcttaatacactagcaccatttcccttgtaaaagcccaaaattccatcatgttgttttaatttcttcaatgatttgaggacgccaagagaactgaattcatttgtcctagtctgtagcaatatcttgaggcgctcgagcggcgcgatggcggtcttggagaaggcgccggcgacgcccccggcgatcatctccttggcgaagacgggcaccaggtcgagcacgcagaggtcgaccccagccgctgccacggccgccgagccctgcgagggggtgcccatgccgaattcggcacgaggcctcgtgc

SEQ ID NO: 47213 - DNA, 404 bp, Oryza sativa
  Clone ID: PAT_MRT4530_50003C.1
gggggggaaaggggtaatttccccaagggggacaacaacttttgagggccaggggggggggggtcccccccccccccgggggaaatacatcatttttaacggaaaagaatcgggaacttcaacgggaggaaaaagaccctctttttgacccccaaagggggtttccccccgggacaaaaagcccaaatccaaagccccccaaaaggggggccaaaaggggaaaaagaagaaaaaaaaaaaggggaaacgaaggaccccccatgggaatcccaccccggggggacgggggttatgagcggttgaccgggctaactccggagggggaccggggcctcgggccccaacgagccgggggcctgggccacccccgggccggggcctctgggggcctcccggggggggcc

SEQ ID NO: 47214 - DNA, 403 bp, Oryza sativa
  unsure (1)..(403): unsure at all n locations
  Clone ID: PAT_MRT4530_50004C.1
gngttagcatacaagcgcgcccaccacaacaaccactacgacggtgccattaacaacatgcaccgtgacgaggaggagcgctactacccgncgagccacgcgccgctccgccacgcgccgccgacgcccatcacgccgcgccccgaggtggggaggaggcagaaggcgacgattcacaagcagaacgagcacagtcagggggggagaggcacaggtcgcgggcgcccgatagacaagggaggaaaaaacgacgcttcgccggcgagctcgcgcaccccaaggtctccgctagagactgcagcacatacagggtcaactacctctcccagagtgatgagctggtgaaggcgaagaccgaggctagggatgctgtgaagccaagcatgtgaagaaactaaggcac

SEQ ID NO: 47215 - DNA, 252 bp, Oryza sativa
  Clone ID: PAT_MRT4530_50005C.1
atggggaatacagagcttactgcgtcgacgccatcgtggaaggaattgaagaaatcggcgccaacggggagggttgaggccggccaggggcaccgcggggcccccgccgccggcagccaggaattggccttcgatgccatcgaggaaggaattgaagaagttggcgccgacggggaggggtcgcggtcgatgccgccgccgccggcaaccagggcagcatcggcatcggcgtcggcgtcggcgtcggcgtag

SEQ ID NO: 47216 - DNA, 833 bp, Oryza sativa
  Clone ID: PAT_MRT4530_50006C.1
atgaagcgtccaccgccacgcgaagacggcgctggaagcggaggaggagacggggccaagaaagggaaggggaggtggggcggcggagggaggaggcggaacgagcagcggctggggagcggcggcggcggcgccctgtccctcgccgccttcgcctacgccaagtccaggaacaccggctacaacccggccctcatcaagaagcagaaagagttctacaagaatgctaaattgattagcaagtacaagaggtcaaagaagcaacaaaatcagtcaagcaatcctccaccatttccaattccaaaggaaggaggtgatgatgcaaacaatgcatcaaagctgcatagcaagaagaagaagcgcgttgcaccaagcttaaacgaagagtatgagaaaaaacgggcagaggatgagaaggcaaagaaggagcgggaagcgataattcaggcaaagagggaggagcgggagaggtctgaagcaaggcggagagatttaagggagaagatgttcaagaaaacaagatctgggcagcctgtgatgaaatacaggatccagcatctgttggagactgcattagaaagctcaaacaagtaaatgttgctaccaaaatgctgtactgattgctataaccaattttgtagatcatcagtgacctgtttgtttcaaaaaaaaaaaaaaaaagcagccctctaccatgtaaatctttggtgattttcatttccatgctgatggtgcacgcacttttggtttctctctcatacgatgcaagatgattggataataaggaaaccagagatgacctggattgcccagtgaaaaaaaaaaaaaaaaaa

SEQ ID NO: 47217 - DNA, 318 bp, Oryza sativa
  Clone ID: PAT_MRT4530_50007C.1
atgcggaggagaggcggcgactcggcgacgaggagggccggcggtagctgcggctgcggaggagcggcggcttggcggcgcgacgcggagggtcgccgctggcggtggatgcggaggagcggcggtggaggggcagctgctcgacgacgaggagggctgccgctggcgacgacgggcggcgttggctcggtgacgaggaggaccaccggtggcggcttggcggtagctgcggaggggcgacgttcgctcgtcgacgaggacgacggccggcggtggcggtggctcggctacgacgactgccggcgccagcacgcgtga

SEQ ID NO: 47218 - DNA, 198 bp, Oryza sativa
  Clone ID: PAT_MRT4530_50008C.1
atggatctcggcggcacaaatcgagtccaagagctccccgacaacgacacggagtgggaggctgcagtcgccgtcaagctcatgtgcagcggctacaaggaacttgcctcttcgttgaggaacaaaaagttctgcaaaggtgcaagggtccacaccttctctcctccacgacatcatgaagtctacgtggtgggatga

SEQ ID NO: 47219 - DNA, 873 bp, Oryza sativa
  Clone ID: PAT_MRT4530_50009C.1
atggtcatcgctgacgtcagcaagggcgcgcacacaaggctggcggcggcggcggccgggaccaaagcgacggcggcacacaggccgggcgtcgcagggagcggcggcgcgcagcgcgggaagcggcgagaggaaacgggggcagtgagggagagggaggtggtggagctcaccgaggggcacggcgacggcgagagcagccggcggagggaggcggcggcgctccacaggtcgacaaggaggaggggctcccagcggcgaaaggcggcgaccgggcggcggatggggaagagcgggacgcggcgaagccggcgatgcagccgatgcgtcgcagcggcagccggggtgaaggcgaacggcgatcggaggcggaaaaaggcggccggtagggtggtatggcggggaggtggttcaggtggtggaggggaaaaagggatcggtggccgggcttgcccgcgcggcggcgaagccggctgcggtggtggcagggcgcgggatcggctcaggcggcgacgacatgcgactcgggtgcatggtggaaggggagtttcggcggaggtttgtgcaaatggagcggtggcggatgtgcggcgaggcatggcgaagccggtggtgctcggggaggagaaatcgtggccggacgtggcggatttgaagcggcaacggccggcgacgtgggcgacatcgtgggcgaagtggggctcgatttggcgccaaaaattggggaaaagtgggggatttggtggaggaggtggaggggaaccgattttatgcggtttgggcgcgagggcgcgagcgggaggagccggaatcggcggcgacgtgggtggcaatggcggcaatggcggtttcggctctagaggccgaaggtag

SEQ ID NO: 47220 - DNA, 1029 bp, Oryza sativa
  Clone ID: PAT_MRT4530_5000C.1
atggcgacggcgaggttaggctcggccgacggcggcgcggccgcggcgacgccggagatggaagcctccccccgcgtcgctctcgcgtcgggcggctcgggggcgaaaaaccctagccgcctgcgccttctctccctccctccccccacctcgccgccgctggagcccgccggcggcgaagccggcagcgggcagggaaggcggcggcgaggccttcttctcttcgtagcgtctccctcctcggcgcgaaggacgaagacgacgaagctccctaccggcgtggtccatggcggctacggcggcgaggtggagaggaggcggcggatccggagcccctatggccggatccggcccttcctcgcctggatctgcgtggcggcggcgcgacggcatgtggtcgtggtggcggctgacggcaaggcggcgaggcggcggccggctacggcgaggccggcccggcacgcgtgcataggcggtggacggctgcggctcggcgtggaggcggctccacagcctgcccggagcggcagcggcgcccccgctcactcgctcggcctggctgcccggcgccagcccatggcgtggtgggtcgtccaggcctcggtggcggctcggcgtggtggccgggcagccgggatgccgtcgcggtggccaggtgaggcgcggtggccggacttcgggggcgctggcgggtggcgccggtccggagcagcagcaccaccggtggccaaatggcagtgcaaagggagctggcggcggtgggtcgtcttcctcgttgccgtgggggaagctcagggtgccgaagtaatgccacctagttccgggttctccttcggccaaatctggcgaggcggccggcgggtggtggaacggaggagtcctgggccagctctcaggggtggtggttcgttgaagtcggccgacggaggggcgtcggtgcggcgaaagcctagtctggtggttcaccgggccggcagcggctacgtcttcgggcgtcgtaatctccttggagcattgtcgagggcctag

SEQ ID NO: 47221 - DNA, 3000 bp, Oryza sativa
  Clone ID: PAT_MRT4530_50010C.1
atggccgtcccgcactacacatacatgatgatgaagatgcctggtccccgaggagtcctaaccctacggagtgacatcaagcaagctgtcacatgcgacaaggagagttgcgacatggcccaaacccgcgagatggcatctgcccgagagaaaatccgactggctgcaaccacggaaagcgcgctcatcacctttcttcaaaataataaagatatctttgcgtggaaaccttcggatatgcccggtattcccagagaggtgattgagcactccttacatgtcaaagaagacgccaagcctattaaacaacgactccgccgatttgcacaagacaggaaggacgcgatcaaggaggagttaaccaagctgttagcagcaggcttcatcaaagaagtccttcatcccgactggctggcaaacccagtcctggttaggaaaaagacagggcaatggcgcatgtgtgtcgattacaccgacctcaacaaatcttgcccaaaagatcctttcgggttgcctcgcattgaccaggtagttgactcaaccgccagctgcgagcttctcagttttctggattgctactcggggtatcatcagatccgactgaaggaatccgactgcttgaagacttcattcatcacgccttttggggcatactgctacgtcaccatgccgtttggactaaagaacgcaggagcaacctatcaacgcatgatccagagatgcttctcaacacagatcggccgcaacgttgaagcctatgtggatgacgtagtcgtcaagaccaagcaaaaggatgatctaatttcggatctagaagaaaccttcgcgagcatccgcgctttcaggatgaaattaaaccctgaaaagtgcaccttcggagtaccgtcagggaagctgcttggttttatggtgtctcataggggcatccaagccaacccggagaaagttactgctatcctcaacatgaaaccgccaagcacccagaaagatgttcagaagctgactggatgcatggcggcgctcagccgattcgtttcaagacttggcgagcgggggatgcccttcttcaagctactgaagaaaacagataatttccaatggggacccgaagcacagagggccttcgaagatttcaaacaactcctcaccaagccaccggtcttagcttcaccacacccgcaggagccgttgttgctgtacgtatcagccacctcccaggtcgtgagcacagtcctggttgtcgagcgtgaggaagaaggccatgtccagaaagttcagcgaccaatctacttcgtcagcgaggtcctggccgactccaaaacgaggtaccctcaggttcagaagctgttatatggtattctaattactaccaggaagctatctcattactttcaaggtcactcggtaacggtggtcacatcatttccactcggcgatgtattgcacaaccgcgaagcaaatgggcggattgctaagtgggctttggagttgatgtctttggacatatcattcaagccccgcacttcaatcaagtctcaagcgttagctgatttcgtcgccgagtggaccgagtgccaagaggatacccccgtggagaaaatagagcattggaccatgcattttgacggatccaaacgactttcgggcactggagcaggagtggttttgatctccccaactggagaaagattaagctatgtactttggatacatttttcggcgtcccacaatgtcgccgagtatgaggccctcctccatgggctacggattgcaatttccctagggataaagcgtctaattgttcgaggtgattcacagctggttgttaaccaagttatgaaagagtggtcctgcattgacgacaacatgatggcatatcgacaagaggtacgcaaactggaggataagttcgatggacttgagctcagccatgttcttcgacacaacaatgaagctgccgatagacttgcgaactttggatccaagcgcgaggcagcgccatctgatgtttttcgtcgaacacctttattccccgacatgtccgacgccgacaaaattgtgcgcacatgtgaaggttgccaattttttgccagacaaattcatctaccagctcaagagttgcagactatcccgctgtcttggccgtttcgcgtttgggggctcgacatggttggccagtttaaaaaggcagtcggcggttacacgcacctcttcgtggccattgacaaattttccaagtggatcgaagctaagcctgttgtcacgattacagcagataatgctcgcgatttcttcatcaacattgtccacagattcggagtacccaatcggatcatcaccgataatggcacacaattcaccggcggagttttcaaagacttttgtgaagactttggaatcaagatttgctatgcctcagtagcacacccaatgagcaatggacaggtggagcgagctaatggcatgatacttcaagggattaaagcgcgtgtctttgaccggctaaaaccctatgccggcaaatgggtgcaacaactgccatcggtactctggtccttacgaactactcccagtcgggccaccggccagtcaccttttttccttgtctacggggcagaggcaatgttgccgagtgaagtcgagttcgaatctttgcgcttccgtaatttccgtgaagaacgctatgaagaagaccgagtggacgacttgcaccgactggaagaggtccgcgaagcagctttgattcagtcagctcggtacttacaagggttgcgacgttatcataatcgcaatgttcgatctcgtgcctttctagtcggcgacctggttttacggaaaattcaaaccacacgagatcggcacaagttatctcctctatgggaagggccatttattatctctgaagttacccggccaggttcatatcgactcaagcgcgaagacggcactctcgtcgacaactcttggaacattgaacatcttcgtcgtttctacgtttaa

SEQ ID NO: 47222 - DNA, 3513 bp, Oryza sativa
  Clone ID: PAT_MRT4530_50011C.1
atgggttccgtctccggcatcgacgacctcgtcttccctcccgggcaggcgtttcggttcggcagcctcgacttcatcaccaacgacttcggcaagatctctctcctcgactcagaatcagaccagtcgggagagagccagatctcagccccgtttggtgttccaaacgcggctaagatctacttcaagtccatctcgatcgagtcggcttcaaaccactcggacgagatcgcatcttcctcaacgtcatcagatcgagatgatggggcctacccaccgatcctaatgaagctccccgacgatttggcggctgtcttcaccaccacgacgtcccctccccgtgagcctaggcggagccacgaccaagatcttgacgacttcgacgagagcctagaagataactacacccctctctatttcggcgtctttatggccgataacgagacggaggagcaacgccaagcccgagaagccgaagcgcgacgtgaggccgaacgacgccgactggaggaggagcgtcaagcacaggagcaagaatggctgcggcgcgagcaacaggagtgcgagcgggctgctaaggaggctgaagaccgacggcaacgagccttggatgcggggcgccgagcacgagatcttatcggccagcaagatgttgaggggacactggttttccgcaccccacaacagaatgttgttgccgcaatcaccctcctcgacaccctcctcaaagagaacgagctcaatcaatctgatcacgtggtcaacatcttgaaccagaccaataccatgatcgctgcttcggttccagttaactctgaaagcgttcgcacgccgactggcagccgagtcccccatcttcgatctcatgattactgccagccaagcctcagcatcgccggcgcaagatctaatcgccggagcaggggacacgacgagcgatctatccactcgccccccgatcatcacagggagcgccgagtggaacgacctcaccgtcgccccgtcgatcttcgcgacacgatcatacaacgccgagcagcccgaggccaccatcattcaccggatcgctacgacgacgacctagatggagttgccgccttcaccaacgacctgcgtcgagtggattggccggccggctttaagccgactggaatagagaagtatgacggtaccaccaacccggaatcatggcttaccgtctacggtctcgcaatccgcgcagcaggaggagatagcaaggccatggcgaattatttaccagtggctttagcagattccgcccggtcctggctccatggattgccccgtggtacaattggatcttgggccaaattacgcgaccacttcatcgccaacttccaaggcactttcgagcgccccggcacacaattcgacctttacaacgttattcagaagtccggagaatcccttcgagattacatccggcgattttctgaacaacgcaacaagatctccgacattaccgacgacgttatcatcgccgcgttcaccaaaggaattcgccatgaagagttagtcggcaagttcgggcgtaaacctcccaaaaccgtcaaacttatgtttgaaaaagccaatgagtacaccaaagctgaagacgccgtcatcgcatcaaagcagtctggctccaattggaagcaaaaaaaggatacgccggctacgggagggggtggaagtaacaaccacaaggaccgcaagcgtaagcctgaggaacttgttgcaaccactactcactcttcccgacaacgttcgtgcgtcaacacgtttgacaagatcatgaactcccaatgtccgcatcatcccaactccaaccacgtggccaaagattgttttgtctaccagcagttcgcggaaaaatacgccaagactactcggaagaactccgatgaagatcaaaagtatgaggcgctccttcacggactacggattgcagtttccctagggatcaagcgtctgatagttcgtggggattctcagctagtcgtcaaccaagttatgaaagagtggtcctgccttgatgacaacatgacggcatatcggcaagaggtacgcaaattggaaaacaagttcgatggactcgagcttagtcacgttctccgacacaacaatgaagccgccgacagacttgccaactttggatccaagcgcgagatggctccctccgatgtattcgtcgaacacctgtatgagccgaccgtacctcagaaagaaacgactcaagtggcggatactcaagacatagctatgattgaagccgactggagagagcccctcctacgatttttaacctcccaagagctccctcaagacaaagatgaagctgtgcggatttcaaggcgtagcaggctttatgttattcatgaagccgagttatacaagaaaagcccttcaggaattctgcaacgctgcgtatctctagaggaagggagacaactgctgaaagacatacattctggcatatgcggaaaccatgccgccgcacgcaccattgtcggcaaagcttaccggcagggttttttctggcccactgttgtgtctgatgccgataaaattgtgcgcacgtgcgaaggttgccaattttttgccagacaaattcatctaccagctcaagagttgcaaacaatcccactgtcctggctgtttgcggtttgggggctcgacatggttggcccgtttaaaaaggcagtcggcggttacacgcatctctttgtcgccattgacaaattctccaagtcgattgaagctaaaccagttgtcacaatcacggccgataaagttagagattttttcatcaacattgtgcataggtttggagtgcctaatcagattatcaccgataatggcacacaattcactggcggagtttttaaggacttttgcgaagacttcggaattaaaatttgctatgcctctgtagcgcaccccatgagcaatggacaggtcgaacgagccaacggcatgattcttcaagggataaaggcacgagtttttgaccgattaaaaccctacgctggaaaatgggtggaacagctgccatcagtactttggtctttgcgtactacccccagtcgggccacaggccagtcaccttttttcctcgtctatggggcagaagcgatgttgcctagtgaagttgaattcgaatctttgcgctttcgcaattttcgtgaagaacgctacgaagaggaccgagtggatgatctgcaccgattggaagaagcccgtgaagcagctttaattcaatcggcccgatatttacaagggttgcgacgctatcataatcgcaacgtccgatcacgagcttttctagtcggcgacctggttctgaggaaaattcaaactacacgagatcggcacaagttatctcctttatgggaagggccattcataatctctgaagttactcggtcaggttcttatcaactaaagcgcgaagatggtacacttgtcgacaactcttggaatattgaacatcttcgtcgtttctacgcttaa

SEQ ID NO: 47223 - DNA, 6015 bp, Oryza sativa
  Clone ID: PAT_MRT4530_50012C.1
atgggtcccatctccggcatcgacgacctcgtcttcccacccgggcagacgtttcggttcggcagcctcgacttcgtcaccaacaacttcggcaagatctctctccttgactcggaatcggaccagtcgggagagaaccggatctcagtcccgtttggattcccaaacgcggctgaaacctacttcaagaccatctcaatcgagtcggcttcaaaccactcggctgagatcgcatcttctccaacgacaccagatcaagatgatggggcttacccaccagtcctgatgaagctccccgacgatttagcggccgtctccaccacgacagcgtcttcatcccgtaggcctaggcggaagtcggcttcaacaccgatttcgcctagcttcagggaagtcggcgtcatcctccaaccactcggcacggtttcgacggatcagctggatgactacaacagctctcccaccgtcgactcacgtcctactgacattgtggagtacgacgaatttagttctcgctacaacgacttcgacgacttcgacggaagcctagatgacaactacacccctctctactttggcgttttcatggccaataatgagacggaggagcaacgccaagcccgggagaccgaagaacgtcgccgactggaggaggagcatcaagcacaagaacaagaacggctacggcgtgagcagcaggaccgtgagcggaccgcgaaggaggctgaggatcgacgtcatcgagctttggaagcagggcgccgagcgcgtgatctcatcggccagcaagatgtcgaagggacaccggttttccgcacccctcaacagaatgcggttgccgcgatcacccttctcgacaccctcctcaaccaaaacgagctcaatcaatccgaccacgtcgtcaacatcttgaaccagacgaagaccatgattgcggcttcggtcccagttaactccgaaagcgtccacacgccgactggcagccgagttccccacttccgatctcatgactaccgtcatccaagcctcagcatcaccggcgcaggatccaaccgcaggagcaggggtcacgacgagcggtctgttcactcacctcccgaccttcgtagggagcgccgagtggaacggcctcgctcaccacctcgtcgccgccccatcgatcttcgcgacacgatcatacagcgccgagcagctcgaggctaccatcactcgccggaccgccacgacgacgaccttgacggagtagcagccttcaccgacgacctgcgtcgagtggattggccagccggcttcaaaccgactggaatagagaagtatgacggcaccactaaccccgaatcgtggcttaccgtctacggtctcgcaatccgcgcagcaggaggagacaacaaggccatggcgaactatttaccagtggctttagcggattccgcccgatcttggctccatggattgccccgtggtacaattggatcttgggccgaactacgcgaccacttcatcgccaacttccaaggcaccttcgagcgtcccggcacacaatatgatctctacaacgtcattcagaagtccggagaatcccttcgagattacatccggcgattttctgaacaacgtaacaagatctccgacatcaccgacgacgtcatcatcgccgcgttcaccaaagggattcgccacgaagaactagtcggcaagtttgggcgtaagcctcccaggacagtcaagctcatgtttgaaaaagccaacgagtacgccaaagctgaagacgccgtcaccgcatcaaagcagtcgggtcccagttggaagcaaaacaagggtacgccggctacgggaggaggtggaagtaacaatcataaggaccgcaagcgtaagcctgcggaacttgttgcaaccgccagtcactcttctcgacagcgttcgcgcgtcaacacgttcgacaagatcatgaactcccaatgcccgcaccatcctaactccaaccacgtggccaaagattgtttcgtctacaagcaattcgcggatcaatacaccaagactgcacggaagaactctgacgaagaacaaagcacgtcgaggaagaaggacgacggcgacaccccggcaggttttcaagatcaccgcaaggagctcaaccatatcttcggcggccccctggcttatgagtctaaacggaagcagaagttgactgaacgggagatcaatgctgttcagcccgacacgccccaatatcttcgatggtcagagatcgcaatcaagtttgaccgctcggatcatcctgaccgagtggtccacccggggcggtaccccctggtactagacccagtggtccgtaatgtcaagcttcgcagaaccctcatcgacggtggcagtgcactcaatatcctcttcgccaagaccttggatgatatgcagattcctcgctccgagttaaaaccaagcaatgcgccttttcacggagtgattccaggattatccgcaactccactcggccagatcaccctcccggtcactttcggcactcgggaaaactttcgcacagagaatatcagcttcgaagtcgccgatttcgagacagcttaccatgccatactcggacgcccggcgttagccaagttcatggccgtcccgcactacacttacatgatgatgaagatgcctggtccccgaggagtgctatccctacggagtgacatcaagcaagccgtcacatgcgacaaggagagttgcgacatggctcaaacccgcgagatgacgtctgcccgagaggatatccgactggctgcagccacggcgagcgaaggagaaatacctgctaccaagacttcaaaaagtggagaaaccgaagccaagactaagaagattcccctagatccctctgatcctactaaaactgctgaaagcgcgctcatcacctttcttcagaacaataaagatatctttgcgtggaaaccatctgatatgcccggtattcctagagaggtgattgagcactccttacatgtcaaagaagatgccaagcctatcaaacaacgactccgccgattcgcacaagacaggaaggatgcgatcaaggaggaattaaccaagctgttagcagcaggcttcatcaaagaagtccttcatcccgactggctggcaaacccggttttagttcggaagaaaacagggcaatggcgcatgtgtgttgattataccgacctcaacaagtcttgtcccaaagatccttttgggttgcctcgcattgaccaggtagttgactcaaccgccggctgtgagcttctcagttttctggattgctactcggggtatcatcagatccgactgaaggaatccgactgcttgaagacttcattcatcacgccctttggagcttattgctatgtcaccatgccgttcggactaaaaaacgcaggagcaacttatcaacgtatgatccaaagatgcttctcaacgcagatcggccgcaacgttgaagcctatgtggatgatgtagtcgtcaagaccaagcaaaaggatgatttgatctcggatctagaagaaaccttcgtgagcatccgtgctttcaggatgaaattgaaccctgaaaagtgcaccttcggagtaccgtcagggaagctgcttggctttatggtgtctcataggggcatccaagccaacccggagaaagttactgctatcctcaacatgaaaccgccaagtacccagaaagatgttcagaagctgactggatgcatggcggcgctcagccgatttgtttcaagacttggcgagcgggggatgcccttctttaagctgctgaagaaaacagataacttccagtggggacccgaagcacaaaaggccttcgaagatttcaagaaacttctcaccgagccaccagtcttagcctcaccacacccgcaggagccgttgttgctgtacgtatcagccacctcccaggttgtgagcacagtcttggtcgttgagcgcgaggaagaaggccatgtccaaaaagtccagcggccgatttattttgtcagcgaggtcctagccgactccaaaacgaggtaccctcaggttcagaagctgttatatggtcactcggtaacggtggtcacatcatttccactcggtgatatactgcacaaccgcgaagcaaacggacgtattgctaagtgggctttggagttgatgtctttggacatatcattcaagccccgaatttcaatcaagtcccaagcgttagctgattttgtcgccgaatggaccgagtgccaggaggatacccccgcggagaacatggagcactggaccatgcattttgacggatccaaacgactttcgggcactggagcaggagtggttttgatttccccaactggagaaagattgagctatgtgctttggatacatttttcggcgtcccacaacgttgccgagtatgaggccctccttcatggactacggattgcaatttccctagggataaagcgtctgattgttcgaggcgattgacagttggttgtcaaccaagttatgaaagagtggtcctgcattgacgacaatatgatggcatatcgacaagaggtgcgcaaactggaagacaagttcgagggactcgagctcagtcacgttcttcgacacaacaatgaagccgccgacagacttgccaattttggatccaagcgcgagacggcgccctcagatgttttcgtcgaacacctttatacaccgaccgtacctcataaagatactactcaagatgcggacactcatgacgtagctatggttgaagccgactggcgagagcccttcatacgatttttaacttctcaagagctccctcaagataaagatgaagccgagcggatttcaaggcggagcaaactttatgttatgcatgaatctgagttatacaagaaaagcccttcaggaattctgcaacgctgcgtatctttagaggaagggagacaattgctgaaagacatacattctgggatatgcggaaaccatgctgctgcacgcaccattgtcggcaaagcttaccggcagggttttttctggcctactgcagtgtccgacgccgacaaaattgtgcgcacatgtgaaggttgccaatttttcgccagacaaattcatctaccagctcaagagttgcaaactatcccgctgtcttggccgtttgcggtttgggggctcgacatggttggcccgtttaaaaaggcagttggcggttacacgcatctctttgtggccattgacaaattctccaagtggattgaggctaaaccggttgtcacaatcacagcagataatgctcgagacttcttcatcaactttgtgcatagatttggagtgcccaatcggataatcactgataatggcacacaattcactggtggagtttttaaagacttttgtgaggactttggaattaagatttgctacgcctcagtggcacaccccatgagcaatggacaggtggagcgagctaatggcatgatacttcaagggattaaagcgcgtgtctttgaccggctaaaaccctatgccggcaaatgggtgcaacaactgccatcggtactttggtctttgcgaactacacccagtcgggccacaggccagtcaccttttttccttgtctatggggcagaagcaatgttgccgagtgaagtcgaatttgagtctttgcgctttcgtaatttccgtgaagaacgctacgaagaagaccgagtggatgacttgcaccgattggaagaagcccgcgaagcagctttgattcggtcggctcgatatttacaagggttgcggcgctatcataatcgcaatgttcgatctcgtgcctttttagttggtgacctggttttgaggaaaattcaaactacacgagatcggcacaagttatctcctctatgggaagggccatttattatctctgaagtcacccggccaggttcttatcgactcaagcgcgaagacggtactcttgtcgacaactcttggaacattgaacatcttcgtcgtttctacgct

SEQ ID NO: 47224 - DNA, 5202 bp, Oryza sativa
  Clone ID: PAT_MRT4530_50013C.1
atgggttccgtctccggcatcgacgacctcgtcttcccacccggggagacgtttcggttcggcagcctcgacttcgtcaccaacaacttcggcaagatctctctccttgactcggtgtccgcccagtcgggagagaaccggctttcagtcccgtttggactcccaaacgcggctgaaagttacttcaagaccatctcaatcgagttggcttcaaaccactcgggcgagatcgcatcttccccgccggatcaagatgatggggcttacccaccgatcctaatgaagctccccgacgattcggcggccgcctccatcacgacagcgtcttcatcccgtaggcctaggcggaagtcggcttcaacaccgatttcgcctagcttcagggaagtcggcgtcatcctccaaccactcggcacggtttcgacggatcagttgaacggctactacagctctcccaccgtcgactcgtgccccaccgacatcgtggagtacgacgagtttagctctcgctacaacgaaccggatctcgacgacttcgacgaaagcctagatgacaactacacccctctctacttcggcgtcttcatggccgataacgagacggaggagcaacgccaagcccgggagaccgaagcacgtcgcgaggctgagcgtctccgactggaggaggagcgtcaagcacaagaacaagaacggttacggcgtgagcagcaggagcgtgagcggaccgcgaaggaggctgaagatcgacgacagcgagctttggaagcagggcgccgagcgcgtgatctcatcggccaacaagatgttgaagggacaccggttttccgcacccctcagcagaatgcggttgccgcgatcaccctcctcgacaccctcctcaaggaaaacgagctcaatcaatctgatcacgtcgtcaacatcttgaaccagacgaagaccatgattgcggcttcggtcccagttaactccgaaagcgtccacacgccgactggcagccgagttccccacttccgatctcatgactaccgtcatccaagcctcagcatcaccggcgcaggatccaatcgtaggagcaggggtcacgacgggcggtccgttcactcacctcccgaccatcatggggagcgccgagtggaacggcctcgctcaccacctcgtcgccgccccgtcgatcttcgcgacacgatcatacagcgccgagcaactcgaggccatcatcattcgccggaccgccacgacgacgaccttgacggagtagcagccttcaccgacgatctgcgtcgagtggattggccagccggcttcaagccgactggaatagagaagtacgacgattccgcccgatcttggctccatggattgccccgtggtacaatcggatcttgggccgaattacgcgaccacttcatcgccaacttccaaggcaccttcgagcgtcccagcacacaatacgacctctacaacgttattcagaagtccggagaatcccttagagattacatccggcgattttctgaacaacgtaataagatctccgacatcaccgacgacgttatcatcgccgctttcaccaaagggattcgccacgaagaattggtcggcaagttcgggcgtaaacctcccaggacagtcaagcttatgtttgaaaaagccaacgagtacgccaaagctgaagacgccgtcaccgcatcaaagcagtcgggtcctagttggaagccaaataagggtacgccggctacgggaggaggtggaagtaacaatcataaggaccgcaagcgtaagcctgcggaacttgttgcaaccgccagtcactcttctcgacagcgttcgcgcgtcaacacgttcgacaagatcatgaactcccaatgcccgcaccatcctaactccaaccacgtggccaaagattgtttcgtctacaagcaattcgcggatcaatacaccaagactacacggaagaactccgacgaagaacaaagcacgtcgatgaagaaggacgacggcgacaccccggcaggatttcaagaccaccgcaaggagctcaaccatatcttcggcggccccttggcttatgagtctaaacggaagcaaaagttgactgaacgggagatcaatgctgttcaacccgacacgccccagtatcttcgatggtcagaaattgcaatcaagtttgaccgctcggatcatcctgaccgagtggtccacccggggcggtaccccctggtactagacccagtggtccgtaatgtcaagcttcgcagaaccctcatcgacggtggcagtgcactcaatatcctcttcgccaagaccttggatgacatgcagatccctcgctccgagctaaaaccaagcaatgcgcctttccacggagtaattccaggattatccgcaactccactcggccagatcaccctcccggtcacctttggcactcgggaaaacttccgcacagagaatatcagctttgaagtcgccgattttgagacagcatatcatgccatactcggacgcccgacgttagccaagttcatggccgtcccgcactacacttacatgatgatgaagatgcccggtccccgaggagtcctatccctacggagcgacatcaagcaagccgtcacatgcgacaaggagagttgcgacatggcccaaacccgcgagatggcgtctgtccgagaggatatccgactggctgcagccacggcgagcgaaggagaagtgcccgccaccaagacttcaaaaagtggagaaagcgaagccaagactaagaagattcccctagatccttctgatcctactaaaactgctgtaataggcgccgaagaggtgattgagcactccttatacgtcaaagaagatgccaagcctatcaaacaacgactccgccgatttgcacaagacaggaaggacgcgattaaagaggaattaaccaagctgttagcagtaggcttcatcaaagaagtccttcatcccgactggctggcaaacccggtagtcgactcgaccgccggctgtgagcttctcagttttttggattgctactcggggtatcatcagatccgactaaaggaatccgactgcttgaagacttcatttatcacgccctttggagcatactgctatgtcaccatgccgttcggactaaaaaacgcaggagcaacttatcaacaagaaaccttcgcgagcatccgcgctttcaggatgaaattaaaccctgaaaagtgcaccttcggagtaccgtcagggaagctgcttggttttatggtgtctcataggggcatccaagccaacccggagaaagttactgctatccttaacatgaaaccgccaagtacccagaaagatgttcagaagctgactggatgcatggcggcgctcagccgatttgtttcaaggctcggcgagcgggggatgcccttctttaagctactaaagaaaacagacgacttccagtggggacccgaagcacagaaggccttagaagatttcaagaaactcctcaccgagccaccagtcctagcctcaccacacccgcaggagccgttgttgatgtatgtatcagccacctcccaggttgtgagcacagtcttggtcgtcgagcgcgaggaagaaggccatgtccagaaagtccagcgaccgatttactttgtcagcgaggtcctagccgactccaaaacgaggtaccctcaggttcagaagctgttatatggtattctaattactaccaggaagctatctcactactttcaaggtcactcggtaacggtggtcacatcatttccactcgatgatatactgcacaaccgtgaagcaaacggacggattgctaagtgggctttggagttgatgtctttggacatatcattcaagccccgaatttcgatcaagtcccaagcgttagctgattttgtcgccgaatggaccgagtgccaggaggatacccccgcggagaagatggagcactggaccatgcattttgacgggtcaaaacgactttcgggcactggagcaggagtagttctaatttccccaactggagaaagattaagctatgtgctttggatacatttttcggcgtcccacaacgtcgccgagtatgaggcgctccttcatggactacggattgcaatctccctagggataaagcgtctaatagttcgaggcgattcacagctggtcgtcaaccaggttatgaaagagtggtcctgccttgacgacaacatgatggcatatcgacaagagatacgcaaattggaagataagttcgatggactcgagctcagtcacgttcttcgacacaacaatgaagctgccgatagactcgccaactttggatccaagcgtgaggcggcacccttcgatgttttcgtcgaacacctttatacgccgacagtacctcacaaagatgctactcaagttgcgggcactcatgacgtagctatggttgaagccgactggcgagagcccctcatacgatttttgatttctcaagaactcccccaagacaaagatgaagccgagcggatttcaaggcggagcaaactttatgttatgcatgaagctgagctgtacaagaaaagcccttcagggattctgcaacgttgcgtatctttagaggaagggagacaattgctgaaagacatacattctgggatatgcggaaaccacgctgctgcacgtaccattgtcggcaaagcttaccggcagggttttttctggcctactgcagtgtccgacgccgacaaaatcgtgcgcacatgtgaaggttgccaatttttcgccagacaaattcatctaccagcccaagagttgcagactatcccgctgtcttggccgtttgcggtttgggggctcgacatggttggcccgtttaaaaaggtagtcggcggttacacgcacctctttgtggccattgacaaattctccaagtgggttgaagctaaaccggttgtcacaatcacagcggataacgctcgagatttcttcatcaacattgtgcatagatttggagtgcccaatcggatcatcactgataatggcagacaattcactggcggagtttttaaagacttttgtgaagactttggaattaagatttgctatgcctcagtggcgcatcccatgagcaatggacagaacgctacgaagaggaccgagtggatgacttgcaccgattggaagaagtccgcgaagcagctttga

SEQ ID NO: 47225 - DNA, 5961 bp, Oryza sativa
  Clone ID: PAT_MRT4530_50014C.1
atgggtcccatctccggcatcgacgacctcgtcttccctcccgggcagacgtttcggttcggcagcctcgacttcatcaccgacaacttcggcaagatttctctccttgactcggaatcggaccagtcgggagagaaccggatctcagtcccgtttggattcccaaacgcggctgaaacctacttcaagaccatctcaatcgagtcggcttcaaaccactcggctgagatcgcatcttcttcaacgtcaccagatcaagatgatggggcttacccatcggtcctgatgaagctccccgacgatttagcggccgtcttcaccacgacagcgtcttcatcccgtaggcctaggcggaagtcggcttcaacaccgatttcgcctagcttcagggaagtcggcgtcatcctccaaccactcggcacggtttcaacggaccagctggatgactacaatagctctcccaccgtcgactcacgtcctactgacatcgtggagtacgacgaatttagctctcgctacaacgacttcaacgacttcgacgacttcgacggaagcctagatgacaactatacccctctctactttggcgttttcatggccaataatgagacggaggagcaacgccaagcccgggagaccgaagaacgtcgccgactggaggaggagcatcaagcacaagaacaagaacggctacggcgcgagcagcaggaccgcgagcggactgcgaaggaggctgaggaccgacgtcagcgagctttggaagcagggcgccgagcgcgtgatctcatcggtcaacaagacgtcgaagggacaccggttttccgcacccctcaacacaatgcggttgccgcgatcaccctcctcgacacccttctcaaccaaaacgagctcaatcgttccgaccacgtcgtcaacatcttgaatcagacaaagaccatgattgcggcctcggttccagttaactccgaaagcgtccacacgccgactggcagccgagtcccccacttccgatctcatgactaccgtcatccaagcctcagcatcaccggcgcaggatccaaccgcaggagcaggggtcacgacgagcgatctgttcactcacctcccgaccttcatagggagcgccgagtggaacggcctcgctcaccacctcgtcgccgccccatcgatcttcgcgacacaatcatacagcgccgagcagctcgaggctaccatcactcgccggaccgccacgacgacgaccttgacggagtagcagcctttaccgacgatctgcgtcgagtggattggccagccggcttcaaaccgactggaatagagaagtatgacggtaccactaatccagaatcgtggcttaccgtctacggtctcgcaatccgcgcagcaggaggagacaacaaggccatggcgaactatctaccggtggctttagcagattccgcccgatcttggctccatggactgccccgtggtacgatcggatcttgggccgaattacgcgaccacttcatcgccaacttccaaggcaccttcgagcgtcctggcacacaatatgatctttacaacgttatccagaaatccggagaatcccttcgagagtatatccgacgattttctgaacaacgtaacaagatctccgacatcactgacgacgtcatcatcgccgcattcaccaaagggattcgccacgaagaattggtcggcaaatttgggcgcaaacctcccagaacagtcaagctcatgtttgaaaaagccaacgagtacgccaaagctgaagacgccgtcaccgcatcaaagcagtcgggccccagttggaagccgaaaaatacgccggctacgggaggaggtggaagtaacaatcataaggaccgcaagcgtaagcctgaggaacttgttgcaaccactactcactcttctcgacagcgttcgcgcgtcaacaccttcgacaagatcatgaactcccaatgcccgcatcatccaaattccaaccacgtggccaaagagtgcttcatctacaagcagttcgcggagcagtacaccaagtctactcggaagaactccgacgaggaacaaagcacgtcaaggaagaaggacgacggcgacaccccggctggatttcaggaccaccgcaaggagctcaaccatatttttggcggccccatggcttatgagtctaaaaggaagcaaaagctgaccgaacgggagatcaatgctgttcagcccgacacgccccaatatcttcgatggtcagagatcgcaatcaggtttgaccgctcggatcatcctgaccgagtggtccacccggggcggtaccccctggtactagacccagtggtccgtaacgtcaagcttcgcagaaccctcattgatggcggcagtgcactcaatatcctcttcgccaagactttggatgatatgcagatccctcgctccgagttaaaaccaagcaatgcgccttttcatggagtaattccaggattatccgcaactccactcggccagatcactctcccggtcacttttggcactcgggaaaacttccgcacagagaatatcagctttgaagttgccgatttcgagacagcataccatgccatactcggacgcccggcgttagccaagttcatggccgttccgcactacacatacatgatgatgaagatgcctggtccccgaggagtcctaaccctacggagcgacatcaagcaagctgtcacatgcgacaaggagagttgcgacatggcccaaacccgcgagatggcgtctgcccgagaggaaatccgactggctgcaaccacggaaagcgcgctcatcacctttcttcaaaataataaagatatctttgcgtggaaaccttcggatatgcccggtattcccagagaggtgattgagcactccttacatgtcaaagaagacgccaagcctattaaacaacgactccgccgatttgcacaagacaggaaggacgcgatcaaggaggagttaaccaagctgttagcagcaggcttcatcaaagaagtccttcatcccgactggctggcaaacccggttctagttcggaagaaaacagggcaatggcgcatgtgtgttgattataccgacctcaacaagtcttgtcccaaagatccttttgggttgcctcgcattgaccaggtagttgactcaaccgccggctgtgagcttctcagttttttggattgctactcggggtatcatcagatccgactgaaggaatccgactgcttgaagacttcattcatcacgccttttggtgcatactgctacgtcaccatgccgtttggattaaaaaatgcaggagcaacttatcaacgtatgattcagagatgcttctcaacacaaattggccgcaacgttgaagcctatgtagatgatgtagttgtcaagaccaaacaaaaggatgatttgatttcggatctagaagaaacctttgcgagcatccgtgctttcaggatgaaattgaaccctgaaaagtgcaccttcggagtaccgtcagggaagctgcttggttttatggtgtctcataggggcatccaagccaacccggagaaagttactgctatcctcaacatgaaaccaccaagcacccagaaagatgttcagaagctgactggatgcatggcggcgctcagccgattcgtttcaagacttggcgagcgggggatgcccttcttcaaactactgaagaaaacagataatttccaatggggacccgaagcacagaaggccttcgaagatttcaaacaactcctcaccaagccaccggtcttagcttcaccacacccgcaggagccgttgttgctgtatgtatcagccacctcccaggtcgtgagcacagtcttggttgtcgagcgtgaggaagaaggccatgtccagaaagttcagcgaccaatctacttcgtcagcgaggtcctggccgactccaaaacgaggtaccctcaggttcagaagctgttatatggtattttaattactaccaggaagctgtctcattactttcaaggtcacccggtaacggtggtcacatcgtttccactcggcgatgtactgcacaaccgcgaagcaaatgggcggattgctaagtgggctttggagttgatgtctttggacatatcattcaagccccgcacttcaatcaagtctcaagcgttagctgattttgtcgccgagtggaccgagtgccaagaggatacccccgcggagaacatggagcactggaccatgcattttgacggatccaaacgactttcgggcactggagcaggagtggttttgatttccccaactggagaaagattgagctatgtgctttggatacatttttcggcgtcccacaatgtcgccgagtatgaagccctccttcatgggctacggattgcaatttccctagggataaagcgtttaatagttcgaggcgattcacagctggttgttaaccaagttatgaaacagtggtcctgcctcgacgacaacatgatggcatatcgacaagaggtacgcaagttggaagacaaatttgatggactcgaactcagtcacgttcttcgacacaacaatgaagccgccgacagacttgccaattttggatccaagcgtgaggcggcgccctcagatgttttcgtcgaacacctttatacaccgactgtacctcacaaagataccactcaagttgcgggcactcatgatgtcgctatggttgaagccgactggcgagagcccttcatgcgatttttaacttctcaagagctccctcaagataaagatgaagccgagcggatttcaaggcggagcaaactttatgttatgcacgaatccgagttatacaagaaaagcccttcaggaattctgcaacgctgtatatctttagaggaagggagacaattgctgaaagacatacattctgggatatgcggaaaccatgctgctgcgcgcaccattgttggcaaagcttaccggcagggttttttctggcctactgcagtgtccgacgccgacaaaattgtgcgcacatgtgaaggttgccaattttttgccagacaaattcatctaccagctcaagagttgcaaacaatcccgctgtcttggccgtttgcggtttgggggctcgacatggttggcccgtttaaaaaggcagtcggtggttacacgcatctctttgtggccattgataaattctccaagtggatcgaagctaaaccggttgtcacaatcacagcggacaatgctcgagacttcttcatcaacattgtgcatagatttggagtgcccaatcggatcatcaccgataatggcacacaattcactggcggagtttttaaagacttttgtgaagattttggaattaagatttgctacgcttcagtggcacatcccatgagcaatggacaggtggagcgagccaatggcatgatacttcaagggattaaagcgcgtgtttttgaccggctaaaaccctatgccggcaaatgggtgcaacagctgccatcagtactttggtctttgcgaactacacccagtcgggccacaggccagtcaccttttttccttgtctatggggcagaagcaatgttgccgagtgaagtcgaatttgagtctttgcgcttccgtaatttccgtgaagaacgctatgaagaagatcgagtggacgacttgcatcgactggaagaggtccgcgaagcagctttgattcagtcagctcggtacttacaagggttgcgacgttatcataatcgcaatgttcgatctcgtgcctttctagtcggcgacctggttttacggaaaattcaaaccacacgagatcggcacaagttatctcctctatgggaagggccatttattatctctgaagttacccggccaggttcatatcgactcaagcgcgaagacggcactctcgtcgacaactcttggaacattgaacatcttcgtcgtttctacgcttaa

SEQ ID NO: 47226 - DNA, 5829 bp, Oryza sativa
  Clone ID: PAT_MRT4530_50015C.1
atgggttccatctccggcatcgacgacctcgtcttcccacccgggcagacgtttcggttcggcagcctcgacttcgtcaccaacaacttcggcaagatctctctccttgactcggagtcggaccagtcgggagagaaccagatttcggccccgtttggactcccaaacgcggctgaaagttacttcaagaccatctcgaccgagtcggcttcaaaccactcgggcgagatcgcatcttcaccaacgtcaccagatcaagatgatggggcttacccaccgatcctgatgaagctccccgacgatttggcggccgtctccatcacgacagcgtctctttcccgtaggcctaggcggaagtcggcttcaacaccgatttcgcctagcttcagggaagttggcgtcatcctccaaccactcggcacggtttcgacggatcagctagatggcgactacagctctcctaccgtcgactcgcgccccaccgacatcgtggagtacgacgagtttagctctcgctaccacgacccggatctcgacgacttcgacggaagcctagatgacaactacacccctctctattttggcgtcttcatggccaataacgagacggaggagcaacgccaagcccgggagaccgaagcgcgtcgcgagactgaacgccgccgactggaagaggagcatcaagcacaagaacaagaacggttacggcatgagcagcaggagcgtgagcggaccgcgaaggaggctgaggatcgacggcagcgagctttggaagcaggacgccgggcgcgtgatctcatcggccagcaagatgttgaagggacgccgatttttcgcacccctcaacagaatgcggttgccgcgatcaccctcctcgacaccctactcagggaaagcgagctcaatcaatccgatcacgtcgtcaacatcttgaaccagacgaagactatgattgcggcttcggtcccagttaactccgaaagcgtccacacgccgactggcagccgagtcccccacttccgatctcatgactaccgtcatccaagcctcagcatcaccggcgcaggatccaatcgcaggagcaggggccacgacgagcggtctgttcactcacctcccgaccaccatagggagcgccgagtggaacggcctcgctcaccacctcgtcgccgccccgtcgatcttcgcgacacaatcatacagcgccgcgcagctcgaggctatcatcactcgccggaccgccacgacgatgaccttgacggagtagcagccttcaccgacgacctgcgtcgagtggactggccagccggcttcaagccgactggaatagagaagtacgatggtaccactaacccagaatcgtggcttaccgtctacggtctcgcaatccgcgcagcaggaggagacagcaaggccatggcgaactatttaccagtggctttagcggattccgcccgatcttggctccatggattgccccgtggtacaatcggatcttgggccgagttacgtgaccacttcatcgccaactttcaaggcaccttcgagcgtcccggcacacaatacgacctctacaacgtcattcagaagtccggagaatcccttcgagattacatccggcgattttctgaacagcgtaacaagatctccgacatcaccgacgacgtcatcatcgccgcattcaccaaagggattcgccacgaagaattggttggcaaattcgggcgtaagcctcccaggacagtcaagctcatgtttgaaaaagccaacgagtacgccaaagctgaagacgccgtcaccgcgtcaaagcagtcgggtcccagttggaagccaaaaaaggatacgccggcttcgggaggaggtggaagtaacaatcataaggaccgcaagcgtaagcctgcagaacttgttgcaaccgccagtcactcttctcgacagcgttcgcgcgtcaacacgttcgacaagatcatgaactcccaatgcccgcaccatcctaactccaaccacgtggccaaagattgtttcgtctacaagcaattcgcggatcaatacaccaagactacacggaagaactccgacgaagaacaaagcacgtcgaggaagaaggacgacggcgacaccccggcaggttttcaagaccaccgcaaggagctcaaccatatcttcggcggccccctggcttatgagtctaaacggaagcaaaagttgaccgaacgggagatcaatgctgttcagcccgacacgccccaatatcttcgatggtcagagattgcaatcaagtttgaccgctcggatcatcctgaccgagtggtccacccggggcggtaccccctggtactagacccagtggtccgtaatgtcaagcttcgcagaaccctcatcgacggtggcagtgcactcaatatccttttcgccaagaccttggatgatatgcagattcctcgctccgagttaaaaccaagcaatgcgccttttcacggcgtaattccaggattatccgcaactccactcggccagatcaccctcccggtcacttttggcactcgggaaaactttcgcacagagaatatcagcttcgaagtcgccgatttcgagacagcataccatgccatactcggacgcccggcattagccaagttcatggccgtcccgcactacacttacatgatgatgaagatgcctggtccccgaggagtcttatccctacggagtgacatcaagcaagccgtcacatgcgacaaggagagttgcgacatggcccaaacccgcgagatagcgtctgctcgagaggatatccgactggctgcagccacggcggacgaaggagaagtgcccgctaccaagacttcaaaaagtggagaaagcgaagccaagactaagaagattcccctagatccctctgatcctactaaaactgctaacaataaagatatctttgcgtggaaaccatctgatatgcccggtattcctagagaggtgattgagcactccttacatgtcaaagaagacgccaagcctatcaaacaacgactccgccgattcgcacaagacaggaaggacgcgatcaaggaggaattaaccaagctgttagcagcaggcttcattaaagaagtccttcatcccgactggctggcaaacccagttctagttcggaagaaaacagggcaatggcgcatgtgtgttgattacactgacctcaacaaatcctgccctaaagatccttttgggttgcctcgcattgaccaggtagttgactcgaccgccggctgtgagcttctcagttttttggattgctactcggggtatcaccagatccgactgaaggaatccgactgcttgaagacttcattcatcacgcccttcggggcatactgctacgtcaccatgccatttggactcaaaaacgcaggagcaacttatcaacgtatgatccagagatgcttctcaacgcagattggccgcaacgttgaagcctatgtggatgatgtagtcgtcaagaccaagcaaaaggatgatttgatctcggatctggaagaaaccttcgcgagcatccgtgctttcaggatgaaattaaaccctgaaaagtgcaccttcggagtaccgtcagggaagctgcttggttttatggtgtctcatagaggcatccaagccaacccggagaaagttactgctatcctcaacatgaaaccgccaagtacccagaaagatgttcagaagctgactggatgcatggcggcgctcagccgatttgtttcaagacttggcgagcgggggatgcccttctttaagctactaaagaaaacagatgatttccagtggggacctgaagcacagaaggccttcgaagatttcaagaaactcctcaccgagccaccggtcctagcctcaccacacccgcaggagccgttgttgctgtatgtatctgccacctcccaggttgtgagcactgtcttggtcgttgagcgtgagaaagaaggccatgtccagaaagtccagcgaccgatttattttgtcagcgaggtcctagccgactccaaaacgaggtaccctcaggttcagaagttgtcatatggtattttaatcactaccaggaagctatctcactactttcaaggtcacccggtaacggtggtcacatcatttccactcggtgatatactgcacaaccgcgaagcaaacggacggattgcaaagtgggctttggagttgatgtctttggacatatcattcaagccccgaatttcaatcaagtcccaagcgttagctgattttgtcgccgaatggaccgagttccaagaggatacccccgcggagaagatggagcactggaccatgcattttgacgggtcaaaaagactttccggcactggagcaggagtggttctaatttcaccaactggagaaagattaagctatgtactttggatacatttttcggcgtcccacaacgttgccgagtatgaggccctccttcatgggctgcggattgcaatttccctagggataaagcgtctaatagttagaggcgattcacagctggttgtcaaccaggttatgaaagagtggtcctgccttgatgacaatatgatggcatatcgacaagaggtacgcaaattggaagacaagttcgatggactcgagctaagtcatgttcttcgacataataatgaagccgccgacagacttgccaattttggatccaagcgcgaggtggcgccttccgatgttttcgtcgaacacctttatacgccgacggaagggagacaattgctgaaagacatacattctgggatatgcggaaatcacgctgctgcacgcaccattgtcggcaaagcttaccggcagggttttttctggcctactgcagtgtccgacgccgacaaaattgtgcgcacgtgcgaaggttgccaattttttgccagacaaattcatttaccagctcaagagttgcaaactatcccgctgtcttggccgtttgcggtttgggggctcgacatggttggtccgtttaaaaaggcagtcggtggttacacgcatctctttgtggccattgataaattttccaagtggattgaagctaaaccggttgtcacaatcacagcagataatgctcgagacttcttcatcaatattgtgcatagatttggagtgcccaatcggattatcactgataatggcacacaagtcactggcggagtttttaaagacttttgtgaggactttggaattaagatttgctatgcctcagtggcacaccccatgagcaatggacaggtggagcgagccaatggcatgatacttcaagggattaaaacgcgtgtctttgaccggctaaaaccctatgccggcaaatgggtgcaacagctgccatcggtgctttggtctttgcgaactacacccagtagggccacaggccagtcaccttttttccttgtctatggggcagaagcaatgttgccgagtgaagttgaattcgaatctttgcgctttcgaaatttccgtgaagaacgctacgaagaggacagagtggatgacttgcaccggttggaagaagtccgtgaagcagctttgattcggtcggctcgatacttacaagggttgcggcgttatcataatcgcaatgttcgatcccgtgcctttttagtcggcgacctggttttgaggaaaattcaaactacacgggatcggcacaagttatctcctttatgggaggggccatttatcatctctgaagtcacccggccaggttcctatcgactcaagcgagaagatggtactctcgtcgacaactcttggaacattgaacatcttcgtcgtttctacgcttaa

SEQ ID NO: 47227 - DNA, 637 bp, Oryza sativa
  Clone ID: PAT_MRT4530_50016C.1
atgcgggccccactggtcagcggctccaaagggagggaggtggcgactggcaggtgggccccaccaggcggtggctcaagggggaggcgagggaggcgccggcatgtgggccccacgggcagcggctcaagggggagggagtgggcggcggcatgctcggcacggctcaagccggccggccatggcgaggcgacgacggcgcacgaccgccggcggtgaccggcggcgcggggagacggcggcggccggcgcgaaggcggcggcggcagccgaagacgacggcgcacgcgcggagggcggcggcgctcacgggggagaggaaaggaaggaggaaaggggattcctcaccgaggcgatggcggcgaccggcgagacgacgaccacggcggcttgaattgccggccggagatggaggggagggaaaaactcaccggctcgcgaggggagaggtgctccggtgggattccggcgacgcgaggcggcggccgggaaagctcttgcggcggcgaagctaacagcggcggcggtttggcgcggcggcgactctagcggcggcggctcgcggccaaaggcggcggcaagcggcggcgctagcaacaagcggcgcgagcgcgataggaggcacgggagagcgcgg

SEQ ID NO: 47228 - DNA, 207 bp, Oryza sativa
  Clone ID: PAT_MRT4530_50017C.1
atgaagaagaagaagaagaagaagaagaagaagaagaagaagaagaagaagaagaagaagaagaagaagttgttgagtgagatcggctatgggtggggacggcgaggcgaagatatgccacttagctgcgaggccattggagaccatgcatgtgattacgggcaggggaggggcagctgtagcatattcgactgcatgagccactag

SEQ ID NO: 47229 - DNA, 5871 bp, Oryza sativa
  Clone ID: PAT_MRT4530_50018C.1
atgggttccgtctccggcatcgacgacctcgtcttccctcccgggcagacgtttcggttcggcagcctcgacttcgtcaccaacaacttcggcaagatctctctccttgactcggagtcgaaccagtcgggagagaaccggatctcagtcccgtttggattcccaaacgcggctgaaagttgcttcaagaccatctcaatcgagtcggcttcaaaccactcggctgagatcgcatcttctccaacgtcaccagatcaagatgatggggcttacccaccgatcctgatgaagctccccgacgatttggcggccgtctccatcacgacagcgtctccttcccgtaggcctaggcggaagtcggcttcaacaccgatttcgcctagcttcagggaagtcggcgtcatcctccaacctctcggcacggtttcgaccgatcagctggatggctacaacagctctcccaccgtcgactcgcgccccaccgacatcgtggagtatgacgaatttagctctcgctacaacgacctggatctcgacgacttcgacggaagcctagatgacaactacacccctctctacttcggcgtcttcatggccggtaacgagacggaagagcaacgccaagcccgggaaaccgaagcacgtcgcgagactgagcgtcgccgactggaggaggagcatcaagcacaagaacaagaacggctacggcgtgagcagcaggagcgtgaacggaccgcgaaggaggctgaggatcgacggcagcgagctctggaagcagggcgccgagcgcgtgatctcattggccaacaagatgttgaagggacacctgttttccgcacccctcaacagaatgcggttgccgcgatcaccctcctcgacaccctcctcagggagaacgagctcaatcaatctgaccacgtcgtcaacatcttgaaccagacgaagaccatgattgcggcttcggtcccagttaactccgaaagcgtccacacgccgactggcagccgagtcccccacttccgatctcatgactaccgtcatccaagcctcagcattaccggcgcaggatccaatcgcaggagcaggggccacgacgagcggtctgttcactcacctcccgatcatcatagggagcgccgagtggaacggcctcgctcaccacctcgtcgccgccccgtcgatcttcgcgacaccatcatacagcgccgagcagctcgaggttatcatcattcgccggactgccacgacgacgaccttgacggagtagcagccttcaccgacgacctgcgtcgagtggattggccagccggcttcaagccgactggaatagagaagtacgacggtaccactaacccagaatcgtggcttaccgtctacggtctcgcaatccgcgcagcaggaggagatagcaaggccatggcgaactatttaccagtggctttagcggattccgcccgatcttggctccatggattgccccgtggtacaattggatcttgggctgaattacgcgaccacttcatcgccaacttccaaggcaccttcgagcgtcccggcacacaatacgacctctacaacgttattcagaagtccggagaatcccttcgagattacatccggcgattttctgaacaacgtaacaagatctccgacatcactgacgacgttatcatcgccgcattcaccaaggggattagccccgaagaattggtcggcaagttcgggcgtaagcctcccaggacagtcaagctcatgtttgaaaaagccaacgagtacgccaaagctgaagacgccgtcaccgcatcaaagcagtcgggtcctaattggaagccaaaaaaggatacgccggcttcgggaggaggtggaagtaacaatcataaggaccgcaagcgtaagcctgcggaacttgttgcaaccgccagtcactcttctcgacagcgttcgcgcgtcaacacgttcgacaagatcatgaactcccaatgcccacaccatcctaactccaaccatgtggccaaagattgtttcgtttacaagcaattcgcggatcaatacaccaagactacacggaagaactccgacgaagaacaaagcacgtcgaggaagaaggacgacggcgacgccccggcaggatttcaagtccaccgcaaggagctcaaccatattttcggcggccccctggcttatgagtctaaaaggaagcaaaagttgaccgaacgggagatcaatgctgttcagcccgacacgccccaatatcttcgatggtcagagatcgcaatcaagtttgaccgctcggatcatcctgaccgagtggtccacccggggcggtaccccctagtactagacccagtggtccgtaatgtcaagcttcgcagaaccctcatcgacggtggcagtgcactcaatatcctcttcgccaagaccttggatgatatgcagatccctcgctccgagctaaaaccaagcaatgcgccttttcacggagtaattccaggattgtccgcaactccactcggccagatcaccctcccggtcacttttggcactcgggaaaactttcgcacagagaatatcagctttgaagtcgctgatttcgagacagcataccatgccatactcgggcgcccggcgttagctaagttcatggccgtcccgcactacacttacatgatgatgaagatgcctggtccccgaggagtcctatccctacggagcgacatcaagcaagccgtcacatgtgacaaggagagttgcgacatggcccaaacccgcgagatggcgtctgcccgagaggatatccgactggctgcagccacggcgagcgaaggagaagtgcccgctaccaagacttcaaaaagcggagaaagcgaagccaagactaagaagattcccctagatccctctgatcctactaaaactgctaacaataaagatatctttgcgtggaaaccatctgatatgcccggtattcctagagaggtgattgagcactccttacatgtcaaagaagatgccaaacctatcaaacaacgactccgccgatttgcacaagacaggaaagacgcgatcaaggaggaattaaccaagctgttagcagcaggcttcatcaaagaagtccttcatcccgactggctggcaaacccggttctagttcggaagaaaacagggcaatggcgcatgtgcgttgattatactgacctcaacaaatcctgccctaaagatccttttgggttgcctcgcattgaccaggtagtcgactcgaccgccggctgtgagcttctcagttttttggattgctactcggggtatcatcagatccgactgaaggaatccgactgcttgaagacttcattcatcacgccctttggagcttattgctatgtcaccatgccgttcggactaaaaaatgcaggagcaacttatcaacgtatgatccagaggtgcttctcaacacagatcggccgcaacgttgaagcttatgtggatgatgtagttgtcaagaccaagcaaaaggacgatttgatctcggatctagaagaaactttcgcgagcatccgcgctttcaggatgaaattaaaccctgataagtgcaccttcggagtaccgtcagggaagctgcttgaatttatggtgtctcataggggcatccaagccaacccggagaaagttactgctatcctcaacatgaaaccgccaagtacccagaaagatgttcagaagttgactgggtgcatggcggcgctcagccgatttgtttcaagacttggcgagcgggggatgcccttctttaagctactgaagaaaacagatgatttccagtggggacccgaagcacagaaggccttcgaagatttcaagaaactcctcaccgagccaccggtcttagcctcaccacacccgcaggagccgttgttgctatatgtagcagccacctcccaggttgtgagcacagtcttggtcgttgagcgcgaggaagaaggccatgtccagaaagtccagcgaccgatttattttgtcagcgaggtcctagccgactccaaaacgaggtaccctcaggttcagaagctgttatatggtattctaattactaccaggaagctatctcactactttcaaggtcactcggtaacggtggtcacatcatttccactcggtgatgtactgcacaaccgcgaagcaaacggacggattgctaagtgggctttggagttgatgtctttggacatatcattcaagccccgaatttcaatcaagtcccaagcgttagctgattttgtcgccgaatggaccgagtgccagcaggatacccccgcggagaagatggagcactggaccatgcattttgacgggtcaaaaagactttcgggcactggagcaggagtggttttaatttccccaactggagaaagattaagctatgtgctttggatacatttttcggcatcccacaacgttgccgagtatgaggccctccttcatggactgcggattgcaatttccctagggataaagcgtctaatagtccgaggcgattcacagctggttgtcaaccaggttatgaaagagtggtcctgcctcgacgacaatatgatggcatatcgacaagaggtacgcaaattggaagacaagttcgatggactcgagctcagtcacgttcttcgacacaataatgaagccgccgacagacttgccaactttggatccaagcgcgaagtggctccctctgatgttttcgtcgaacacctttatatgccgacagtacctcacaaagatactactcaatttgcgggcactcatgatgaagggagacaattgctgaaagacatacattctgggatatgcggaaaccatgctgctgcacgcaccattgtcggcaaagcttaccggcagggttttttctggcctactgcagtgtccgacgccgacaaaatcgtgcgcacatgtgaaggttgccaatttttcgccagacaaattcatctaccagctcaagagttgcagaccatcccgctgtcttggccgtttgcggtttgggggctcgacatggttggcccgtttaaaaaggcagccggcggttacacgcatctctttgtggccattgataaattttccaagtggattgaagctaaacctgttgtcacaatcacagcaaataatgctcgagacttcttcatcaacattgtgcatagatttggagtgcccaatcggatcatcactgataatggcacacaattcactggcggagtttttaaagacttttgtgaggactttggaattaagatttgttatgcctcagtggcacaccccatgagcaatggacaggtggagcgcgccaatggcatgatacttcaagggattaaagcgcgtgtttttgaccggctaaaaccctatgccggcaaatgggtgcaacagctgccatcagtactttggtctttgcgtactacacccagtcgggccacaggccagtcaccttttttccttgtctatggggcagaagcaatgttgccgagtgaagttgaattcgagtctttgcgttttcgaaattttcgtgaagaacgctacgaagaggaccgaatggatgacttacaccgattggaagaagtccgcgaagcggctttgattcagtcagctagatacttacaagggttgcggcgttatcataatcgcaatgttcgatcccgtgcctttttagtcggcgacctggttttgcggaaaattcaaactacacgagatcggcacaagttatctcctctatgggaagggccatttatcatctctgaagtcacccggccaggttcctatcgactcaagcgcgaagacggtactctcgtcgacaactcttggaacattgaacatcttcgtcgtttctacgcttaa

SEQ ID NO: 47230 - DNA, 498 bp, Oryza sativa
  Clone ID: PAT_MRT4530_50019C.1
atggcagctcgccgcggctgggagaggagggaggcggcttgcggcggccgggcgaggagaggcgacgtgcggcggcccggcgaggagaggcggcgcgcggcggccaggcgaggagaggcgacgcgcggtggccgggcgaggagggaggcggcgctcggtggccgcgcaacgaagggcagctccaacccagatgtgaccatcaaggacggcggcggaggtggccaggcgaggagggaggcggcgcaggtggctgagggcgttgagtggcgaaggcttctcctcctcggctctctcggccaccacatgctcacttcgacggaggccattatctccatcccttccaacacatctcatcatcgtgtgacggccgctggaggcgaggacctgtgctggtcctccatggccaggttcggctatcaccctgccatcgagaactcccccaacaaatgcagtcatggctccatctacaacaacatgccatcccaccacggttcttaa

SEQ ID NO: 47231 - DNA, 648 bp, Oryza sativa
  Clone ID: PAT_MRT4530_5001C.1
aaaactgaccgccccctcgttttcttttttgaatattcaattattcgctcttgctctctagagctggaagcagaaatttatcttgggtaaactttggaagtttgaatggacaaggtcattgatccgattattgtgtatataatataattgcatacactaatcacagtgggcatcctctagtgtctagaggaagtgttccaaaatctcacaacaattctttatttcagtcgtgccaaaatgaatagaaatcctcaactaaatagtgatacagcatgagcagacttcaaattgtaacacagctcactcgccgcttaggatagggttgatcagtggcttcagctgcgcaagatagacgattgcccacatcatccaacagcaaaccgttgctgtaataaccaaggtcaaatggaataggttggtcgacggcccgcggttgcagcagagcagcgagaagagggaggcgacgaagccggcgaggaggaagatgagcgtggtcacccagaaccccatggccggcggaaagctctccgatcctctcccttcccttccctctcgatctctttcttccctcgggatcgctcgctgggtctcgtcgtctcggggcggaggtggggtggggagagccggccccgtgccctgcagcccggg

SEQ ID NO: 47232 - DNA, 6870 bp, Oryza sativa
  Clone ID: PAT_MRT4530_50020C.1
atgcctctcgcccacgtatcagttgcctttgacgttggccattgtttagccgcaagatcatattttgcgttcacactaacattgctaactttcgtggcacctttgtggcattgtatcattgctaactttcgtaaaggagatggcatagtgagcactcttgaagtagatgacttaaagagcgtcgctacagcattatctgaaagtctcccagtaaattccaactctggtgatgcagaatcatcgcaaatagatgctcctacatccttccaactactcgtgccaagaaccatccatatgttgagacatcatgtgaaagaatttcatgagaagtatttgggttcatctgtcatggaagcagttactgataagtccagtctagtttctggtgataatgtgaaaacaggatgctctgtaaacagattatgtcttgtaagggtgctgatcagagcatttaaggaaggttcttttgaagagggtgctgttgtttgtgccccactcccatcagatctttcagcctggaaccagaaaaccagatcagaagaggacgaagaagaacgcctagaaaaatgggaactccagctccctcaatcccatgtaacttcttatttctcttggctggatcctagcaccagcaatcttcagctgccaaacgatgattctacacgaaaggcgttcagatggccgattgtggagattatgggtatcccatatctacacggcgatggtattcgaactgggtacaggatacctaactttcgacagttggcgcgccaggtaggggtagcgtcaagcttttcgccgatcagtgcaatgggtccttcctccggcatcgacgacctcgtcttcccacccgggcagacgtttcggttcggcagcctcgacttcgtcaccaacaacttcggcaagatttctctccttgactcggaatcggaccagtcgggagagaaccggatctcagtcccgtttggattcccaaacgcggctgaaacttacttcaagaccatctcaatcgagtcggcttcaaaccactcggcagagatcgcatcttctccaacgacaccagatcaagatgatggggcttacccgccagtcctgatgaagctccccgacgatttagcggccgtcttcaccacgacagcgtcttcatcccgtaggcctaggcggaagtcggcttcaacaccgatttcgcctagcttcagggaagtcggcgtcatcctccaaccactcggcacggtttcgacggatcagctagatgactacaacagctctcccaccgtcgactcacgtcctactgacatcgtggagtacgatgagttcagctctcgctaccacgacttcgacgacttcgacgacttcgacgacttcgacggaagcctagatgacaactacactcctctctactttggcgttttcatggccaataacgagacggaggagcaacgccaagcccgggaaaccgaagaacgtcgccgactggaggaggagcatcaagcacaagaacaagaacggctacggcgtgagcagcaggaccgtgagcggatcgccaaggaggctgaggatcgacgtcagcgagctttggaagcagggcgccgagcgcgtgatctcatcggccaacaagatgtcgaagggacaccggttttccgcacccctcaacagaatgcggttgccgcgatcacccttctcgacaccctactcaaccaaaacgagctcaatcgatccgaccacgtcgtcaacatcttgaaccagacgaagaccatgattgcggcctcggtcccagttaactccgaaagcgtccacacgccgactggcagccgagttccccacttccgatctcacgactaccgtcatccaagcctcagcatcaccggcgcgggatccaaccgcaggagcaggggtcacgacgagcggtctgttcactcacctcccgaccttcatagggagcgccgagtggaacgacctcgctcaccacctcgtcgccgccccatcgatcttcgcgacacaatcatacagcgccgagcagctcgcggctaccatcactcgccggatcgccgcgacgacgaccttgacggagttgcagccttcaccgacgacctgcgtcgagtggattggccagccggcttcaaaccgactggaatagagaagtatgacggcaccactaaccccgaatcgtggcttaccgtctacggtctcgcaatccgcgcagcaggaggagacaacaaggccatggcgaactatttaccggtggctttagcagattccgcccgatcttggctccatggattgccccgtggtacgatcggatcttgggctgaattacgcgaccacttcatcgccaacttccaaggcaccttcgagcgtcctggcacacaatatgatctttacaacgttatccagaaatccggagaatcccttcgagagtatatccgacgattttccgaacaacgtaacaagatctccgacatcaccgacgacgtcatcatcgccgcattcaccaaagggattcgccacgaagaattggtcggcaaatttgggcgcaaacctcccagaacagtcaagctcatgtttgaaaaagccaacgagtacgccaaagccgaagacgccgtcaccgcatcgaagcagtcgggtcccagttggaagccgaaaaatacgccggctacgggaggaggtggaagtaacaatcataaggaccgcaagcgtaagcctgaggaacttgttgcaaccgccgctcactcttctcgacagcgttcgcgcgtcaacaccttcgacaagatcatgaactcccaatgcccgcatcatccaaactccaaccacgtggccaaagagtgcttcatctataagcagttcgcggagcaatacaccaagtctactcggaagaactccgacgaggaacaaagcacgtcaaggaagaaggacgacggcgacaccccggttggatttcaagaccaccgcaaggagctcaaccatatcttcggcggccccctggcttatgagtctaaacggaagcagaagttgactgaacgggagatcaatgctgttcagcccgacacgccccagtatcttcgatggtcagagattgcaatcaagtttgaccgctcggatcatcctgaccgagtggtccacccggggcggtaccccctggtactagacccagtggtccgtaatgtcaagcttcgcagaaccctcattgatggtggcagtgcactcaatatcctcttcgctaagaccctggatgatatgcagattcctcgctctgagctaaaaccaagcaatgcgccttttcacggagtaattccaggattatccgcaactccactcggccagatcaccctcccagtcacttttggcactcgggaaaatttccgcacagagaacatcagctttgaagtcgccgatttcgagacagcataccatgccatactcggacgcccggcgttagccaagttcatggccgtcccgcactacacttacatgatgatgaagatgcctggtccccgtggagtcctatccctacggagcgacatcaagcaagccgtcacatgcgacaaggagagttgcgacatggcccaaacccgcgagatggcgtctgcccgagaggaaatccgactggctgcaaccacggtgagcgaaggagaagtgcccgctgccaagatttcaaaaagtggagaaaccgaagccgagactaaaaagattcccttagatccttctgatcctaccaaaactgctgtaataggcgccgagttagattatatctttgcgtggaaaccttcggatatgcccggtattcccagagaggtgattgagcactccttacatgtcaaagaagacgccaagcctattaaacaacgactccgccgatttgcacaagacaggaaggacgcgatcaaggaggagttaaccaagctgttagcagcaggcttcatcaaagaagtccttcatcccgactggctggcaaacccggttctagttcggaagaaaacagggcaatggcgcatgtgtgttgattataccgacctcaacaagtcttgtcccaaagatccttttgggttgcctcgcattgaccaggtagttgactcaaccgccggctgtgagcttctcagttttttggactgctactcggggtatcatcagatccgactgaaggaatccgactgcctgaagacttcattcatcacgccttttggagcatactgctacgtcaccatgccgtttggattaaaaaatgcaggagcaacctatcaacgtatgattcagagatgcttctcaacacaaattggccgcaacgtcgaagcctatgtagatgatgtagtcgtcaagaccaaacaaaaggatgatttgatctcggatctagaagaaacctttgcgagcatccgtgctttcaggatgaaattgaaccctgaaaagtgcaccttcggagtaccgtcagggaagctgcttggttttatggtgtctcataggggcatccaagccaacccggagaaagttactgctatcctcaacatgaaaccgccaagcacccagaaagatgttcagaagctgacgggatgcatggcggcgctcagccgattcgtttcaagacttggcgagcgagggatgcccttcttcaagctactgaagaaaacagataatttccaatggggacccgaagcacagaaggccttcgaagatttcaaacaactcctcaccaagccaccggtcttagcttcaccacacccgcaggagccgttgttgctgtatgtatcagccacctcccaggtcgtgagcacagtcttggttgtcgagcgtgaggaagaaggccatgtccagaaagttcagcgaccaatctacttcgtcagcgaggtcctggccgactccaaaacgaggtaccctcaggttcagaagctgttatatggtattttaattactaccaggaagctgtctcattactttcaaggtcacccggtaacggtggtcacatcgtttccactcggcgatgtactgcacaaccgcgaagcaaatggacggattgctaagtgggctttggagttgatgtctttggacatatcattcaagccccgcacttcaatcaagtctcaagcgttggctgattttgtcgccgagtggaccgagcgccaagaggatacccccgtggagaaaatagagcactggaccatgcattttgacgggtcaaaaagactttcgggcactggagctggagtggttttaatttccccgactggagaaagactaagttatgtgctttggatacatttttcggcgtctcacaacgtcgccgagtatgaggcgctccttcatggactacggattgcaatttccctagggataaagcgtttaatagttcgaggcgattcacagctggttgttaaccaagttatgaaagagtggtcctgccttgacgacaacatgatggcatatcgacaagaagtacgcaaattggaagacaaatttgatggactcgagctcagtcacgttcttcgacacaacaatgaagccgccgacagacttgccaattttggatccaagcgtgagccggcgccctcagatgttttcgtcgaacacctttatacaccgaccgtgcctcataaagatactactcaagatgcggacactcatgacgtagctatggttgaagccgactggcgagagcccctcatacggtttttaacttctcaagagctccctcaagataaagatgaagccgagcggatttcaaggcggagcaaactttatgttatgcacgaatctgagttatacaagaaaagcccttcaggaattctgcaacgctgcgtatctttagaggaagggagacaattgctgaaagatatacattctgggatatgcggaaaccatgctgctgcgcgcaccattgtcggcaaagcttaccggcagggttttttctggcctactgcagtgtccgacgccgacaaaattgtgcgcacatgtgaaggttgccaatttttcgccagacaaattcacttaccagctcaagagttgcagactatcccgctgtcttggccgtttgcggtttgggggctcgacatggttggcccgtttaaaaaggcagtcggcggttacacgcacctcttcgtggccattgacaaattttccaagtggatcgaagctaagcctgttgtcacgattacagcagataatgctcgcgatttcttcatcaacattgtgcacagattcggagtgcccaatcggatcatcaccgataatggcacacaattcaccggcggagttttcaaagacttttgtgaggattttggaattaagatttgctacgcttcagtggcacaccccatgagcaatggacaggtggagcgagccaatggcatgatacttcaagggattaaagcgcgcgtttttgaccggctaaaaccctatgccggtaaatgggtgcaacagctgccgtcagtactttggtctttgcgaactacatccagtcgggccacaggccagtcaccttttttccttgtctatggggcagaagcaatgttgccgagtgaagtcgaatttgagtctttgcgcttccgtaacttccgagaagaacgctacgaagaagaccgagtggacgacttgcaccgactggaagaggtccgcgaagcagctttgattcagtccgctcggtacttacaagggttgcgacgttatcataatcgcaatgttcgatctcgtgcctttctagtcggcgacctggttttacggaaaattcaaaccacacgagatcggcacaagttatctcctctatgggaagggccatttattatctctgaagtcacccggccaggttcatatcgactcaagcgcgaagacggcactctcgtcgacaactcttggaacattgaacatcttcgtcgtttctacgcttaa

SEQ ID NO: 47233 - DNA, 2121 bp, Oryza sativa
  Clone ID: PAT_MRT4530_50021C.1
aaaacaccaacaacgacttcttttatacttttaccatagcatagtatagagacttaattacaacaaaaattgcagtaatgccaacaaacaattaatctttgtaatttctcacttacatgttagttgttgtacgtgtgtgtgtgaacatgacagattagctatctactattgatccaaaactaggggagtatataaaagaataattactgttgcggtttctgacagttggttcgtattaactcgatcttttttttctcatgaacacttgcgagctagctggatgagagaattggccttcctctgcgctctgctggtgccgttcttggcaatgtcggccagatggtcatggagatcgaagccgagggcgtgcgccatgagggcgttgttgctggagcccagctcgagaagaaccgagaccgcgcactccttgttcttgggagtcccttccttgatgatctgcaccagcttctccacgaaatgctccgtcccaacctcgccccggcacgtagggttggaggccagcaggaggaagatggagagcgcctcgtcgaccatggcggccttcttgtcgtcgagcagcttgagcagcgtgggcaggatgccggcctcgatggctctcagcttgttgccattgttgagcatgaggttgaagatggccgtggaggcgtccttcttgcctctgacggtgccgttctgcaggaggtccaccagcggaggtatgcctcccagggtcccaatggcgaccttgttctcgtccaccatggacaggctgaagagcgccgccgcggagttctcctgcccctccacgctgccgttcctgagcacgtcgatgatcaaggggatggccccgcccctggcgatgaggagcttgttggcctcgtcgatggagaggttgagcagcgaggtgacggtgttctcctgcatcttcttgtcggggtaagggaggaggccgatgagcgccgggatgccggcgttgtcggtgacgagcagcctgttctcggggttctccttggacagcgtccggatcttcttgacggccttgcgctgcacgtcgaggttgggcgaggagaggtccttgaccagcgtggggatgaccaccttggggtcctcgggtggctccggcggcgggtcgccggagtggatctccaccttgttcttgtcgcaccattgcatgatgaggttcttgagggcgtagttgggcgccagggagagatggcccagcggctgctgcgtcttggggcacgtcctctgccctgcgtccagccatttctggatgctgcggcgttcataggtgggatcggtcatgatctcgagggagatggggcagaggaagtcgttggggatcatgagggaggggcacttctcgaggtacttggggatgaagacgtcgccgaggatgttcttctcgtcgacgccggcgatggccttgaggcggtggaggaggtcgacaatctggttggtggagtcggactggtggtcgttgatgagcttcttgatggccatggtctcggcgcggaggtcggcgaggctctggagctggaggcgcttggcgaggcggtccaggatggggcggtcggcgttgttggcgtcctgctccttgctctgcaggatcatcatcaggtccatggccagctccatgtcctgcgtctccgtccgcttcttgctccgcttcttcagctgcgcgctgatcagctccacctgctccttcacctcgtccgacacccccagctccgcgtacggcatcccctccagcgccatgttcatcttctcgtacacccccctgaacctccccatcaccgcctcgctctccagcgtcaggtagatcttgctcccgtcgtggcagcaccggaggagccgccgcgccgcctggaacgcccgccccagcagggccagccgccggtacgcgtcgtccgacagcgccggcgccgactcccggagctcctggaccagcgggaggaggagctgcagccaccgcagcaggttgaagcactccttccgctgcgactgccggaactcgtggaacgcgcgcgctgcgttcgccgtcgacaggagctcctcaagcaggtcgccgtcggacagctgccgccccgacggctccgcctccgccaccgccgcgcccat

SEQ ID NO: 47234 - DNA, 336 bp, Oryza sativa
  Clone ID: PAT_MRT4530_50022C.1
ttacttctagatcgcgagccgcctccctattttctaccatcctactctgtggccactaacgggaaattccattcaaaaagcctaccatccactgaatatggattcaggatacatcaccattttatactttaatacaaatccgttcaagatgtttgtccactctacagatggaaaatgaccaaaacacttgcccaaacctgttcatgaacattaaacagcaaaaacataaacctccaaccaggggatgaaaccaacaaaaatgggtactgacatgaaactgagggactttacaggttaaatgccaacatggattctacaggtagctctccacaatgg

SEQ ID NO: 47235 - DNA, 556 bp, Oryza sativa
  Clone ID: PAT_MRT4530_50023C.1
gccggggcgctgccctgacccgctgtccacgccggaccccttcatgggcggcggcttctgcggcttcaacttcacctccggccccgccgccggcagcttctgctgggaccggcagcccgactacagcgcctaccgggagagcagcttcggccatggcattcttgaggtgaagaacgagacgcatgcgttgtggagatggcacaggaaccaggatctgtacggtagtgtcggggatgagatttacattgttcgggagcctgacaagtgcctgatcaaatccagtagaaatagaatagcttactattgattaatttctatcagaagaagagccaaattacgcgggcacattttatagtgctttgctagctagttgtactcagatttgtcaggtaaattccatgcagcgaccggcatctctgctgttgtatacgtgttcttgtaagacatctgaagaatgaatgaagcttaaattgtactttgtaatttagttgtagaaattttggaattattacaagatggaagaaagccttgcaaaataggactgtgcttgttcttc

SEQ ID NO: 47236 - DNA, 385 bp, Oryza sativa
  Clone ID: PAT_MRT4530_50024C.1
ggaaaaagtcaagcgtatctattaaaagacggggttgacatttgagatcatacaccacgcatgtcatgacttacaatggcggaactatagctgtccatgtacaaaccattcctgaacattatgtatgtatcagccctccccatgtgatcgatacacagctccttcttttttcctcacaaaccagaccgagagcttccccagtaccattgattgctttaacatctttgacttgcggcggattacctgtttcttaatggtaccgagtaggtcatcattcggcacgcacacatgatgagcaaactttactagtccaggattttctttgttccctaagttaacagggataaagtgcaggtttcgcatacttaggtgaacagatgctata

SEQ ID NO: 47237 - DNA, 177 bp, Oryza sativa
  unsure (1)..(177): unsure at all n locations
  Clone ID: PAT_MRT4530_50025C.1
gggaaggaccgccacagcaaggtgtacacggccaagggcatccncgaccgncgcgtccgnntctccgtctccaccgccatccagttctacgacctcnaggatcgtntcgggtatgaccagccgagcaaggccatcgagtggctcattaaggccgccgcgncgncatcggcaagctcc

SEQ ID NO: 47238 - DNA, 309 bp, Oryza sativa
  Clone ID: PAT_MRT4530_50026C.1
atgccatcgccacccgggaacagctgccagccccctggatctagccagcccacacgcttgtcgcaccactctcagattcggtttcaacagctaagcacgaggggagggaatgggagagtaggttgttcgaccgccagcttccgcatgacgccgaatctcgccgtcgaggccgtccccgccatcccccatcgccactaccactggagctaccccagccgtagctgcgctgaagcaacctcgtgcccacacagcctgcagctggaccgtcggcggggagagaccacccaatcggccatggcccccctgtaa

SEQ ID NO: 47239 - DNA, 732 bp, Oryza sativa
  Clone ID: PAT_MRT4530_50027C.1
atgaagatgatagaagaaagatccaacttcaagaaggaccatgaagccatccagcactatgccaccacgcaggccattgaaactgatccttggtgcgatgtttgtggaggagatgaccactcgggcaaccattgtcctgaaacaaaggaggatgtgaacttcatcatcatcgtcatcaacaacaatgggtatcgatcccaacaacaacaaggatggaattcacaccccttctgccaaggtaacggaggtaagatccctagtaaacccaaggaacctatcaaatctgtaaatctagtcacaacgaggtttggtaagcctccactaagatcgaggtatggtcatccaagaagggagacaatggtcatccaacaatcacgtgctctgttggatctcaagaattctacaatgccacctgggaccttggctcaagtgtcggcatcatgtccaagtttgaatttgaaagagagtgtgcagaaggaggaagaggggggtggacagacccatgaagcctccacctcaccatctcatgtgttgcatttcgagcttgtcttcgatcttgtgctgctcaaaagaacatttgtggaggttgcttacatcccacaagaacagtttgtgaaagatgaacccattcaacaagatatccaagaaggtgcgagaggccacaatcaagagctcatcaaggcactcctgttattgtcatggttgctctcaaggaggaacctcctctcatga

SEQ ID NO: 47240 - DNA, 176 bp, Oryza sativa
  Clone ID: PAT_MRT4530_50028C.1
gtgttggagaggttgggaccggttaggtcaagtcgcatatgttcaccggaggaaattcagggaaccacctctggtggttcataaacagggtgggtatatagaatcagatggggagctggaagaaggaaacatgggaccccctggaatccttcgccaaagaagaaaaaaaaaaaaaa

SEQ ID NO: 47241 - DNA, 1320 bp, Oryza sativa
  Clone ID: PAT_MRT4530_50029C.1
ctcctccctagggcggcgccagccatttgtatgccacacggggatacaaacgcatgcctgcaacacttcatggaggtctgtggcaccttcaccatcaagggaatcatattggacgccatccgtcttcgccttttgccattctctttgctcaggagggcaaagcaattgttttattggctcttgatccaaggtttctaccatgggctcaccaataccacctgtagtctaacgttggaagagctttcttctcactcaatgtgagggaagagacgaaactcatcaaaaatatggtctccaacccaagaagcaagggatgcacaccatcaatgaggtggacatgccctccgccaggatggacctctagatgaagatgatagaagaaagatccaacttcaagaaggaccatgaagccatccagcactatgccaccacgcaggccattgaaactgatccttggtgcgatgtttgtggaggagatgaccactcgggcaaccattgtcctgaaacaaaggaggatgtgaacttcatcatcatcgtcatcaacaacaatgggtatcgatcccaacaacaacaaggatggaattcacaccccttctgccaaggtaacggaggtaataacttcaataatttcaataatcaacctttattaaaggatcttgtgttaggccaagctaaaattaataaaaatataaataaaaagttgtttgctaatgacaagatcttagacaatttaaatgccaaaatggacagtttttcttctgctctcaaaactcaatcaagctctaataaaatgttagaaacataattagctcaattagcaattgttgtcccatccttcgaacaaggtaagatccctagtaaacccaaggaacctatcaaatctgtaaatctagtcacaacgaggtttggtaagcctccactaagatcgaggtatggtcatccaagaagggagacaatggtcatccaacaatcacgtgctctgttggatctcaagaattctacaatgccacctgggaccttggctcaagtgtcggcatcatgtccaaggtaacatatgataatttgttatgtggtcctttgtccactacttgtataggcctacagctggtcaaccagaccatcccctatcccaaggggattgccaaggatattatggtgaaacttcatgaggactatgtccccacggatttcatagtgcttgacatggggaacaatagtgacacacctcccattcttgggaggccctttctcaacacaatgaacgcatgcatctatgtgggtctagacaaattcacttccactttgttggaaggaaagaaa

SEQ ID NO: 47242 - DNA, 248 bp, Oryza sativa
  Clone ID: PAT_MRT4530_5002C.1
gcgccatgcgttcggtctctgaagggggcaacaatgggactaacatggatctttgtgtaggtgaattacaagacttacatgatgccagggagagatgtattaatacagatctaggaattcagggagacaggaagaactcctgcggtaatgaataagtacagcaataagaacggaagccggaatggatgaagatcgttatcgagagcgatgatctgtgatacgatgctatataaagcgaacgataatat

SEQ ID NO: 47243 - DNA, 485 bp, Oryza sativa
  Clone ID: PAT_MRT4530_50030C.1
tgcaccttttatgggaatgagagcggagatgcacttagagatgtcgaactcctcaatgctgttgccaataattctcatgtcatcaagtttttgactgtcatgaccctttgcaatactgtcattcctataaaaagttctagcggagcaattttatataaagctcagtcccaggatgaggatgctcttgttaatgcagcctctaatttgcatatggtgcttgtcaacaaaaatggaaacactgctgaaattcacttcaacagacgggtggttcaatatgagatacttgacattctagagtttacatctgatcgaaaaagaatgtctgtcgtagtattggattgtgaaagtggaaagatttttctcttatccaaaggtgcagatgaagcaattattccatgtgcttattctggacagcggataaagacatttgttgatgcagtcgacaaatatgctcaactgggattacggacactctgtttgggatg

SEQ ID NO: 47244 - DNA, 375 bp, Oryza sativa
  Clone ID: PAT_MRT4530_50031C.1
atggtgatggcggggctcctttctcactcgaagacgcgaccgatggtggggcaccgaggcaaccgggcgaatgtcacgttgcgcagatccggacctccacgaccagatcttgcgatgaggcttgcgagcggcaggaaagacaaaggagagccagagctcgacggtgcgcatgtggcaatggcgatgacagtgggaaaggggcggggagcggttgtaacgcttgccaagtgtggcggcgaggtggcagttgttaatgcaaaacacaatggcctagaagacctgcttaacttcagtgcaggtccaaatctttgggttcaagagcatgtcagttggtttgatcctacaaccaacaagaaagataatagcaaaaattag

SEQ ID NO: 47245 - DNA, 627 bp, Oryza sativa
  Clone ID: PAT_MRT4530_50032C.1
atggagatggccgccagggtggatctgctcaaggcatggcttccagcaatcttcaaggtacaagaccccggatgcagaccagggcagccgcgcatcctcactgtccccgccgccatcgccattgccatcctgcgagctcggtccctcaccgcgcagagcatgaacctccagttcagccaatactcaggagcagtggtgtcgacggccatggctgatgatggcattgctgcagtgacgaggcgttatgcagccagattcataatacaggatattactactcaaaccatgagaccacggccggtacatctccgcgagcacccggcaccccaccaccgcgtcccaccgcgcgtacgcgtcgccggcgccgctgccagtgccgacgcgttcgccggcgcgcgcgacgacacgagcgcgcccacgtcggccgagcgggacgaggaggcggagaagccgcagcgctcgcacgccccctccgccggcggccgtcgcggcgccgccctcccgcctcaccccggccagcttgcagagaaggcgttacagtggggatggggacaggttgagatctccacccgcgggtccccgtggggccctggaagtactaaaatcgatgttgagttccattggtga

SEQ ID NO: 47246 - DNA, 342 bp, Oryza sativa
  Clone ID: PAT_MRT4530_50033C.1
ggggttgttgtttttttttttttttatatgcccctaatttaaaacaaaaacacggggggggggggggtttttttttaaacaaacaaacaataaaatacatacaattaggaccccaaccccccaaaaaggggcaattttttggggggccctataataatcgggggaaaccccaaatatgggtgggggggggaaggtaaacaaattgggggcttacccggccccggggggccccccgggaatacctgcccggtccctggagggggccccggtttccccattgggggtccttttagaccccggggtaacccggggcattatctttttccggggggaaaaagggac

SEQ ID NO: 47247 - DNA, 249 bp, Oryza sativa
  Clone ID: PAT_MRT4530_50034C.1
atggctcatgctgtctgggtgattgttatggggtttttcactggtgtttgggtcgacaagtgcgatagatttgtcttgtggtgggaggccttctccttccataacaacgaggtggtgtcggccgctcaaatcctctctagcgacgttgctgctattgatttggtgaccttcattgtatccaatccaacggagcatcttgaagattgctgctgcagcagctgtaactacaccaacagtatcagtgtgtag

SEQ ID NO: 47248 - DNA, 291 bp, Oryza sativa
  Clone ID: PAT_MRT4530_50035C.1
atgtgctgcaaggcgattaagttgggtaacgccaggggcgaattcgagctcggtacccggggatcctctagagtcgacctgcaggcatgcaagcttctgcctcctgctactccggccatccctgctctaccgatggccactgcacggcagcacatcgacgtcgcgttgcaggaatgtaatgatgatgtggactgtggtggcacggaagagcgggagggggaagggttgtgcggccggggcaatgaggaagccattacagataaaggagcttacatctgtaacggctcttga

SEQ ID NO: 47249 - DNA, 2862 bp, Oryza sativa
  Clone ID: PAT_MRT4530_50036C.1
atggaaaccactgtgtctttgctgccgcacctgctcgtcaagccttcctcctccttcagctgttgcttcacaatgttcatctctatttctgcacatgtgcacatcaatctaatatcaggcattggtcgtcgatatggaagaatcaaggtgtatgcagtgctcggtgatgatgaagctcaacatgccaagaacaacatgaggggggccttgttccatgtcgataaccccgggccaatggctcccattgcaaaaggcaacttcttggatgttaaccaggcccttgaggtggtccgattcggcatccagtactgcgattggagggcgcggcaggacctcctcaccatcatggttctgcacaacaaggtggtagaggttctcaaatctttagcaatagagttcaagtcaaatggaaccttgaggaaagagcttgcagagttgcaggaagaattggccaaagctcacaatcaggttcatttatcagaaactagagcatcatctgcacttgataagttagcacaagcggataacctggtgaatgacagactgttgcaagacggaggctctagtgcatctatagacaactatgtttctcttgcttcaagaacgtcatcagcgtcccgttttgtgaacaagaaaactctgcgtccgagtctggacgtgtctggtccagtgcagccatacaatcccaatctgaaaaacttctggtacccagttgtcttctccggtgacctgaaagatgatacaatggtaccaatagattgttttgaggagcagtgggtaattttccgaggaaaggatgggagacctggatgtgttcagaacacatgtgctcacagagcctgccctcttcatcttggctcagttagtgagggtagaatccaatgccctttccatgggtgggagtattcaactgatggaaaatgtgagaaaatgccagccacgaagttgctcaatgtgcgcatccggtcattgccatgctttgagcaagaaggcatggtttggatctggcctggtgatggcacaccggagtcgactatcccttctctgcagcccccttcaggatttacaattcatgcagagatggtgatggagctaccggtggagcatggacttctgctggacaatctattagatattgctcatgctccttttgctcatacgtccacctttgccaagggttggagtgttccaagcttggtgaagttcttgacacctgcatctgggctccaagggtactgggatccttaccccatcgacatggagtttcgaccgccatgcatggtcttgaatgaggacctacggcttgtgcttgggcagcaagagcggatgataaatggcgcgaacgtatggaactggccagtgtcatatgacaagcttggtatccggtatcggttatggagagacgccattgagaggggagcaaacaggttgccattcaataaccaaagtcattctttaggtgctaggtctgcctcaatcctcagtaggagaagcagcaggcagggttcaaggggatccatcagcctctcccgtgagatgggggactcgatactgagctcgatgaggcattcgcttcaatcagcagaccagttgctaggtgatgtagatggctcagttcttgctcaggtcattgacagtggtgaccgagggctagcatttgaaaacgacgttgacgaagaggaagagaataatgtggaggatcatcaggctgttcctctcccagatgatacatcaatgcggattcatggcagaagctctcaaggcacaagtgtggtggcacccgtatctgcgatgaagccaaaagatactaatgttaacggcccagccagttcatctatcaaggttgaaccatataagctttcatggatgcaagattatgcttcttacctgatccatttagccgtatttggatttcttggggtatttacaaggtatgggctccaaaaactgtttggccctagctgcctggcactcacctcagaccaaagcccactgtaccttgaccttccatctaacatgctaggatctttcctgatgggctggtttgggatcatcttcaaggctgatatacgtcacatatctgatcatctcattgtcggaatcacgacaggctacatgggaagccttaccaccttcagtgggtggaaccagaaaatggttggcctatcttccaaaggccactgggtatatgctgtagctggcatagtactaggaatgtttatcgtcaatgagtccatcacggtgggtgcggaaactggtgagcgactgcgaggatggatcctgaaatgcatcatagagaagaattcaataggaagcaaatgcggctgggaggactggagggtggacaccaggaccaaacattatgcgcttcttggagttatggtgattctgatgtctttgatatggatcctgagcattgtgctggccatagtgaaggtgcatagccttggccatggcgcggttctgtggctgggttgctcggtagcacctcccggtgtttggcttcgctggtacttggcgaggctaaatggcggaggaattggaatcggcaagcggagacacctcaaatggcttcccgttggaacacttgcagccaatgttcttgcagcagcaatcatggcagctcttgctgtcacggctaaagcggaaaatacaagacgattgactactgttcttaatggcatacagctcggtttcctcggttgcttgagcacagtatcaacttttgctgctgaagtttacaccatgagaagaagtggtcagattgcaagggcatttgtatatgctgcagccaccttcgttctctcatttgtgctaggaactctgatatactcagtgccggtgtgggtagagcattactga

SEQ ID NO: 47250 - DNA, 379 bp, Oryza sativa
  unsure (1)..(379): unsure at all n locations
  Clone ID: PAT_MRT4530_50037C.1
nnccggccgggnaaaaaaaaaaaaaaaaaaaaaacgactagatgaagaggagtgttggattaagtcacttaacaattaattaggagtgatttaattttggtcatagacatggttgttgcaaatgatgcggcaactacccaaaaaaaagcccctcatttctctctctcttccacctccagccttccctcctcctgctgctcctccactgcagcaaaaagcaagcaacctcaccgaggaggggaatggaatggagctgagccttctccccgccccacgcgtgtagccgccgccgccggcgagcaggtttggagtgggggcgacgcggccgtgaatagcaggtcttgtgtccggttcgaatcgaaagggcggtcccagtgcc

SEQ ID NO: 47251 - DNA, 10317 bp, Oryza sativa
  Clone ID: PAT_MRT4530_50038C.1
atgggtccttcctccggcatcgacgacctcgtcttcccacccgggcagacgtttcggttcggcagcctcgacttcgtcaccgacaatttcggcaagatttctctccttgacttggaatcggaccagtcgggagagaaccggatctcagtcccgtttggattcccaaacgcggctgaaacctacttcaagaccatctcaatcgagtcggcttcaaaccactcggctgagatcgcatcttctccaacgacaccagatcaagatgatggggcttacccaccagtcctgatgaagctccccgacgatttagcggccgtctccaccacgacagcgtcttcatcccgtaggcctatgcggaagtcggtctcaacaccgatttcgcctagcttcagggaagtcggcgtcatcctccaaccactcggcacggtttcgacggatcagctagatgaccactacagctctcccaccgtcgactcgcgccccaccgacatcgtggagtacgatgagtttagctctcgctaccacgacttcgacgacttcgacgacttcgacggaagcctagatgacaactacacccctctctactttggcgttttcatggccaataatgagacggaggagcaacgccaagcccgggagaccgaagaacgtcgccgactggaagaggagcagcaagcacaagaacaggaacggctacggcgtgagcagcaggaccgtgagcggatcgccaaggaggctgaagatcgacgtcagcgagctttggaagcagggcgccgagcgcgtgatctcatcggccaacaagacgtcgaagggacaccggttttccgcacccctcaacagaatgcggttgccgcgatcacccttctcgacaccctcctcaaccaaaacgagctcaatcgttccgaccacgtcgtcaacatcttgaaccagacgaagaccatgatcgcggcttcggtcccagttaactccgaaagcgtccacacgccgactggcagccgagtcccccacttccgatctcaggactaccgtcatccaagcctcagcatcaccggtgcaggatccaatcgcaggagcaggggtcacgacgagcggtccgtgcactcgcctcccgactaccgtggggagcgccgagtagaacggccacgttcaccgcctcgtcgccgccccatcgatcttcgcgacacaatcatacagcgccgagcagctcgaggccgtcaccactcgccagaccgctacgacgacgaccttgatggggtagcagccttcaccgacgacctgcgtcgagtggattggccagccggcttcaaaccgactggaatagagaagtacgacggtaccactaacccagaatcgtggctcaccgtctacggtctcgcaatccgcgcagcaggaggagacaacaaggccatggcgaattatttaccagtggctttggcagattccgcccgatcttggctccatggactgccccgtggtacgatcggatcttgggccgaattacgcgaccacttcatcgccaacttccaaggcaccttcgagcgtcctggcacacaatatgatctttacaacgttatccagaaatccggagaatcccttcgagagtatatccgacgattttctgaacaacgtaacaagatctccgacatcaccgacgacgtcatcatcgccgcattcaccaaagggattcgccacgaagaattggtcggcaaatttgggcgcaaacctcccagaacagtcaagctcatgtttgaaaaagccaacgagtacgccaaagccgaagacgccgtcaccgcatcgaagcagtcgggtcccagttggaagccgaagaatacgccggctacgggaggaggtggaagtaacaatcataaggaccgcaagcgtaagcctgaggaacttgttgcaaccgccgctcactcttctcgacagcgttcgcgcgtcaacaccttcgacaagatcatgaactcccaatgcccgcatcatccaaactccaaccacgtggccaaagagtgcttcatctacaagcagttcgcggagcagtacaccaagtctactcggaagaactccgacgaggaacaaagcacgtcaaggaagaaggacgacggcgacaccccggctggatttcaagaccaccgcaaggagctcaaccatattttcggcggccccatggcttacgagtctaaaaggaagcaaaagctgaccgaacgggagatcaatgctgttcagcccgacacgccccaatatcttcgatggtcagagatcgcaatcaggtttgaccgctcggatcatcctgaccgagtggtccacccggggcggtaccccctggtactagacccagtggtccgtaacgtcaagcttcgcagaaccctcattgatggcggcagtgcactcaatatcctcttcgccaagactttggatgatatgcagatccctcgctccgagctgaaaccgagcaatgcgccttttcatggagtaattccaggattatccgccactccactcggccagatcacccttccggtcacttttggcactcgggaaaacttccgcacagagaatatcagctttgaagttgccgatttcgagacagcataccatgccatactcggacgcccggcgttagccaagttcatggccgtcccgcactacacgtacatgatgatgaagatgcctggtccccgaggagtcctaaccctacggagcgacatcaagcaagctgtcacatgcgacaaggagagttgcgacatggcccaaacccgcgagatggcgtctgcccgagaggaaatccgactggctgcaaccacggtgagcgaaggagaagtgcccgctgccaagatttcaaaaagtggggaaactgaagccgagactaaaaagattcccttagatccttctgatcctaccaaaactgctgtaataggcgccgagttagattatatctttgcgtggaaaccttcggatatgcccggtattcccagagaggtgattgagcactccttacatgtcaaagaagacgccaaacctattaaacaacgactccgccgatttgcacaagacaggaaggacgcgatcaaggaggaattgaccaagctgttagcagcaggcttcatcaaagaagtccttcatcccgactggctggcaaacccggttctagttcggaagaaaacagggcaatggcgcatgtgtgtcgattacactgaccttaacaaatcttgcccaaaagatcctttcgggttgcctcgcattgaccaggtagttgactcaaccgccggctgcgagcttctcagttttctggattgctactcggggtatcatcagatccgactgaaggaatccgactgcttgaagacttcattcatcacgccttttggggcatactgctacgtcaccatgccgttcggactaaaaaacgcaggagcaacttatcaacgcatgattcagagatgcttctcaacacagatcggccgcaacgttgaagcctatgtggatgatgtagtcgtcaagaccaagcaaaaggatgatttgatctcggatctagaagaaacctttgcaagcatccgtgctttcaggatgaaattgaatcctgaaaagtgcaccttcggagtaccgtcagggaagctgcttggttttatggtgtctcataggggcatccaagccaacccggagaaagttactgctatcctcaacatgaaaccgccaagcacccagaaagatgttcagaagctgactggatgcatggcggcgctcagccgattcgtttcaagacttggcgagcgggggatgcccttcttcaagctactgaagaaaacagataatttccaatggggacccgaagcacagaaggctttcgaagatttcaagcaactcctcaccaagccaccggtcttagcttcaccacacccgcaggagccgttgttgctgtatgtatcagccacctcccaggtcgtgagcacagtcttggttgtcgagcgtgaggaagaaggccatgtccagaaagttcagcgaccgatctactttgtcagcgaggtcctagccgactccaaaatgaggtaccctcaggttcagaagctgttatatggtattttaatcactaccaggaagctatctcactactttcaaggtcactcggtaacggtggtcacatcatttccactcggtgatatactgcacaaccgcgaagcaaacggacggattgcaaagtgggctttggagttgatgtctttggacatatcattcaagccccgaatttcaatcaagtcccaagcgttagctgattttgtcgccgaatggaccgagtgccaggaggatacccccgcggagaagatggagcactggaccatgcattttgacgggtcaaaaagactttcgggcactggagcaggagtggttctaatttcaccaactggagaaagattaagctatgtactttggatacatttttcggcgtcccacaacgtcgccgagtatgaggccctccttcatgggctccggattgcaatttccctagggataaagcgtctaatagttcgaggcgattcacagttggttgtcaaccaagttatgaaagagtggtcctgccttgacgacaacatgatggcatatcgacaggaggtacgcaaattagaagacaagttcgatggactcgagctcagtcatgttcttcgacacaacaatgaagccgctgacagacttgccaactttggatccaagcgcgaggtggtgccctctgatgttttcgtcgaacacctttacacgccgacagtacctcccaaagatactactcaagtcgcgggcactcatgacgtagctatggttgaagccgactggcgagagcccctcatacgatttttgacttctcaagaactcccccaagacaaagatgaagccgagcggatttcaaggcggagcaaactttatgttatgcatgaagctgagttatacaagaaaagcccttcaggaattctgcaacgctgcgtatctttagaggaagggagacaattgctgaacgacatacattccgggatatgcggaaaccatgctgctgcacgcaccattgtcggcaaagcttaccggcagattgtgcgcacatgcgaaggttgccaatttttcgccagacaaattcatctaccagctcaagagttgcagaccatcccgctgtcttggccgtttgcggtttgggggctcgacatggttggcccgtttaaaaaggcagtcggcggttacacgcatctctttgtggccattgataaattttccaagtggattgaagctaaaccggttgccacaataacagcagataacgctcgagacttcttcatcaacattgtacatagatttggagtgcccaatcggatcatcacggataatggcacacaattcactggcggagtttttaaagacttttgtgaggactttggaattaagatttgctatgcctcagtggcacaccccatgagcaatggacaggtggagcgagccaatgcagctcgaggctatcatcactcgccggaccgccacgacgacgaccttgacggagtagcagccttcaccgacgacctgcgtcgagtggattggccagccggcttcaagccgactggaatagagaagtacgacggtaccactaacccagaatcgtggcttaccgtctacggtctcgcaatccgcgcagcaggaggagacagcaaggccatggcgaactatttaccagtggctttagcggattccgcccgatcttggctccatggattgccccgtggtacaattggatcttgggctgaattacgcgaccacttcatcgccaacttccaaggcaccttcgagcgtcccggcacacaatacgacctctacaacgttattcagaagtccggagaatcccttcgagattacatccggcgattttctgaacaacgtaacaagatctccgatatcaccgacgacgttatcatcgccgcattcaccaaagggattcgccacgaagaattggtcggcaagttcgggcgtaagcctcccaggacagtcaagcttatgtttgaaaaagccaacgagtacgccaaagctgaagacgccgtcaccgcatcaaagcagtcgggtcccagttggaagccaaacaagggtacgccggctacgggaggaggtggaagtaacaatcataaggaccgcaagcgtaagcctgaggaacttgttgcaaccgccactcactcttctcgacagcgttcgcgcgtcaacacgttcgacaagatcatgaactcccaatgcccacaccatcctaactccaaccatgtggccaaagattgtttcgtctacaagcagttcgcggagcaatacaccaagactacacggaagaactccgacgaagaacaaagcacgtcgaggaagaaggacgacggtgacaccccggcaggatttcaagaccaccgcaaggagctcaaccatatcttcggcggccccctggcttatgagtccaaaaggaagcagaagttgaccgaacgggagatcaatgctgttcagcccgacacgccccaatatcttcgatggtcagagattgcaatcaagtttgaccgctcggatcatcctgaccgagtggtccacccggggcggtaccccctggtactagacccagtggtccgtaatgtcaagcttcgcagaaccctcatcgacggtggcagtgcactcaatatcctcttcgccaagaccttggatgatatgcagattcctcgctccgagctaaaaccaagcaatgcgccttttcacggagtaattccaggattgtccgcaactccactcggccagatcaccctcccggtcacttttggcactcgggaaaacttccgcacagagaatatcagctttgaagtcgccgatttcgagacagcataccatgccatactcggacgcccggcgttagccaagtttatggccgtcccgcactacacttacatgatgatgaagctgcctggtccccgaggagtcctatccctacggagcgacatcaagcaagccgtcacatgcgacaaggagagttgcgacatggcccaaacccgcgagatggcgtctgcccgagaggatatccgactggctgcagccacggcgagcgaaggagaagtgcccgctaccaagatttcaaaaagtggagaaagcgaagccaagactaaaaagattcccctagatccttctgattctactaaaactgctaacaataaagatatctttgcgtggaaaccatctgatatgcccggtattcctagagaggtgattgagcactccttacatgtcaaagaagatgccaagcctatcaaacaacgactccgccgattcgcacaagacaggaaagatgcgatcaaggaggaattaaccaagctgttagcggcaggcttcattaaagaagtccttcatcccgactggctggcaaacccggttctagttcggaagaaaacggggcaatggcgcatgtgtgttgattatacggacctcaacaaatgttgccctaaagatccttttgggttgcctcgcattgaccaggtagtcgactcgaccgccggctgtgagcttctcagttttttggattgctactcggggtatcatcagatccgactgaaggaatccgactgcttgaagacttcattcatcacgccctttggagcatattgctacgtcaccatgccgttcggactaaaaaacgcaggagcaacttatcaacgtatgatccagagatgcttctcaacgcagatcggccgcaacgttgaagcctatgtggatgatgtagtcgtcaagaccaagcaaaaggatgatttgatctcggatctagaagaaaccttcgcaagcatccgcgctttcaggatgaaattaaaccctgaaaagtgcaccttcggagtaccgtcagggaagctgcttggttttatggtgtctcataggggcatccaagccaacccggagaaagttactgctatcctcaacatgaaaccgccaagtacccagaaagatgttcagaagctgactggatgcatggcggcgctcagccgatttgtttcaagacttggcgagcgggggatgcccttctttaagctactgaagaaaacagatgatttccattggggacccgaagcacagaaggccttcgaagatttcaagaaactcctcaccgagccaccagtcttagcctcaccacacccgcaggagccgttgttgctgtatgtatcagccacctcccaggttgtgagcacagtcttggtcgttgagcgcgaggaagatggccatgtccagaaagtccagcgaccgatttactttgtcagcgaggtcctagccgactccaaaacgaggtaccctcaggttcagaagctgttatatggtattctaattactaccaggaagctatctcactactttcaaggtcacttggtaacggtggtcacatcatttccactcggtgatatactgcacaaccgcgaagcaaacggacgaattgctaagtgggctttggagttgatgtctttggacatatcattcaagccccgaatttcaatcaagtcccaagcgttagctgattttgtcgccgaatggaccgagtgccaggaggatacccctgcggagaaggtggagcactggaccatgcatttcgacggatcgaagcgactttcgggcactggagcaggagtggttttaatttccccaactggagaaagattaagctatgtgctttggatacatttttcggcgtcccacaacgtcgccgagtatgaggcgctccttcatggactgcggattgcaatttccctagggataaagcgtctaatagttcgaggcgattcacagctggtcgtcaaccaagttatgaaagagtggtcctgccttgacgacaacatgatggcatatcgacaagaggtacgcaaattggaagacaagttcgatggactcgagctcagtcacgttcttcggcacaataataaagccgccgacagacttgccaactttggatccaagcgcgaggtggcgccctccgatgtcttcgtcgaacacctttatgcgccgacagtacctcacaaagatactactcaagttgcgggcactcatgacgtagctatggttgaagccgactggcgagagcccctcatacgatttttgacttctcaagaactcccccaagacaaagatgaagccgagcggatttcaagacgaagcagactttatgttatgcatgaagctgagttgtacaagaaaagcccttcagggatcctgcaacgctgcgtatctttagaggaagggagacaattgctgaaagacatacattctgggatatgcggaaaccatgctgccgcacgcaccattgtcggcaaagcttaccggcagggtttcttttggcctactgcagtgtccgatgccgacaagattgtgcgcacgtgtgaaggttgccaatttttcgccagacaaattcatctaccagcccaagagttgcagaccatcccactgtcttggccgtttgcggtttgggggcttgacatggttggcccgtttaaaaaggcattcggcggttacacgcacctctttgtggccattgacaaattctccaagtggattgaggctaaaccggttgtcacaatcacagcagataacgctcgagacttcttcatcaacattgtgcatagatttggagtgcccaatcggatcatcactgataatggcagacaattcactggcggagtttttaaagacttttgtgaagactttggaattaagatttgctatgcatcagtggcgcatcccatgagcaatggacaggtggagcgagccaatggcatgatacttcaagggattaaagcgcgtgtttttgaccggctaaaaccttatgccggcaaatgggtggaacagctgccatcagtactttggtctttgcgtactacacccagtcgggccacaggccagtcaccttttttccttgtctatggggcagaagcaatgttgccgagtgaagtcgaattcgagtctttgcgctttcgtaatttccgcgaagaacgctacgaagaggaccgagtggatgatttgcaccgattggaagaagtccgcgaagcagctttgattcagtcggctcgatacttacaagggttgcgacgttatcataatcgcaatgttcgatcccgtgcctttctagtcggcgacctagttttaaggaaaattcaaactacacgagatcggcacaagttatctcctctatgggaagggccatttatcatctctgaagtcacccggccaggttcctatcgactcaagcgcgaagacggtacactcatcgacaattcttggaacatcgaacatcttcgtcgtttctacgcttag

SEQ ID NO: 47252 - DNA, 645 bp, Oryza sativa
  Clone ID: PAT_MRT4530_50039C.1
atggcgcgtcatcgtcccatgaccgccgtcttcttcgtcttcgtcgtcgcactactgtcgtcggcttctccggcgacagccaaggcgacaccggcggcgccgccatgcgtggcgccgccggcggcagtggcgttcctccgcgcgagctgcgccagcacgctgtaccggctgacctgctacgacgcgctcatcccctccgggtgcgcgttccagaccagcacggtgaagctcgcccgcgccgctgccgacgtcaacgcggcgagcctcaagaacctgacggcgcgggccaaggagctcgtggcccacggcgtccccggcgaggcccccgcgatcgccgccgagatccgcgactgcgcgagcgcgtcgtcgtcggcgtccggccacgccaaggagacggccgccgagctcgcgaggctcgacgccatgggggacgccgccaaggggagccaggcgaggtgggcggtgtccaacgcgaagacgtggctcagcgccgcgatgaccaacgaggccaactgcgccgacgcgctctcgtccacgggcgccgccgtgtcgccggccgcgagggagttgatcgccggtgtggtgatggccaagcagtacaccagcatcgccctctcgtttgtcaataccataccggtttcttga

SEQ ID NO: 47253 - DNA, 1085 bp, Oryza sativa
  Clone ID: PAT_MRT4530_5003C.1
acctcccgcgcccgtttccttcctccccggccactctctcccccttccaaccctatttaaaccctccccgcacctcctccgttcgtttccgcctctcgccgcccttcctcctcgccggattcgagctcgcgacgtcgctctctctctccgtcatcgccgccgagctccggtccgccgccgtcgtcgccccggaccgcctcccacctcggcgccgcctccttcggcttcgccgcatcctcgccgacctcgtccacctctccgtttcggtcaccgaccgccggagcaccgccgtccccgtcgacccgagctgcgccaccgcctccctccgctccggccacctcctccgtcgccgccgtcgccccgggcgtcgcagccacctcctctccaccggcctgccctccgtttcacgcggtgaccgccggaggcgcgttcccgccgttgtccagtggcattgccaccactgtaccacctccagccgcccctgccgcgccgctcaggtgcgtgccggccgcgccgtctcctccttcggcgtcgccgcgtcgacctccaccccggcctgctctctgattcgtccggagaccgccgtcgccgcgccggcctctccatcctcttcgtcgccggcgtcctttcggccgccccttcctcctccccggctcgtcggctcgctgcgccaccaccacccccggcattgcagcggcaaggtcgccctcggcctcgcctcccctttgtccaaacccctccgcgatccatcgtcgtcgtctccgttcgttctcgtcgtcgacgtcccgtcgatcgcccggctcgtcgtctggctgcgctgccaccgtcgtgggcatcgctgcagcgtgtcccacgccgtcctcacctccgtgcagctgctgccggctgccctcgtcgcctccctgtcggtcgtcgtcttcctccttcctcctcattgtggcgttcgtccctccgtcaagccgatcgcgttcgccgcccgcgtttcgtcaagtgtgcagcagccccgtcatggtcctcgtcctcggctccgcgtcgtcaagccttgtgccagccgcgtctcgccttcgtccaaggatcgccgctga

SEQ ID NO: 47254 - DNA, 5934 bp, Oryza sativa
  Clone ID: PAT_MRT4530_50040C.1
atgttggattttctccaaatcatacaatcaataacacactcggcggattcatccccggacaggagtaggtttcgacagttggcgcgccaggtaggggtagcgtcaagcttttcgccgatcagtgcaataggttccgtctccggcatcgacgacctcgtcttcccacccgggcagacgtttcggttcggcagcctcgacttcgtcaccaacaacttcggcaagatctctctccttgactcggaatcagaccagtcgggagagaaccggctttcagttccgtttggactcccaaacgcggctgaaagttacttcaagaccatctcaaccgagtcggcttcaaaccactcggccgagatcgcatcttctccaacgacaccagatcaagatgaaggggcttacccaccagtcctgatgaagctccccgacgatttagcggccgtttccaccacgacagcgtcttcatcccgtaggcctaggcggaagtcggcttcaacaccgatttcgcctagcttcagggaagtcggcgtcatcctccaaccactcggcacggtttcgacggatcagctggatgactacaacagctctcccaccgtcgactcacgtcctactgacatcgtggagtacgacgaatttagttctcgctacaacgacttcgacgacttcgacggaagcctagatgacaactacacccctctctactttggcgttttcatggccaataatgagacggaggagcaacgccaagcccgggagaccgaagaacgtcgccgactggaggaggagcatcaagcacaagaacaagaacggctacggcgtgagcagcaggaccgtgagcggaccgcgaaggaggctgaggatcgacgtcagcgagctttggaagcagggcgccgagcgcgtgatctcatcggccaacaagatgtcgaagggacaccggttttccgcacccctcaacagaatgcggttgccgcgatcacccttctcgacactctcctcaaccaaaacgagctcaatcaatccgaccacgtcgtcaacatcttgaaccagacaaagaccatgattgcggcctcggtcccagttaactccgaaagcgtccacactccgactggcagccgagtcccccacttccgatctcatgactaccgtcatccaagcctcagcatcaccggcgcaggatccaaccgcaggagcaggggtcacgacgagcggtctgttcactcacctcccgaccttcatagggagcgccgagtggaacgacctcgctcaccacctcgtcgccgccccatcgatcttcgcgacacaatcatacagcgccgagcagctcgaggctaccatcactcgccggaccgccacgacgacgaccttgacggagtagcagccttcaccgacgacctgcgtcgagtggattggccagccggcttcaagccgactggaatagagaagtacgacggtaccactaaccccgaatcgtggcttaccgtctacggtctcgcaatccgcgcagcaggaggagacagcaaggccatggcgaactatttaccagtggctttagcggattccgcccgatcttggctccatggattgccccgtggtacaattggatcttgggccgaactacgcgaccacttcatcgccaacttccaaggcaccttcgagcgtcccggcacacaatatgatctctacaacgtcattcagaagtccggagaatcccttcgagattacatccggcgattttctgaacaacgtaacaagatctccgacatcaccgacgacgtcatcatcgccgcattcaccaaaggaattcgccacgaagaactagtcggcaagtttgggcgtaagcctcccaggacagtcaagcttatgtttgaaaaagccaacgagtacgccaaaactgaagacgccgtcaccgcatcaaagcagtcgggtcccagttggaagcaaaacaagggtacgccggctacgggaggaggtggaagtaacaatcataaggaccgcaagcgtaagcctgcggaacttgttgcaaccgccagtcactcttctcgacagcgttcgcgcgtcaacacgttcgacaagatcatgaactcccaatgcccgcaccatcctaactccaaccacgtggccaaagattgtttcgtctacaagcaattcgcggatcaatacaccaagactgcacggaagaactctgacgaagaacaaagcacgtcgaggaagaaggacgacggcgacaccccggcaggttttcaagatcaccgcaaggagctcaaccatatcttcggcggccccctggcttatgagtctaaacggaagcagaagttgactgaacgggagatcaacgctgttcagcccgacacgccccagtatcttcgatggtcagagattgcaatcaagtttgaccgctcggatcatcctgaccgagtggtccacccggggcggtaccccctggtactagacccagtggtccgtaatgtcaagcttcgcagaaccctcatcgacggtggcagtgcactcaatatcctcttcgccaagaccttggacgatatgcagattcctcgctccgagctaaaaccaagcaatgcgccttttcacggagtaattccaggattatccgcaactccactcggccagatcaccctcccagtcacttttggcactcgggaaaacttccgcacagagaacatcagctttgaagtcgccgatttcgagacagcataccatgccatactcggacacccggcgttagccaagttcatggccatcccgcactacacttacatgatgatgaagatgcctggtccccgaggagtcctatccctacggagtgacatcaagcaagccgtcacatgcgacaaggagagttgcgacatggctcaaacccgcgagatggcgtctgcccgagaggatatccgactggctgcagccacagcgagcgaaggagaaatacctgctaccaagacttcaaaaagtggagaaagtgaagccaagactaagaagattcccctagatccctctgatcctactaaaactgctaacaataaagatatctttgcgtggaaaccatctgatatgcccggtattcctagagaggtgattgagcactccttacatgtcaaagaagatgacaagcctatcaaacaacgactccgccgatttgcacaagacaggaaagacgcgatcaaggaggaattaaccaagctgttagcagcaggcttcatcaaagaagtccttcatcccgactggctggcaaacccggttctagttcggaagaaaacaggacaatggcgcatgtgtgttgattatactgacctcaacaaatcttgccctaaagatccttttgggttgcctcgcattgaccaggtagtcgactcgaccgccggctgtgagcttctcagttttttggattgctactcggggtatcatcagatccgactgaaagaatccgactgcttgaagacttcattcatcacgccttttggggcatattgctacgtcaccatgccgttcggactaaaaaacgcaggagcaacttatcaacgtatgatccaaagatgcttctcaacgcagatcggccgcaacgttgaagcctatgtggatgatgtagtcgtcaagaccaagcaaaaggatgatttgatctcggatctagaagaaacctttgcgagcatccgtgctttcaggatgaaattgaaccctgaaaagtgcaccttcggagtaccgtcagggaagctgctcggctttatggtgtctcataggggcatccaagccaacccggagaaagttactgctatcctcaacatgaaaccgccaagtacccagaaagatgttcagaagctgactggatgcatggcggcgctcagccgatttgtttcaagacttggcgagcgggggatgcccttctttaagctgttgaagaaaacagacgatttccagtggggacccgaagcacatagggccttcgaagatttcaagaaactcctcaccgagccacccgtcttagcttcaccacatccgcaggagccgttgttgctgtatgtgtcagccacctcccaggttgtgagcacagtcttggtcgtcgagcgtgaggaagaaggccatgtccagaaagtccagcgaccgatttatttcgtcagtgaggtcctatccgactccaaaacgaggtaccctcaggttcagaagctgttatatggtattctaattactaccaggaagctatctcactactttcaaggtcactcggtaacggtggtcacatcatttccactcggtgatatactgcacaaccgcgaagcaaacggacgtattgctaagtgggctttggagttgatgtctttggacatatcattcaagccccgaatttcaatcaaatcccaagcgttagctgattttgtcgccgaatggaccgagtgccaggaggatacccccgcggagaacatggagcactggaccatgcattttgacggatccaaacgactttcgggcactggagcaggagtggttttgatttccccaactggagaaagattgagctatgtgctttggatacatttttcggcgtcccacaacgtcgccgagtatgaggccctccttcatggactgcggattgcaatttccctagggataaagcgtctaatagttcgaggcgattcacagctggttgtcaaccaagttatgaaagagtggtcctgccttgacgacaatatgatggcatatcgacaagaggtacgcaaattggaagataagttcgatggactcgagctcagtcacgttcttcgacacaataatgaagccgccgacagacttgccaactttgggtccaagcgtgaggtggcgccctctgatgttttcgtcgaacacctttatacaccgacggaagggagacaattgctgcaggacatacattctgggatatgcggaaaccatgccgctgcacgcaccattgtcggcaaagcttaccggcagggttttttctggcctactgcagtgtccgacgccgacaagattgtgcgcacgtgcgaaggttgccaatttttcgccagacaaattcatttaccagctcaagagttgcaaactatcccgttgtcttggccgtttgcggtttgggggcttgacatggttggtccgtttaaaaaggcagttggcggttacacgcatctctttgtggccattgacaaattctccaagtggattgaagctaaaccggttgtcacaattacagcagataatgctcgagacttcttcatcaacattgtgcatagatttggagtgcccaatcggatcatcactgataatggcacacaattcactggcggagtttttaaagacttttgtgaggactttggaattaagatttgctatgcctcagtggcgcaccccatgagcaatggacaggtggagcgagccaatggcatgatacttcaagggattaaagcgcgtgtctttgaccggctaaaaccctatgccggcaaatgggtgcaacagctgccatcggtgctttggtctttgcgaactacacccagtcgggccacaggccagtcaccttttttccttgtctatggggcagaagcaatgttgccgagtgaagttgaattcgaatctttgcgctttcgaaatttccgtgaagaacgctacgaagaggaccgagtggatgacttgaaccgattggaagaagtccgcgaagcagctttgattcggtcggctcgatacttacaagggttgcggcgttatcataatcgcaatgttcgatcccgtgcctttctagtcggcgacctggttttgaggaaaattcaaactacacgagatcggcacaagttatctcctttatgggaggggccatttatcatctctgaagttactcgaccaggttcttatcgactcaagcgcgaagacggtactctcgtcgacaactcttggaacattgagcatcttcgtcgtttttacgcttaa

SEQ ID NO: 47255 - DNA, 1829 bp, Oryza sativa
  unsure (1)..(1829): unsure at all n locations
  Clone ID: PAT_MRT4530_50041C.1
aagcgaaaagatgaggctcttgatttagaatgtaaccatgtttacatgataatataaaccatgcgtattatatgattcttgagaagcgaaatgcatatgccattcaagttgcccctaggagaaaggtgtgtccacttcgtttgttccaaaactgtatgcagcaaagaaacaagaagctgtcctaattcgtgtcggcgtgtcatcttcagtaaacttatgtacaaaggagggcgcggccacattcatgagtaaggccgctcactatagtacagtattgttggcctgagatccccaaaacatgttcattgcgccctgccgttgcaattcccggtagccttcctcctccatgaacctgccattcttgagcaggccacgggcggcaaaccccatgagctcagaagggtccgtgtgctgtctgaagaagagcggaacaccgaaattggagcagatctcggcacttggagctgcaggaacgcattgttccgtgtgtagctcatgcttggcttgctcaggttccaggtgtagttcaggcttggcatgttcagattccaggtgtagtacaggcttggctttcttcaacggctcttgcacgtctgaaggttctggtgacagcattgaactctccatgccaaatgcttcccaatcaacctgctgccacagtcgggtaccatagttgacagtatcacgggcatgatgatgttggagttcagatttctgctctgctgctaatctatcgacttcggctttcagttcctgcagtctctgcccaatcctttctgttgctttgtcatacaaaatgcctctagagatgtgttgggtttcatcgctgttgtcaatgataaggtcgttgaagttgattggatcaccaacaaccacaatcacccttttgcctgctcttggaatacgttttccgacaggcattatatcctgcattcctgtatggacaaagggtattacaactggaaggctgtcagcgtccattaccaatcttccaacacctctcttggcaggagcgacggttttccctccatcctttgaacgacttccttctgggaaaatatgaacccatccaccattgttcaactttgaaagtgccatgtccattcccttttggtagatgccatcgccacgagaaacaggtagcactttaacagacctgaagaatgtagacaaaattggatttgtaaagcaacgatcactcgcacataatgtccatctcagcttttgagcttccaacatgactgatggtgggagaattgacgcaattacaaagggatcatccatagctgccacatgattgctgaccgttaggagaggcttgcctttaggtctctcctgtaatgcctgctgaagtttctctgcaccataaatctgaacagagttgaggccatgcataaaaatatgacaagcattgccaataagaggaacagccaatgcttgaagcgaccgaaaaataacagaatcttcaattccatcaacctccttgcccactttctttctgtagaacctcaaagcactcgatgatggcttcgccgcggccgccacctgggacgtccccggagacgaggagatctgatccgtactcttctccctctgccacaggctccgcacgcgttccgtccactgccggaccgcctcggaggcgacgcgcccgtccccgcgccgccacagccaccgccggtccacgggcgccacgccgacgcggaacctgctgcggatctgcgccccgaccaccctggcccggtccccccacggtaccccgccgccgcccgccattggggccatttggggattagggtttcgcntgaagcgtatctgcttctagggtt

SEQ ID NO: 47256 - DNA, 1236 bp, Oryza sativa
  Clone ID: PAT_MRT4530_50042C.1
atgctctccctctccccggcggcggcgccgccgccgccgccggcagcggcagcggcggaggcctcgtgggagtgcgatccctgcgcctgcgccgccaccgcggggtccccctgcggttcctgcggcgcgccgccgccgtgggcctgcgcccggtgcacgctcctcaacccaagcggctccggcgtctgctccgcctgcgaggccgcgcgccccgtggaggtcgacgccgaaaacgacggcgacgatcccgcttcctcgccccctcctccgagggcgaggaagaagcgggtgcgcgaggcgtgcgccgacgaggaggaggaggaggagggcgagggggcagatggggcgggttcgccgcgtccctccgacgccgccgccgccaagaaaaaaaaatttgagaataatttaaacaagaagaccttcaaaatcatgacatacaatgtctggatcagagaggatattgaactgcacagaaggctgggcgctcttggagatcttattcaacttcacaacccagacttcatatgcttccaggtgccaggtaacaaggagaacgagaaaatcgaaccccttcctgttgtggttctacaccctcctgcgagaggactcccaccaaatcttgaagcgaagcttgctggcaggatgagcaaattaccggtgagcgaatcgaaccccatcccattttcgaaatcaataatgaagagggagctatgcgtagcggtcgtcaaaacgggagagatccatttggctgtgggcacaagtcacctagagagcccctgccctctacctcctctgtgggatctgaagtacagcgagaagcgagtagctcaggcaaagcagtctctggagattcttggacaattgcgcaatgcaatcttctgcggcgacatgaactgggaagacaaagtagatggtccattccctctacctgacggctggattgatgcttgggtggagctgaagccaggtgacaatggttggacctatgatacgaaagccaatgccatgctgtcagccaacttcaagcagcagaagaggccagaccagttcgtgtgcaagttgtcggatttcaagatcgacgacattgagatgatcggaaaagaggcgattccgggtgtcgtgtactacaaggagaagatagttcgtaaggagtttcataagttggaactgcctgtcctacccagcaaacattttgggcttgttctgacaattactcttcaggacgacattttgtga

SEQ ID NO: 47257 - DNA, 5988 bp, Oryza sativa
  Clone ID: PAT_MRT4530_50043C.1
atgggttccgtctccggcatcgacgacctcgtcttcccgcccgggcagatgtttcggttcggcagcctcgacttcgtcaccaacaacttcggcaagatctctctccttgactcggagtcggaccagtcgggagagaactggatctcagtcccgtttggactcccaaacgcggctgaaagttactccaagaccatctcaatcgagtcggcttcaaaccactcggctgagattgcatcttctccaacgtcaccagatcaagatgatggggcttacccaccgatcctgatgaagctccccgacgatttggcggccatctccatcacgacagcgtctccatcccgtaggcctaggcggaagtcggcttcaacaccgatttcacctagcttcagggaagtcggtgtcatcctccaaccactcggcacggtttcgacggatcagctggatagccactacagctctcccaccgtcgactcgcgtcccaccgacgtcgtggagtacgacgagttttgctctcgctaccacgacccggatctcgacgacttcgacggaagcctagatgacaactacaccccactctactttggcgtcttcatggccaataacgagacggaggagcaacgccaagcccgggagaccgaagcgcgtcgcgagactgagcgtcgccgactggaggaggagcatcaagcacaagaacaagaacggctacggcgtgagcagcaggagcgtgagcggaccgcgaaggaggctgaggatcgacggcagcgagctttggaagcagggcgccgagcgcgtgagctcatcggccaacaagatgttgaagggacaccagttttccgcacccctcaacagaatgcggttgccgcgatcaccctcctcgacaccctcctcaaggaaaacgagctcaatcaatccaatcacgtcgtcaacatcttgaaccagacgaagaccatgattgcggcttcggtcccagttaactccgaaagcgtccacacgccgactggtagccgagtcccccacttccgatctcatgactaccgtcatccaagcctcagcatcaccggcgcaggatctaatcgcaggagcaggggtcacgacgagcggtctgttcactcacctcccgaccatcatagggagcgccgagtggaacggcctcgctcaccgcctcgtcgccgccccgtcgatcttcgcgatacaatcatacagcgccgagcagctcgaggccttcatcattcgccggaccgccacgacgacgaccttgacggagtagcagccttcaccgacgacctgcgtcgagcggattggccagccggcttcaagccgactggaatagagaagtacgacggtactactaaccctgaatcgtggcttactgtctacggtctcgcaatccgcgcagcaggaggagacagcaaggccatggcgaactatttaccagtggctttagcggattccgcccgatcttggctccatggattgccccgtggtacaattggatcttgggccgaattacgcgaccacttcatcgccaacttccaaggcacctttgagcgtcccggcacacaatacgacctctacaacgttattcagaagtccggagaatcccttcgagattacatccggagattttctgaacaacgtaacaagatttccgacatcaccgacgacgttatcatcgccgcattcaccaaagggattcgccacgaagaattggtcggcaagttcggacgtaagcctcccaggacagtcaagctcatgtttgaaaaagtcaacgagtacgccaaagctgaagacgccgtcaccgcatcaaagcagtcgggtcccggttggaagccaaacaagggtacgccggctacgggaggaggtggaagtaacaatcataaggaccgcaagcgtaagcctgaggaacttgttgcaaccgccactcactcatctcgacagcgtccgcgcgtcaacacgttcgacaagatcatgaactcccaatgcccgcattatcctaactccaaccacgtggccaaagattgtttcgtctacaagcagttcgcggagcaatacaccaagtctacacggaagaactccgacgaagaacaaagcacgtcaaggaagaaggacgacggcgacaccccggcaggatttcaagaccaccgcaaggagctcaaccatatctttggcggccccctggcttatgagtccaaacggaagcagaagttgactgaacgggagatcaacgctgttcagcccgacacgccccagtatcttcgatggtcagagattgcaatcaagtttgaccgctcggatcatcccgaccgagtggtccacccggggcggtaccccctggtactagacccagtggtccgtaacgtcaagcttcgcagaaccctcatcgacggcggcagtgcactcaatatcctcttcgccaagaccttggatgatatgcagattcctcgctccgagctaaaaccaagcaatgcgccttttcacggagtaattccaggattatccgcaactccactcggccagatcactctcccggtcacttttggcactcgggaaaacttccgcacagagaatatcagctttgaagtcgccgacttcgagacagcatatcatgccatactcggacgcccggcgttagccaagtttatggccgtcccgcactacacttacatgatgatgaagatgcctggtccccgaggagttctatccttacggagcgacatcaagcaagccgtcacatgcgacaaggagagttgcgacatggcccaaacccgcgagatggcgtctgcccgagaggacatccgactggctgcagccacggcgagcgaaggagaagtacccgctaccaagacttcaaaaagtggagaaagcgaagccaagaccaagaagattcccctagatccttctgatcctactaaaactgctaacaataaagatatctttgcgtggaaaccatctgatatgcccggtattcctagagaggtgattgagcactccttacatgtccaagaagatgccaagcctatcaaacaacgactccgccgattcgcacaagacaggaaggacgcgatcaaggaggaattaaccaagctgttagcagcaggcttcatcaaagaagtccttcatcccgactggctggcaaacccggttctagttcgaaagaaaacagggcaatggcgcatgtgtgttgattatactgacctcaacaaatcctgccctaaagatccttttggattgcctcgcattgaccagatccgactgaaggaatccgactgcttgaagacttcattcatcacgccctttggagcatactgctacgtcactatgccattcggactgaaaaatgcaggagcaacttatcaacgaatgatccagagatgcttctcaacgcagatcggccgcaacgttgaagcctatgtggatgatgtagttgtcaagaccaagcaaaaggatgatttgatctcggatctagaagaaaccttcacgagcatccgcgctttcaggatgaaattaaaccctgaaaagtgcaccttcggagtaccgtcagggaagctgcttggttttatggtgtctcataggggcatccaagccaacccggagaaagttacagctatcctcaacatgaaaccgccaagtacccagaaagatgttcagaagctgactggatgcatggcggcgctcagccgatttgtttcaagacttggcgagcgggggatgcccttctttaagctactaaagaaaacagatgatttccagtggggacccgaagcacagaaggccttcgaagatttcaagaaactcctcaccgagccaccagtcttagcttcaccacatccgcaggagccgttgttgctgtatgtatcagccacctcccaggttgtgagcacagtcttggtcgttgagcgcgaggaagaaggccatgtccagaaagtccagcgaccgatttattttgtcagcgaagtcctagccgactccaaaacgaggtaccctcaggttcagaagctgttatatggtattctaattactaccaggaagctatctcattactttcaaggtcactcggtaacggtggtcacatcatttccactcggtgatatactgcacaatcgcgaagcaaacggacggattgcaaagtgggctttggagttgatgtctttggacatatcattcaagccccgaatctcaatcaagtcccaagcgttagctgattttgtcgccgaatggaccgagtgccaggaggatacccccgcggagaagatggagcactggaccatgcattttgacgggtcaaaacgactttcgggcactggagcaggagtggttttgatttccccgactggagaaagattaagctatgtgctttggatacatttttcggcgtcccacaacgtcgccgagtatgaggccctccttcatgggctgcggattgcaatttccctcgggataaagcgtttaatagttcgaggcgattcacagctggtcgttaaccaagttatgaaagagtggtcctgccttgacgacaacatgatggcatatcgacaagaggtacgcaaattggaagacaagttcgatggactcgagctcagtcatgttcttcgacacaataatgaagccgccgacagacttgtcaactttggatccaagcgcgaggtggcaccttctgatgttttcgtcgaacacctttatacgccgacagtacctcacaaagatactactcaagctgcgggcactcatgatgtagctatggttgaagccgactggcgagagcccctcatacgatttttgacttctcaagaactccctcaagacaaagatgaggccgagcggatttcaaggaggagcaaactttatgttatgcatgaagctgagttatacaagaaaagcccttcaggaattctgcaacgctgcgtatctttagaggaagggagacaattgctgaaagacatacattctgggatatgcggaaaccatgctgctgcacgcaccattgtcggcaaagcttaccggcagggttttttctggcctactgcagtgtccgacgctgacaaaattgtgcgcacatgtgaaggttgccaatttttcgccagacaaattcatctaccagctcaagagttgcagactatcccgctgtcttggccgtttgcggtttgggggctcgacatggttggcccgtttaaaaaggcagtcggcggttacacgcatctctttgtggccattgataaattttccaagtggattgaagctaaaccggttgtcacaatcacagcagataacgctcgagacttcttcatcaacattgtgcatagatttggagtgcccaatcggatcatcactgataatggcacacaattcactggcggagtttttaaagacttttgtgaagactttggaattaagatttgctatgcctcagtggcgcatcctatgagcaatggacaggtggagcgagccaatggcatgatacttcaagggattaaagcgcgtgtttttgaccggctaaaaccctatgccggcaaatgggtgcaacagctgccatcagtactttggtctttgcgaactacacccagtcgggccacaggccagtcaccttttttccttgtctatggggcagaagcaatgttgccaagtgaagttgaattcgagtctttgcgctttcgaaatttccatgaagatcgctacgaagaggaccgagtggatgacttgcaccgattggaagaagtccgcgaagcagctttgattcggtcggctcgatacttacaagggttgcgacgttatcataatcgcaatgttcgatcccgtgcctttctagtcggcgacctggttttgaggaaaattcaaactacacgagatcggcacaagttatctcctttatgggaagggccatttatcatctctgaagtcacccggccaggttcctatcgactcaagcgcgaagacggtactctcgttgacaactcttggaacattgaacatcttcgtcgtttctacgcttaa

SEQ ID NO: 47258 - DNA, 5949 bp, Oryza sativa
  Clone ID: PAT_MRT4530_50044C.1
atgggttccatctccggcatcgacgacctcgtcttcccacccgggcagacgtttcggttcggcagccttgacttcatcaccaacaacttcggcaagatttctctcctcgactcggaatcagaccagtcgggagagaaccggctttcggtcccgttcggattcccgaacgcggctgaaagctacttcaagaccatctcaaccgagtcggcttcaaaccactcggccgagatcgcatcttctccaacgacaccagatcaagatggtggggcttacccaccggtcctgatgaagctccccgacgatttagcagccgtctccaccacgacagcgtcttcatcccgtaggcctaggcggaagtcgtcctcaacaccgatttcgcctagcttcagggaagtcggcgtcatcctccaaccactcggcacggtttcgacggatcagctggatgactacaacagctctcccaccgtcgactcacgtcctactgacatcgtggagtacgacgaatttagctctcgctacaacgacttcaacgactacgacgacttcgacggaagcctagatgacaactacacccctctctactttggcgttttcatggccaataatgagacggaggagcaacgccaagcccgggagaccgaagaacgtcgccgactggaagaggagcatcaagcacaagaacaagaacggctacggcgtgagcagcaggaccgtgagcggaccgcgaaggaggctgaggatcgacgtcagcgagctttggaagcagggcgccgagcgcgtgatctcatcggccaacaagatgtcgaagggacaccggttttccgcacccctcaacagaatgcggttgccgcgatcacccttctcgacaccctcctcaaccaaaacgagctcaatcgatccgaccacgtcgtcaacatcttgaaccagacgaagaccatgattgcggcctcggtcccagttaactccgaaagcgtccacacgccgactggcagccgagttccccacttccgatctcatgactaccgtcatccaagcctcagcatcaccggcgcaggatccaaccgcaggagcaggggtcacgacgagcggtctgttcactcacctcccgaccttcatagggagcgccgagtggaacggcctcgctcaccacctcgtcgccgccccatcgatcttcgcgacacaatcatacagcgccgagcagctcgaggctaccatcactcgccggaccgccacgacgacgaccttgacggagtagcagccttcaccgacgacctgcgtcgagtggattggccagccggcttcaaaccgactggaatagagaagtacgacggtaccactaaccccgaatcgtggcttaccgtctacggtctcgcaatccgcgcagcaggaggagacaacaaggccatggcgaactatttaccggtggctttagcggattccgcccgatcttggctccatggattgccccgtggcacaattggatcttgggccgaactacgcgaccacttcatcgccaactttcaaggcaccttcgagcgtcccggcacacaatatgatctctacaacgtcattcagaagtccggagaatcccttcgggattacatccggcgattttctgaacaacgtaacaagatctccgacatcaccgacgacgtcatcatcgccgcgttcaccaaagggattcgccacgaagaattggtcagcaagttcgggcgcaagcctcccaagacagtcaagctcatgtttgaaaaagccaacgagtacgccaaagctgaagacgccgtcaccgcatcaaagcagtcgggtccgaattggaagcaaaacaagggtacgccggctacgggaggaggtggaagtaacaatcataaggaccgcaagcgcaagcctacggaacttgttgcaaccgccagtcactcttctcgacagcattcgcgcgtcaacacgttcgacaagatcatgaactcccaatgcccgcaccatcctaattccaaccacgtggccaaagattgtttcgtctacaagcaatttgcggatcaatacaccaagactgcacggaagaacaccgacgaagaacaaagcacgtcgaggaagaaggacgacggcgacaccccggcaggttttcaagatcaccgcaaggagctcaaccatatcttcggcggccccctggcttatgagtctaaacggaagcagaagttgactgaaagggagatcaatgctgttcagcccgacacgccccagtatcttcgatggtcagagattgcaatcaagtttgaccgctcggatcatcctgaccgagtggtccacccggggcggtaccccctggtactagacccagtggtccgtaatgtcaagcttcgcagaaccctcatcgacggtggcagtgcactcaacatcctcttcgccaagaccttggatgatatgcagattcctcgctccgagctaaaaccaagcaatgcgccttttcacggagtgattccaggattatccgcaactccactcggccagattaccctcccagtcactttcggcactcgggaaaactttcgcacagagaatatcagcttcgaagtcgccgatttcgagacagcttaccatgccatactcggacgcccggcgttagccaagttcatggccgtcccgcactacacttacatgatgatgaagatgcctggtcctcgaggagtgctatccctacggagtgacatcaagcaagccgtcacatgcgacaaggagagttgcgacatggctcaaacccgcgagatggcgtctgcccgagaggatatccgactggctgcagccacggcaagcgaaggagaaatacccgctaccaagacttcaaaaagtggagaaagcgaagccaagactaagaagattcccctagattcctctgatcctgctaaaactgctaataataaagatatctttgcgtggaaaccttcggatatgcccggtattcctagagaggtgattgagcactccttacatgtcaaagaagatgccaagcctatcaaacaacgactccgccgattcgcacaagacaggaaggacgcaatcaaggaggaattaaccaagctgttagcagcaggctttatcaaagaagttcttcatcccgactggctggcaaacccggttctagttcggaagaaaacagggcaatggcgcatgtgtgttgattataccgacctcaacaagtcttgtcccaaagatccttttgggttgcctcgcattgaccaggtagttgactcaaccgccggctgtgagcttctcagttttttggattgctactcggggtatcatcagatccgactgaaggaatccgactgcttgaagacttcattcatcacgccatttggggcctactgctacatcaccatgccgttcggactaaaaaacgcaggagcaacttatcaacgtatgatccaaagatgcttctcaacacagatcggccgcaacgttgaagcctatgtggatgatgtagttgtcaagaccaagcaaaaggatgatttgatctcggatctagaagaaacctttgcgagcatccgcgctttcaggatgaaattgaaccctgaaaagtgcaccttcggagtaccgtcagggaagctgcttggctttatggtgtctcataggggcatccaagccaacccggagaaagttactgctatcctcaacatgaaaccgccaagtacccagaaagatgttcagaagttgactggatgcatggcggcgctcagccgatttgtttcaagacttggcgagcgggggatgcccttctttaagctactaaagaagacagacgacttccagtggggacccgaagcacagaaggccttcgaagatttcaagaaactcctcaccgagccaccagttttagcctcaccacacccgcaggagccgttgttgctgtatgtatcagccacctcccaggttgtgagcactgtcttggtcgttgagcgcgaggaagaaggccatgtccagaaagtccagcgaccgatttattttgtcagcgaggtcctagccgactccaaaacgaggtaccctcaggttcagaagctgttatatggtattctaattactaccaggaagctatctcactacttccaaggtcactcggtaacggtggttacatcatttccactcggtgatatactgcacaaccgcgaagcaaacggacgtattgctaagtgggctttggagttgatgtctttggacatatcattcaagccccgaatttcagtcaagtcccaagcgttagctgattttgtcgccgaatggaccgagtgccaggaggatacccccgcggagaacatggagcactggaccatgcattttgacggatccaaacgactttcgggcactggagcaggagtggttttgatttccccaactggagaaagattgagctatgtgctttggatacattttttggcgtcccacaacgtcgccgagtatgaagccctccttcatgggctacggattgcaatttccctagggataaagcgtttaatagttcgaggcgattcacagctggttgttaaccaagttatgaaagagtggtcctgccttgacgacaacatgatggcatatcgacaagaggtacgcaaattggaagacaaatttgatggactcgagctcagtcacgttcttcgacacaacaatgaagccgccgacagacttgccaattttggatccaagcgtgaggcggcgccctcagatgttttcgtcgaacacctttatacaccgaccgtacctcataaagatattactcaagatgcggacactcatgacgtagctatggttgaagtcgactggcgagagcccctcatacgatttttgacttctcaagaactcccccaagacaaagatgaagccgagcggatttcaaggcggagcaaactttatgttttgcatgaagccgagttatacaagaaaagcccttcaggaattctgcaacgctgcgtatctttagaggaagggagacaattgctaaaagacatacattctgggatatgcggaaaccatgctgctgcacgcaccatcgtcggcaaagcttaccggcagggttttttctggcctactgcagtgtccgacgccgacaaaattgtgcgcacgtgcgaaggttgccaatttttcgccagacaaattcacttaccagctcaagagttgcagactatcccgctgtcttggccgtttgcggtttgggggctcgatatggttggcccgtttaaaaaggcagtcggcggttacacgcatctctttgtggccattgataaattctccaagtggatcgaagctaaaccggttgtcacgatcacagcggacaatgctcgagacttcttcatcagcattgtgcatagatttggagtgcccaatcggatcatcactgataatggcacacaattcactggcggagtttttaaagacttttgtgaagactttggaattaagatttgctacgcttcagtggcacaccccatgagcaatggacaggtggagcgcgccaatggcatgatacttcaagggattaaagcgcgtgtttttgaccggctaaaaccctatgctggcaaatgggtgcaacagctgccatcagtactttggtctttgcgaactacacccagtcgggccacaggccagtcaccttttttccttgtctatggggcagaagcaatgttgccgagtgaagttgaattcgagtctttgcgctttcgaaatttccgtgaagaacgctacgaagaggaccgagtggatgacttgcaccgattggaagaagcccgcgaagcagctttgattcggtcggctagatatttacaagggttgcggcgctatcataatcgcaatgttcgatctcgtgcctttttagtaaaacaagcacaaaccaggacaccaaggcacaaaaatttcgctccaggttctccattcactagtcaccaccactccaccagtcgggcttga

SEQ ID NO: 47259 - DNA, 283 bp, Oryza sativa
  unsure (1)..(283): unsure at all n locations
  Clone ID: PAT_MRT4530_50045C.1
gaagaaatggcttcatcatcatttggagtaggaggtggcctgaaactgatgagagctcgtggtttgctcgtgttttcagagatgatggcgctgctgctgatctgcctggtgatgatgagcagctccgttaacacctgccaaggccgatctttgcttgcggtgtccgttggtgagaaganggttgccgcatttttgagcaaccttgtcggctgcttcgagcctccatgccgctagcttataagctatggctgcctncttcagacagnctttatttaccgggctt

SEQ ID NO: 47260 - DNA, 333 bp, Oryza sativa
  Clone ID: PAT_MRT4530_50046C.1
atggggggaatgggatggaaaagggcgccggcgggtggggaggaggccggcggggagctcctcctgcgtggccgcgagctccgcgtcaaagggtgtgcgggaagcctctgcagcatggcgccgttgcgcggggccaagcgccggagaagaaggctacaatggcggcggccgctgcggcgggtggcgtgcccagagcagattgcgaggcggatcgacgccgacggcgcgccgggggagagcacagcgctgcgggcgcgctcctacggctgcatccgggtgttcctcgtcctatccctgctgctgctcgccgtcgaggtcgccgcctacctctag

SEQ ID NO: 47261 - DNA, 1276 bp, Oryza sativa
  Clone ID: PAT_MRT4530_50047C.1
tcagtcattttctatcacatcaactttgcgctgaactaaacacagccttaatgcattattcatcttaacattctctggctccaacttgagaccatcaagaaatgagctgcatgcatttttgtaatccttcagtaacattagagcagctccttgacggtagcaggcttctggccagtttggttgcatcatcctgcaagcttcagcatctatcaaagccttctccccctcacccaatttcagccaacaaaggctcctatttgagaacaaagatgcatctctagtattgagagcaatagccttggtataaatgtgcatggcaccacgataatctttattcttgactgcttcacggccttgaaattttcccatatcaagcatagcttcgcaaaactcttcatccttcacatcaggcagtgactttgcataattaatgattccatcaacagtccaatcgtgcacacacggaatacgagaagtggcatcccttgacggcagcgacgaaaccaacttcgtcaggacagctcccactaggaagatcttcagctctggtgtggaggaaaagagagcaagactgagtactacccactgtactcagcaagtcataccggaagaacagatattgggcggtcccctcttgcgctgcggtgaatccggcagctagacaaccggacaccccggccgacccaactccatcacgcccaccctcgccaccggtgcctaggaaagggtcgagctatacttcagatcaagcagttacccactcccacttgtggtgggccccgcacgtcagcggctcaagagagagggagggggcgccggcatgcgagccccatgggtcagcggcacaaggcggcaggtccaccgtggaccgggaccacgcgggtggtctaccgccggtccacgggaccgacggtccagatcggccgggaggccgatcggacggcacggcggcggctaggcacggctcggcttcaaaaccggccggccgaccatggggagcggctgcggcgagcggtcgccggcgacggcaagcggcggcacgggaggcggcgcggacggcgcgaaaggtggcggcgctcatgggagggacgaaaggaagaaggagaggggatccctcaccgaggcgatgacggcgaccggcgcgggaagagacgagcggcaacggcggttcggtgaacggtggacggggtcgggcacaacctgggaaaggcgatgactgggttaggagaagggaaggatgaccacggcgactagaacggccggccagagttgggcg

SEQ ID NO: 47262 - DNA, 786 bp, Oryza sativa
  Clone ID: PAT_MRT4530_50048C.1
atggcaaatgattgcaacactatctcctctgccattgtcgccgaagctgtgagcgggtcacacgtaatgaagattgatggatactcaaaaaccaaggcgctgatcaagaatgaagagtgtctgtcatctaccccattcagcgttgctggctacacctggaccatcagatactatcccaatggtcaatctacggagtgtagagaatacctgtcgttgtacctgtttctggactcttttgccagggacgtcaaggcaatttacagcttcaaactgctggacaagaatggaagaccattgctactgaacagcatcgccagccctgtcaaaaccttcaaacttagaggtaccggttggggctacccaatgtttatcaagagcaaggatttgaaagcatcagaatctctgagagacgactcattttccatccggtgcgatgtcacggtcatgaagcccatttgtagcaaggaaaccccggccatgcccaagccgtctgtggaggttcctccaggtgatctgcaccagcatctgggcgacttgctgaagaacatggatggagcagacgtgacgttcgacgttggccaggagagattctcggcacataagtgcgtgctcgctgctcgatcatccgtcttcgaggcaatgttctttggtgctacgagagcgaagccccgtaggagcaatatcaaaattgaagatatggaagctggcgttttcagatcattcctacatttcgtatacactgacttgctgcctgatacgtcgcaagacgtggtgatggctcagtaa

SEQ ID NO: 47263 - DNA, 696 bp, Oryza sativa
  Clone ID: PAT_MRT4530_50049C.1
atgcccttatccctcgtatctctctttagccggctgctgctgctgctctctcccttgcgtgctctcttggtggaggcaggcgaagttcacagcgttagccaagctcgtgggctggcgtttagttatactgcttggcctaccactatgacccagaaagttacattgaaagtcaccgcacacattcattccataaaggaaaaagtacaccgaagggcgccggcgggtggggaggaggccggcggggagctcctcctgcgtggccgcgagctccgcgtcaaagggtggtgggtgctgccggtcaaggcgtaccacgccgcggggcggctgacgggcgccgcgtccgccatgcttgccgtcgcaacctgcgggatgcctctgcagcatggtgccgttgcgcggggccaagcgccggaggagaaggctgcaatggcggcggccgctgtggcgggtggcgcgcccggagcagatcgcgaggcggaccgacgccgatgccgcgccgggggagagcacagcgctgcgggcgcgctcctacggctgcatccgggtgttcctcgtcctatccctgctgctgctcgccgtcgagatcgccgcctacctctaggggccttgctccccccgccgccgcctacctcggccaggaggacaggggagcgccgttttcgtacccagccaccaataccccatcttgaatattga

SEQ ID NO: 47264 - DNA, 315 bp, Oryza sativa
  Clone ID: PAT_MRT4530_5004C.1
ctaaaaattaacggagtgttcaacttccatgataactcgccgcttaggatagggttgatcagtggcttcagctgcgcaagatagacgattgcccacatcatccaacagcaaaccgttgctgtaataaccaaggtcaaatggaatcctaaattgtagttctatgcatcgtattgaccctctacaatattcaatgtcatttatgccccttttttcttttaggttggtcgacggcccgcggttgcagcagagcagcgagaagagggaggcgacgaagccggcgaggaggaagatgagcgtggtcacccagaaccccat

SEQ ID NO: 47265 - DNA, 678 bp, Oryza sativa
  Clone ID: PAT_MRT4530_50050C.1
atgccccgaagcatcaccatgatactgcaaagggggaaatcgcagtgggcggtcccctcttgcgccgcggtgaatccggcagctggacaaccggacaccccggccgacccaactccatcacgcccaccctcgccaccggtgcctaggaaagggtcgagctatacttcagatcaagcagttacccactcccgcttgtgcccagggctgacgtcagcggaaggggggcgggcgccgacaggcgggccccactggtcagcggcactaagagagggagagggggccgctggcaagcgggcccactgggcagtggctcaagggggagggagtgggtggctggcagctcggcacggctcaagccggccggccagccatggggcggcggcggcggcacgcgtggtcaccggcggtgaccggcggcgcgggagacggcggcgaccggcgcgaaggcggcggcggcggccgaagacgatggcgcacgcgcggagggcggcggcgctcatgggagagagaggaaaggaaggaggagaggggattcctcaccttcgagcacggcggccggcgcgaaggaagaaagcggcggcggcgaccggtgatgcggaggcacggacaggcggcggcgacaccctaggagaagatggagaggcgttaggagaggagacgacgaccacggcggcttga

SEQ ID NO: 47266 - DNA, 493 bp, Oryza sativa
  Clone ID: PAT_MRT4530_50051C.1
gtggggcccatgggtcagcggctcaaaggggagaggaagggggcgccggcatgtgggccccacgggcagtggctcaaggtggccggtctaccgtagaccgggaccacgcgggtggtccaccgccggtccacgggaccgacggtccggatcggccgggaggccgatcggacggcacggcagcggctaggcacggcttcaaaaccgaccggccggccatggcaaccggctgtgacgcgcacggtcgccggcgacggcaatcggcggcgcgggaagcaacggcggacggggtacaggacggcggcgtcgaccgaaggtgacggcgagcgcgtggagagaggcggcgcaaacgagagagaggggaagagggaggaggggaggatcctcaccggcgagtatggcggccggggcggaggatgaaggtggcggcgacgacctggcgatgaggaggggcggacgggtggcggcggcacctacggagggtgttgagaaggat

SEQ ID NO: 47267 - DNA, 5328 bp, Oryza sativa
  Clone ID: PAT_MRT4530_50052C.1
atgggttccgtctccagcatcgacgacctcgtcttcccacccgggcaggcgtttcggttcggcagcctcgacttcatcaccaatgacttcggcaagatctctctcctcgactcggaatcggaccagtcgggagagagccggatctcggtcccgtttggagttccaaacgcggctgaaatctacttcaagtccatctcaatcgagtcggcttcaaaccactcggacgagatcgcatcttctccaacgtcatcagatcgagatgatggggcttacccaccgatcctaatgaagctccccgacgatttggcggccgtcttcaccaccacgacatccccatcccgtaggcctaggcggaggtcggcttcaacaccgatctcgcctagctccagggaagttggcgtcatcctccagccactcggctcagtttcgacggaccagctggatggctactggagctctcccggcatcgactcgcgtccgaccgagatcatggagtacaatgagttcggctttcgcaacaacgacccggatctcgacgacttcgatgaaagcctagaagacaactacacccctctctatttcggcgtctttatggccgataacgagacggaagagcaacgccaagcccgggaaaccgaagcacgacgcgaggccgaacgacgccgactggaggaggagcgtcaagcacaagaacaagaacggctacggcgtgagcaacaggagcgtgagcgggccgcaaaggaggctgaagaccggcggctacgagccttggaagcagggcgccgagcgcgagatcttatcggccaacaagacgttgaggggacaccggttttccgcaccccacaacagaatgctgttgccgcgatcaccctcctcgacaccctcctcaaggagaacgagctcaatcagtctgaccacgtcgtcaacatcttgaaccagaccaagaccatgattgcgtcttcggtcccagttaactccggaagcgtccgcacgccaagtggcagccgagtcccccatcttcgatctcacgactaccaccagccaagcctcagcatcactggcgcaggatctaatcgcaggagcaggggtcacgacgagcgatctgtccactcgcctcccgaccatcatagggagcgccgagtggaacgacctcgttcgccacctcgtcgtcgccccgtcgatcttcgcgatacgatcatacagcgccgggcagcccgaggccatcatcattcgccggatcgccacgacgacgacctagacgtagttgccgctttcaccaacgacctgcgtcgagtggattggccagccggctttaagccggctggaatagagaagtatgacggtaccaccaacccggaattatggcttaccgtctacggtctcgcaatccgcgcagcaggaggagatagcaaagctatggcgaactatttatcagtggctttagcagattccgcccggtcctggctccatggattgccccgtggtacaatcggatcttgggccgaattacgcgaccacttcatcgccaacttccaaggcactttcgagcgccccggcacacaattcgatctttacaatgttattcagaagtccggagaatctcttcgagattacatccggcgattttctgaacaacgcaacaagatctctgacatcactgacgatgttatcatcgccgcattcaccaaaggaattcaccacgaagaattggtcggcaagttcgggcgtaagcctcccaaaacagtcaaacttatgtttgaaaaagccaacgagtacgccaaagctgaagacgccgtcatcgcatcaaaacagtcgggctccagttggaagccaaaaaaggatacgccggctacgggagggggtggaagtaacaaccataaggaccgcaagcgtaagcctgaggaacttgttgcaaccactactcactcttctcgacagcgctcgctcgtcaacacgttcgacaagatcatgaactcccaatgcccgcatcaccctaactccaaccacgcggccaaagattgtttcgtctacaagcatttcgcggaacaatacaccaagactacacggaagaactccgacgaagaacaaagcacgtcgaagaagaaggacgatggcgaccccccggcaggtttccaagaccaccgcaaggagcttaaccacatcttcggcggccccttggcttatgaatctaaaagaaagcaaaagttgactgaacgggagattaacgctgttcagcccgacacaccccaatatcttcgatggtcagagacagcaattaagtttgaccgctcggatcatcccgaccgagtggtccacccggggcggtaccccctggtactagacccagtggtccgtaatgtcaagcttcgcagaaccctcatcgacggtggcagtgcactaaatatcctcttcgccaaaaccctggatgatatgcagattcctcgctccgagttaagaccaagcaatgcgccttttcacggagccatcccagggttatctgcaactccactcggccagatcacccttccggtcacctttggcactcgggaaaacttccgcacagagaatatctgcttcgaagtcaccgatttcgagacagcgtaccacgccatactcggacgcccggcgttagccaagttcatggccgtcccacactacacttacataatgatgaagatgcccggtccccgaggagtcctatccctacggagcgacatcaagcaagccgtcacatgcgacaaggaaagttgcgagatggcccaaactcgcgagatggcgtctgcccgagaagatatccgactggctgcgaccacggcaagtgaaggagaagtgcccgcgaccaaggtctcgaagagcggagaaagcgaagccaagactaaaaagattcccctagatccttctgatcccactaagactgctgtaataggcaccgaagaggtgattgagcactccttgcacgtcaaagaagacgctaaacctattaaacaacgactccgccgcttcgcacaagacaggaagtatgcgatcaaggaggaattaaccaagctgttagcagcaggcttcattaaagaagtccttcatcccgactggctggctaacccggtcctagttcggaagaaaactgggcaatggcgtatgtgtgtcgattataccgacctcaacaagtcttgccctaaagatccttttgggttgcctcgcattgaccagatccgactgaaggaatccgactgcttgaagacttcatttatcacgccctttggggccaattgctacatcaccatgccattcggactaaaaaatgcaggagcaacttatcaacgcatgattcagagatgcttctcgacgcaaattggccgcaatgtcgaagcttacgtggatgatgtagtcgtcaagactaagcagaaggatgatttaatctcggacctagaagaaacctttgcaagcatccgcgctttcaggatgaaactaaaccctgaaaagtgcaccttcggagtaccgtcagggaagctgcttggttttatggtgtctcatagaggcatacaagccaacccggagaaagtcaccgctatcctcaacatgaaaccgccaagctcccagaaagacgtccagaagctgactggatgcatggcggcgctcagccgattcgtttcacgacttggcgagcgggggatgcccttcttcaagctattaaagaaaacagacaatttccagtggggacccgaagcacagaagaccttcgaagacttcaagaaactcctcaccgagccaccagtcttagcctcaccacacctgcaggagccgttgctactatatgtatcagccacctcccaggttgtgagcacagtcttggtcgttgagcgtgaggaagaaggccacatccagaaagtccaacgaccgatctactttgtcagcgaggtcctagccgactccaaaacaagatatcctcaggttcagaagctgttatacagtattctgattactactaggaaattatcccactacttccaaggtcactcgccccgaacctcaatcaagtcccaagcattagcagacttcgtcgccgaatggaccgagtgccaagaggatattccaggagaaaagatggagcactggaccatgcattttgacggatcaaaaaggctttcgggcactggagcgggagtggttctaatttccccaactggagaaagattaagttatgtgctttggatacatttttccgcatcccacaacgtcgcagagtatgaggcgctcctccatggaccacggatcgcgatttccctagggatcaagcgtctaatagttcgaggggattcacagctagtcgttaaccaagttatgaaagagtggtcctgccttgacgacaacatgacggcatatcgacaagaggtacgcaaattggaagacaagttcgatggactcgagcttagtcacgttctccgacacaacaacgaagccgccgatagacttgccaactttggatccaagcgcgaggtggccccctccgatgtattcgtcgaacacctttatgagccgaccgtacctcagaaagaaacaattcaagttgcggacactcaagacatagccatgattgaagccgactggagagagcccctcatacgatttttaacttctcaagaactccctcaagataaagatgaagccgagcggatttcaaggcgaagccggctttatgttattcatgaagccgagttatacaagaaaagcccttcaggaattctgcaacgctgcgtatctctagaggaagggagacaattgttgaaagacatacattctggaatatgcggaaaccatgccgccgcacgcaccattgtcggcaaggcttaccggcagggttttttctggcctactgcagtgtccgacgccgacaagattgtgcgcacgtgcgaaggttgccaatttttcaccagacaaatccatctaccagctcaagagttgcaaacaatcccactgtcttggccgtttgcggtttgggggctcgacatggttggcccgttcaaaaaggcagtcggcggttacacgcatctctttgtggccattgacaaattctccaagtggattgaagctaaaccggttgtcaccatcacagcagataaagctcgagatttcttcatcaacattgtgcataggtttggagtgcctaatcggattatcaccgataatggcacacaattcactagcggagtttttaaggacttttgcgacgacttcggaattaaaattttctatgcctcagtagcgcaccccatgagcaacggacaggtcgaacgagccaacggcatgatacttcaagggataaaagcatga

SEQ ID NO: 47268 - DNA, 114 bp, Oryza sativa
  Clone ID: PAT_MRT4530_50053C.1
ccggcctcgacccacgcgaaccgggtaaaaaattaagagaagggcgaaaccccaaatctcgccacgatggccagccgccgacacatcctccgacgctgcgccgggcgagcgcgc

SEQ ID NO: 47269 - DNA, 2868 bp, Oryza sativa
  Clone ID: PAT_MRT4530_50054C.1
atgcccggtattcccagagaggtgattgagcactccttacatgtcaaagaagacgccaagcctattaaacaacgactccgccgatttgcacaagacaggaaggacgcgatcaaggaggagttaaccaagctgttagcagcaggcttcatcaaagaagtccttcatcccgactggctggcaaacccggttctagttcggaagaaaacagggcaatggcgcatgtgtgttgattataccgacctcaacaagtcttgtcccaaagaccctttcgggttgcctcgcattgaccaggtagttgactcaaccgccggctgcgagcttctcagttttctggattgctactcggggtatcatcagatccgactgaaggaatccgactgcttgaagacttcattcatcacgccttttggggcatactgctacgtcaccatgccgtttggattaaaaaacgcaggagcaacctatcaacgcatgatccagagatgcttttcaacacagatcggccgcaacgttgaagcctatgtggatgacgtagtcgtcaagaccaagcaaaaggatgatctgatcttggatctagaagagaccttcgcgagcatccgcgccttcaggatgaagttaaaccctgaaaaatgcaccttcggagtaccgtcagggaagctgcttggttttatggtgtctcataggggcatccaagccaacccggagaaagttactgctatcctcaacatgaaaccgccaaccacctcccaggtcgtgagcacagtcttggtggtcgagcgtgaggaagaaggccatgtccagaaagttcagcgaccaatctacttcgtcagcgaggtcctggccgactccaaaacgaggtaccctcaggttcagaagctgttatatggtattttaattactatcaggaagctgtctcactactttcaaggtcactcggtaacggtggtcacatcatttccacttggcgatgtactgcacaaccgcgaagcaaatgggcggattgctaagtgggccttggagttgatgtctttggacatatcattcaagccccgcacttcaatcaagtctcaagcgttagctgattttgtcgccgagtggaccgagtgccaagaggatacccccgtggagaaaatagagcactggaccatgcattttgacgggtcaaaaagactttcgggcactggagctggagtggttttaatttccccgactggagaaagactaagttatgtactttggatacatttttcggcgtctcacaacgtcgccgagtatgaggcgctccttcatgggctacggattgcaatttccctagggataaagcgtctaattgttcgaggtgattcacagctggttgtcaaccaagttatgaaagagtggtcctgcattgacgacaacatgatggcatatcgacaagaggtacgcaaactggaggataagttcgatggacttgagctcagccatgttcttcgacacaacaatgaagctgccgatagacttgcgaactttggatccaagcgcgaggcagcgccatctgatgttttcgtcgaacacctttattccccgacagtacctcgcaaagatgctactcaagttgcggacactcatgacatagctatggttgaggccgactggcgagagcccctcatacgatttttgacttctcaagaactccctcaagacaaagatgaggccgagcggatttcaaggcggagcaaactttatgttatgcatgaagccgagttatacaagaaaagcccttcaggaattctgcaacgctgcgtatctttagaggaagggagacaattgctgaaggacatacattctgggatatgcggaaaccacgctgcagcgcgcaccattgttggcaaagcttaccggcagggttttttctggcccactgcagtgtccgacgccgacaaaattgtgcgcacatgtgaaggttgccaattttttgccagacaaattcatctaccagctcaagagttgcagactatcccgctatcttggccgtttgcggtttgggggctcgacatggttggcccgtttaaaaaggcagtcggcggttacacgcacctcttcgtggccattgacaaattttccaagtggatcgaagctaagcctgttgtcacgattacagcagataatgctcgcgatttcttcatcaacattgtgcacagattcggagtacccaatcggatcatcaccgataatggcacacaattcaccggcggagttttcaaagacttttgtgaagactttggaatcaagatttgctatgcctcagtagcacacccaatgagcaatggacaggtggagagggccaacggcatgatacttcaagggattaaagctcgagtttttgaccggcttaaaccctatgccggcaaatgggtgtcacagttaccatcagtactttggtctttgcgtactacgcccagtcgggccacgggccagtcaccttttttccttgtctatggggcagaagcaatgttgccaagtgaagttgaattcgagtctttgcgctttcgaaatttccgtgaagatcgctacgaagaggaccgagtggatgacttgcaccgattggaagaagtccgcgaagcagctttgattcggtcggctcgatacttacaagggttgcggcgctatcataattgcaatgttcgatctcgtgcctttttagtcggcgacctggttttgaggaaaattcaaactacacgagatcggcacaagttatctcctttatgggaggggccatttattatctctgaagtcacccggccaggttcttatcgactcaagcgcgaagacggtactctcgtcgacaactcttggaacattgaacatcttcgtcgtttctacgcttaa

SEQ ID NO: 47270 - DNA, 5988 bp, Oryza sativa
  Clone ID: PAT_MRT4530_50055C.1
atgggatccgtctccggcatcgacgacctcgtcttcccacccgggcagacgtttcggttcggcagcctcgacttcgtcaccaacaacttcggcaagatctctctccttgactcggagtcggaccagtcgggagagaaccggatttcagtcccgtttggactcccaaacgcggctggaagttacttcaagaccatctcaatcgagtcggcttcaaaccactcaggcgagatcacatcttctccaacgtcaccagatcaagatgatggggcttacccaccaatcctgatgaagctccccgacgatttagcggccgtctccatcgcgacagcacctccatcccgtaggcctaggcggaagtcggcttcaacaccgatttcgcctagcttcagggaagtcggcgtcatcctccaaccactcggcacggtttcgacggatcagctggatggctactacagctctcccaccgtcgactcgcgtcccaccgacatcgtggactacgacgagtttagctctcgctacaacgatctggatctcgacgacttcgacggaagcctagatgacaactacacccctctctacttcggcgtcttcatggccgataacgagacggaggagcaacgccaagcccgggaaaccgaagcacgtcgcgaaattgagcgtcgccgactggaggaggagagtcaagcacaagaacaagaacggctacggcgtgagcagcaggagcgtgagcggaccgcgaaggaggctgaggatcgacggcagcgagccttggaagcagggcgccgagcgcgtgatttcatcggccaacaagatgttgaagggacaccggttttccgtacccctcaacagaatgcggttgccgcgatcaccctcctcgacaccctcctcaaggaaaacgagctcaatcaatctgatcacgtcgtcaacatcttgaaccagacgaagaccatgattgcggcttcggtcccagttaactccgaaagcgtccacacgccgactggcagccgagtccctcacttccgatctcatgactaccgtcatccaagcctcagcaccaccggcgcaggatccaatcgcaggagcaggggtcacgacgagcggtccgttcactcacctcccgaccattatagggagcgccgagtggaacggcctcgctcaccacctcgtcgccgccccgtcgatcttcgcgatacaatcatacagcgccgagcagctcgaggccatcatcattcgccggaccgccacgacgacgaccttgacggagtagcagccttcaccgacgacctgcgtcgagtggattggccagctggctttaagccgactggaatagagaagtacgatggtgccactaacccagaatcgtggcttaccgtctacggtctcgcaatccgcgcagcaggaggagacagcaaggccatggcgaactatttaccagtggctttagcggattccgcccgatcttggctccatggattgccccgtggtacaattggatcttgggccgaattacgcgaccacttcatcgccaactttcaaggcaccttcgagcgtcccggcacacaatacgacctctacaacgttattcagaagtccggagaatcccttcgagattacatccggcgattttctgaacaacgtaacaagatctccgacatcaccgacgacgttatcatcgccgcgttcaccaaagggattcgccacgaagaattggtcggcaagttcgggcgtaagcctcccaggacagtcaagcttatgtttgaaaaagccaacgagtacgccaaagctgaagacgccgtcaccgcatcaaagcagtcgggtcccagttggaagccaaacaagggtacgccggctacgggaggaggtggaagtaacaaccataaggaccgcaagcgtaagcctgaggaacttgttgcaaccgccactcattcttctcgacagcgttcgcgcgtcaacacgttcgacaagatcatgaactctcaatgcccgcaccatcctaactccaaccacgtgcccaaagattgtttcgtctacaagcagtttgcggagcaatacaccaagactacacggaagaactccgatgaagaacaaagcacgtcgaggaagaaggacgacggcgacacccaggcaggatttcaagaccaccgcaaggagctcaaccatattttcggcggccccctggcttatgagtctaaaaggaagcaaaagttgaccgaacgggagattaatgctgttcagcctgacacgccccaatatcttcgatggtcagagattgcaatcaagtttgaccgctcggatcatcctgaccgagtggtccacccggggcggtaccccctggtactagacccagtggtccgtaatgtcaagcttcgcagaaccctcatcgacggtggcagtgcactcaatatcctcttcgccaagaccttggatgatatgcagattcctcgctccgagctaaaaccgagcaatgcgccttttcacggagtaattccaggattatccgcaactccactcggccagatcaccctcccggtcacttttggcactcgggaaaacttccgcacagagaatatcagctttgaagtcgccgatttcgagacagcataccatgccatactcggacgcccggcgttagccaagtttatggccgtcccgcactacacttacatgatgatgaagatgcctggtccccgaggagtcctatccctacggagcgacatcaagcaagccgtcacatgcgacaaggagagttgcgacatggcccaaacccgcgagatggcgtctgcccgagaggatatccgactggctgcagccacggcgagcgaaggagaagtgcccgctaccaagatttcaaaaaatggagaaagcgaagccaagactaaaaagattcccctagatccttctgattctactaaaactgctaacaataaaaatatctttgcgtggaaaccatctgatatgcccggtattcctagagaggtgattgagcactccttacatgtcaaagaagatgctaaacctatcaaacaacgactccgccgattcgcacaagacaggaaggacgcgatcaaggagaaattaaccaagctgttagcggcaggcttcatcaaagaagtccttcatcccgactggctggcaaacccggttctagttcggaagaaaacggggcaatggcgcatgtgtgttgattatactgacctcaacaagtcttgccctaaagatccttttgggttgcctcgcattgaccagatccgactaaaggaatccgactgcttgaagacttcgttcatcacgccctttggagcatactgctacgtcaccatgccgttcggactaaaaaacgcaggagcaacttatcaacgtatgatccagagatgcttctcaacgcagatcggccgcaacgttgaagcctatgtggatgatgtagttgtcaagaccaagcaaaaggatgatttgatttcggatctagaagaaaccttcgcgagcatccgcgctttcaagatgaaattaaaccctgaaaagtgcaccttcggagtaccgtcagggaagctgcttggttttatggtgtctcataggggcatccaagccaacccggagaaagttactgctatcctcaacatgaaaccgccaagtacccagaaagatgttcagaagctgactggatgcatggcggcgctcagccgatttgtttcaagacttggcgagcgggggatgcccttctttaagctactgaagaaaacagatgatttccagtggggacccgaagcacagaaggctttcgaagatttcaagaaactcctcaccgaaccaccaatcttagcctcactacacccgcaggagccgttgttgctgtatgtatcagccacctcccaggttgtgagcacagtcttggtcgttgagcgcgaggaagaaggccatgtccagaaagtccagcgaccgatttactttgtcagcgaggtcctagccgactccaaaacgaggtaccctcaggttcagaagctgttatatggtattctaattactaccaggaagctatctcactactttcaaggtcactcggtaacggtggtcacatcatttccactcggtgatatactgcacaaccgcgaagcaaacgggcggatcgctaagtgggctttggagttgatgtctttggacatatcattcaagccccgaatttcaatcaagtcccaagcgttggctgattttgtcgccgaatggaccgagtgccaggaggatacccccgcggagaagatggagcactggaccatgcattttgacggatcaaaacgactttcgggcactggagcaggagtggttttaatttccccaactggagaaagattaagctacgtgctttggatacatttttcggcatcccacaacgtcgccgagtatgaggcgctccttcatggactgcggattgcaatttccctagggataaagcgtctaatagttcgaggcgattcacagctggttgtcaaccaagttatgaaagagtggtcctgccttgacgacaatatgatggcatatcgacaggaggtacgcaaattggaagacaagttcgatggactcgagctcagtcacgttcttcgacacaataatgaagccgccgacagacttgccaactttggatccaagcgcgaggtggcgccctctgatgttttcgttgaacacctttatgcgccgacagtacctcacaaagatactactcaagttgcgggcactcatgacgtagctatgattgaagccgactggcgagagcccctcatacgatttttgacctctcaagaactcccccaagacaaagatgaagccgagcggatttcaaggcggagcaaactttatgttatgcatgaagctgaattgtacaagaaaagcccttcagggatcctgcaacgctgcgtatctttagaggaagggagacaattgctgaaagacatacattctgggatatgcggaaaccatgctgccgcacgcaccattgtcggcaaagcttaccggcagggtttcttttggcctactgcagtgtccgatgccgacaaaattgtgcgcacgtgcgaaggttgccaatttttcgccagacaaattcatctaccagcccaagagttgcagaccatcccactgtcttggccgtttgcggtttgggggctcgacatggttggcccgtttaaaaaggcagtcggcggttacacgcacctctttgtggccattgacaaattctccaagtggattgaagctaaaccggttgtcacaatcacagcagataaagctcgagacttcttcatcaacattgtgcatagatttggagtgcccaatcggatcatcactgataatggcagacaattcactggcggagtttttaaagacttttgtgaagactttggaattaagatttgctatgcctcagtggcgcatcccatgagcaatggacaggtggagcgagccaatggcatgatacttcaagggattaaagcgcgtgtttttgaccggctaaaaccttatgccggcaaatgggtggaacagctgccatcagtactttggtctttgcgtactacacccagtcgggccacaggccagtcaccttttttccttgtctatgaggcagaagcaatgttgccgagtgaagtcgaattcgagtctttgcgctttcgtaatttccgcgaagaacgctatgaagaggaccgagtggatgacttgcaccgattggaagaagtccgcgaagcagctttgattcagtcggctcgatacttacaagggttgcggcgttatcataatcgcaatgttcgatcccgtgcctttctagtcggcgacctggttttgaggaaaattcaaactacacgagatcggcacaagttatctcctctatgggaagggccatttatcatctctgaagtcacccgaccaggttcctatcgactcaagcgcgaagacggcacactcgtcgacaactcttggaacattgaacatcttcgtcgtttctacgcttaa

SEQ ID NO: 47271 - DNA, 519 bp, Oryza sativa
  unsure (1)..(519): unsure at all n locations
  Clone ID: PAT_MRT4530_50056C.1
ccaaaactaagtaatttgcagcgacgaatgacacagcagctcaggtgttgcagtacctcagacccaattcaaatctggaggagctcatcatgaaaggttataatggatcatcattcccatcatgggtagggtctctacctttggacaggttagcttcaatagaactcaaagactgacaaaattgcgaagaactaccacctcctggaagattcccatccctgaaacatgatgtgatacagtcactaccaagtgtcaaactagttgggcctgaatttcttggcaatgttggcgatattaattacttttttttttgacaagaaacagcaagataggctcctactgggttatatactccctccgtttcgaaatgtttgacaccgttgggnntntaaaaggattggccccgagccctggccaaacaccacgggcgtcctttttcctcagcaagaataaaacccctggccaatttaggattaaccccctcaaaaacccaacggttccaatgcttccaaaacgtcc

SEQ ID NO: 47272 - DNA, 414 bp, Oryza sativa
  Clone ID: PAT_MRT4530_50057C.1
atgggggcgcaaggaggtgctagggtggccccagacaatggtgcatgggcccgaggaggaggtagggccactccaaccggcggtggaagtgaggctggaggcggtggcgcctcactcccaggggttcatcaggaaaacatgggtttgcagaggaaaatcaaaattctagccaagagaaccatccaggaggcgcaagctgtaaccctacatcccgcgaagacgaagcggccccgttcagaggaggaagaagaagcagcagcttcgacgccaacagctctctgtggaggaggaggaggacttgaaggtgctctgcactgcccaccggcgccgaagaagccgaggcttgtgatgggttgcagcctgaacgggttcaaggttctgagcgtcgtggatttgcgtttcttcctgcgttga

SEQ ID NO: 47273 - DNA, 366 bp, Oryza sativa
  Clone ID: PAT_MRT4530_50058C.1
atgagggcgccgcagccggcgtcgatctgcctggtggcagtgcgagtcgccgaggttgccccgtgcaaggatgaggagaagaacaacttcgcttctagggtatcagagataaagacatacgaagtacataaaacgtggctccagcctagaaaaaaaaaagaaaaaaaaacgtggctccagagtgctggaccggtggacccaagtcccccaactgtggcgggccccaggctgtggcttggtgactgcgacggcggtggcagtgggactatagtcaagcaggaacctgaaccacgacccctctcctacctccgcctcgattcgcatgctagggcagcagcggtgagaagaatggcgtcagcggaatga

SEQ ID NO: 47274 - DNA, 915 bp, Oryza sativa
  unsure (1)..(915): unsure at all n locations
  Clone ID: PAT_MRT4530_50059C.1
ttagaaaaaaacatggacgatgtctcggaagtcgtaactcacctcgaatccgactagcgaccgcgtccggctgtagacggtggcggcggtgagaacggagctcgtcgacccgcactcgctgtccttgagcgacgcgctcgacgtgtccagcttgatcaccggccatgggaactgcgcgccgcgctgggccgccgcggcgtgcgacgacgacgaccgctgcatcttggcgccgccgccgccgccgccgctcttccggcggctcggctgccgctccagcgcgtcggtgcgctgcctcggcgcgctctgggaccgcgccttggcgcgggacgactccgtgttggccatgtagctcgggcagcacagcagctccgacgacgccgacgcgtgatgcgggctgctgtgcgccgtcgcggcgaacgccatgtcctcgaagtggccgctgtacgccctcgggctcatcacctccgtcatcgccgacggcgccggcgaccaccgcccgtggtggccgtactcgccgncgcgccgcgccggctcgccggcgccgctgtccacctccacgatcttggcgttctcctcgcacgacctgtccatctcccgttgcgcctgcgcgcgcagttgcgactgcgccgccgagaaaacctgcatgccaccacgccgtccgccgccgccgccgcctccgccgccgccttctcgccgtgcaccggtcgcctgaagctccaccgcttctccttcgccgcctctccgggcaaagccgccgccattgcctcgcccttcttgccacccttcttgccgccggccaagaagctcctcagccatctccccgccttccccattcctcctccctcctaaccgatcacttgctctaattcgcatcgcattctggtgctggggcttagctggaggtcgggacaccat

SEQ ID NO: 47275 - DNA, 1350 bp, Oryza sativa
  Clone ID: PAT_MRT4530_5005C.1
atggataacactggtaacaaaggctatgggaatgatggatccgatgactcaagaacccaagccaatgggaatgagaaaagcatcaacgaaacctcaccagagctaatccaaatagtggttaaccaaaccaacatgttggcaacagcctttcaactattacagaattggaacaacccagcaggggcaaccaacgttcaagtgcctacagtccagcaacagtgcaagttatcagaatttctcaaaactgaacctccaacctttgccattgccgtcgatcctatggaagccagtgattggttgcgcacaatcgagaagaagctagggttgattcagtgcaccgaccaggagcgggttggcttcgcaactcatcagctggttggaccggcttcagagtggtgggatcgctacgaagcatcacggccagaaggacataccattacctggaacgagttttcatctgtattcaggagatcacatgttcccgcaggaacgatcacactaagaaaacgagagtttcgctacctgaagcaaggagatttgaccgtcacagagtacctgcatgagttctatcgtttggctcactatgcaccagaagatgtggaaacggatgaagacaaacaagagaagtttctccaggggttaaaagatgagcttgcagtgcaactactcctagaggattatgaaaattttgagaaacttgtggacaaagccatgcaacttgaaagtgagcataatcggatgacgaactgcaagagaaggatggtcaacaacccagtatttccaggtggtaaccaaagacagcgcactgagccacttcagatcaccggatcttctgttgtgtatcaagagttcctgccccaagaagatgaacgcaatgcagacaacaacaatagcactactaatgctgataataccaccaaccaccatggttcttgccccattcatgatcacttagatcaagcgtgcaatgtcaacagcattcaccaagatatcgacgatagtatcaatgaaggcacccagaatgacaaccctagcaattttgactctgagaaagactccaatggtgatagcaactatggtaccactgatgccaatgttagcaaggatttccaaccaccaactccaactccaagtcagaatgatcgtcctcagacggatagctcagcaaagaagacgttgatttgctacaattgcaaagaaccagggcattactcgagggactgcctgcaaccaaggcaaaatcgacctccacattaccgccaatttacacgaagcagacattccaatcgtattgtggtcactggagcaaacgccgtacccgtgaggcctcgtgttaatcagaacccatag

SEQ ID NO: 47276 - DNA, 361 bp, Oryza sativa
  Clone ID: PAT_MRT4530_50060C.1
aaagaaaaaaggcttacccccttccccatttttaacttggggccaaaagggggggggggggggccaacttaaccctgcaacttaccaagtttgttccaaccaaaaaaaaaatggttgggtttaaaacacatgacaattcccttacagaggggtccaaaaaacttgggcttgggcccccccccttaaaatcaagtaaaccctgttcccaaaaaaaaaaacctccaaccattttttttaaaaccaggacttggcggcggatacccttttgggaaaaaaaaaaggggtcaagggttaacgggtgcacaaaaaaccgggaaaaaagggggggggttccctttgcccaaggggaaacccccggggc

SEQ ID NO: 47277 - DNA, 453 bp, Oryza sativa
  Clone ID: PAT_MRT4530_50061C.1
atgcccccgtcgcctccagtttcaaggcaaagcaaggatggagggactgcaattgtcgagggcggcggtggtggcagtgacgcgcaaggctcggcaacaggtggaccctgcaaatgtaactgcctttattattttccaacactcaagacagagaacgtgctaattataccgaaatactataacggactgatcttaggtaattacgatgggctgcactcggaacttgataagttgaaaagggaagttgaagagatgaagaaactttacaaggaactattcgagagtttggcacggaaggataaggatgtcaacgctattttgaagaagagcagtgcggcaaagattgatgaggtcactacaagtgacttgctgtggacgggaacgtcgtctaccactgaaaaacaaatagctgtaaatacgagcagtcgtgtcaagttcagaggttcaacctag

SEQ ID NO: 47278 - DNA, 2278 bp, Oryza sativa
  Clone ID: PAT_MRT4530_50062C.1
acgaatgcgccccaccaccaccagcaccaccacctgcttcctccgcggctgcgtgcgccgcctccccaacccttcgtcctccccgccggccgccgctgagatccgacgcgccggagcggagctcgctgagattttgttcctgctggatttctgaaattttactggaggactagagatatcaagacaccaacaacaaactagtacaaagttttccttccagttaatctgttcctggatctccttgccatacgcgaagcagtggatactatgcagtaattggttaggaggtctttactgaaccataatggctgatactccaacttcccgaatgattcatcccttcagcaatataccgagccaaaacctgaagcagttccagtattctgataatccacagcacccttgccacccttatagggcaccttcagacacccacgttgtgccacatcattatggcctaaagtcacattcaccggatgctggttatgaaagccaggctactcctaacaagtacacattggactcctctgaaggtgctggttgtatgagacatgattctccttccagtcaaagtttcacaaccagaagtggtagccctctatctcaggaagacagccactctgactcgactgatggatctcctgtaggcgcctcctgtgtcactgaggatcctaatgatctgaagcaaaaactgaaggatctcgaggccgttatgcttgggccagactcggaaatagtcaacagccttgagaattcggtggcaaaccaactttccttggagccggagaagtgggtgcgcatgatgggcattcctagaggcaacttgaaagagctactgattgcctgtgctagagctgtggaagagaagaatagctttgctattgatatgatgattccagagctgagaaaaatagtttcggtatctggtgagccacttgagaggttgggagcctacatggtagaagggcttgttgccaggcttgcctcctctggcatttcaatctacaaagctttgaaatgcaaggaaccaaagagctctgaccttctgtcttacatgcacttcctgtatgaggcctgtccctacttcaagtttgggtatatgtcggcaaatggtgctattgcagaggctgtcaagggagaagacaggattcatatcatcgacttccatatctctcaaggggctcagtggatctctctccttcaggcccttgcagccaggcctggtggaccaccaactgtaaggatcactggtattgatgactcagtgtcagcttacgcacgaggcggcgggctagagctggtcggaaggaggctgtcgcacatcgccagcctgtgcaaggtgccctttgaattccacccacttgctatctccggcagcaaggtggaggcagcacatctcggagtcatccccggggaagccctcgccgtgaacttcaccctggagctgcaccacattccagacgagtcggtgagcacggcgaaccaccgtgaccgcctcctaaggatggtgaagagcctgtcgccgaaggtactcaccctggtggagatggagtccaacacgaacacggcgccattcccgcagaggttcgcggagacgctggactactacaccgccatcttcgagtccatcgacctgacgctgccgagggacgacagggagaggatcaacatggagcagcactgcctcgcgagggagatcgtcaacctcatcgcgtgcgagggggaggagagggcggagcggtacgagcccttcggcaagtggaaggcgcgcctcaccatggccgggttcaggccgtcgccgctcagctcgctggtgaacgccaccatcaggacgctgctgcagagctactcggacaactacaagctcgccgagagggatggggcgctctacctcgggtggaagagcaggcccctggtggtctcgtcggcgtggcactagcgttgtgactttgtgaggtgatctgacgacgaacttcccttgtaaccatcttggctgggggctttagaaagctatagtgatcatggactggtaagggtagctgtaacaatggtgttgtaatggtaaggtagcggctagggtcaaactcgaaaatgggcaaaatgctgatgaggtgtagaagtgtagtacatgtttgagagtatatgtttcagtttttcttttaaaaaaaaaaaaaaaatgttgtggcacactaatgtctatgatcagaattatcatccactataagctaaaatatccattggaatcctgccggggcctcgtgccgaattcctgcagccc

SEQ ID NO: 47279 - DNA, 546 bp, Oryza sativa
  Clone ID: PAT_MRT4530_50063C.1
atggcgtcgaccccgccgccgccgccggtgataggcaaggcgggcaacctcacggtcttcatcacgccgccgtcgccggcggaggcggaggcggaggggtcgccggactccccgcggtcggagttcaccacccccagcggatccccccgcgcggccgaggattcgacgccgcctccctctccgccgcgggccggagcagccgccggtcaaggaggaggcgccggcggcctccccgcagctggccaccccgccgccggtgaagacggtctcaccgccgctgcccgccgcgaagctctcctccgccgccgcccctcggcctccgccgccggtgcagcgcacgccagcttggacgagtacatctcgaactggttcgggctggatcaatccaagtaccagtgggctctcaacgagtactatgagagcaacggaaagcgaaattgtggtgatttgagcgtgagtttagcaaagatccatctgtcctgtggctcagcgttgggagttgggatgcagctgtctctgatcctgtactggagtggaatcttgtag

SEQ ID NO: 47280 - DNA, 405 bp, Oryza sativa
  Clone ID: PAT_MRT4530_50064C.1
atgatgcgaatggagggcgtcatccgcggcaacgtggacggaggaggcagcggcccgactgttgtggcaggcatgggcgccacggcggttctacttggcctgtgcgaggaccccacctcgcccgcacacaccaccgtcctcgccacactcctccgcacccacagtctcgatgacttcttcgtgcttcaccgatctcacatcatatcggactccccgatgccgcattcaccacctccacctcatctcgcgttcctggactggcatggcaatgggagcacacgcctccgcgtccgcccccgcgcacccgcgccgccagtccgcccccgcgcaccgccgctagccgccagccgcgcccgccgccgccgcctcggcgctgaggccggcgcctccagccgctgcccgtga

SEQ ID NO: 47281 - DNA, 645 bp, Oryza sativa
  Clone ID: PAT_MRT4530_50065C.1
atggcgccggacgccaggcggcgagcgggtcgagcggcggcggcggcgctaggtggcagggtggcccgggcggtggcgagcgggtcgagcggcgggacggccggagccgcggcggcactaggcggcggggcgggtcgagcggcggcggcgccagcggatctggaggtggtggctgctgggaccttggggcagagggcgaaggaggaggtggctacagcttggggccgtccagatatagtggtcttcgaccaccttgagaccagatctggcgccaaggagctcgagacggcggagagacggtggccggtgaccttgggattgagggagaaggaggcgactgctggagcatggggggcatctagatcctgtggtccccaaccacctggagaacggatctggcagctaggagctcgtggcgacaaagagacggtgaccaatgatcgaccttgggcagtgcacaaaggaggcggcttgctcgagctcctagaggccagcggcgagcgaaggagatggcgacgcggttgtgggagggaggccgcggcagccggcggtcagagggaagggggcgacgggcaggtggaggaagagagaagagaggaggaagagaggagagcagagagaatggaggatatggggagggagtag

SEQ ID NO: 47282 - DNA, 238 bp, Oryza sativa
  Clone ID: PAT_MRT4530_50066C.1
atcactgcagacccacggccatgtggccatatgccacattgaccacatattctggggaattgatgacccacgacctggtgtggtgtgtgtgtggtgtgtgtgctgtgctgggtgtgtgcctgtctgtgtgcacggtgaacccactgtggtgacgccacccacggtgtgacccacggtgtgggcaccctggtgaagaaacgtctgcaactagcatatactgatatactccatacaagta

SEQ ID NO: 47283 - DNA, 391 bp, Oryza sativa
  unsure (1)..(391): unsure at all n locations
  Clone ID: PAT_MRT4530_50067C.1
ggctgttcaccatgagcaacatggtgaagggtgtcacaacgaccacggacgaacaccacccggcggcggcggcggcggccagtncgatcgagcaggtgttcgacctgttctgcgacgggcggaatcgctgggccgcagtggcaccacgtccgcgagtactgggaggagagccggagcnctngagaaggtcctcttcctccggtacgaggagatgctgcggancggcggaancgtggagaggctcgcgangttcctgcggtgcccgttcaccgccggcgaggttgcgccggggttgttgacgcatcgtcgacctatgcagcatcgaccgactcaggaacgtgcaggcgaacaagaccggggtgaccgacctngcggtgaagaaggagagttt

SEQ ID NO: 47284 - DNA, 134 bp, Oryza sativa
  Clone ID: PAT_MRT4530_50068C.1
gttatatacaacgcacgcagccagcaccttatatgggaatgtcaaaggccatgggggcgtcggttccgggtgcgtgccaatcgacaaagacgaatgcggattcacaccaagcacacagttacggaagcatatgg

SEQ ID NO: 47285 - DNA, 5787 bp, Oryza sativa
  Clone ID: PAT_MRT4530_50069C.1
atgggttccgtctccggcatcgacgacctcgtcttcccacccgggcagacgtttcggttcggcagcctcgacttcgtcaccaacaacttcggcaagatctctctccttgactcggtgtcagaccagtcgggagagaaccggatttcagccccgtttggactcccaaacgcggctgaaagttacttcaagaccatctcaatcgagttggcttcaaaccactcgggtgagatcgcatcttctccaacgtcaccagatcaagatgatggggcttacccaccgatcctgatgaagctccccgacgatttggcggccgtctccatcacgacagcgtctccatcccgtaggcctaggcggaagtcggcttcaacaccgatttcgcctaacttcagggaagtcggcgtcatcctccaaccactcggcacggtttcgacggatcagctggatggctactacagctctcccaccgtcgactcgcgccccaccgacatcgtggagtacgacgagtttagctctcgctacaacgacccggatctcgacgacttcgacggaagcctagatgacaactacacccctctctacttcggcgtcttcatggccgataacgagacggaggagcaacgccaagcccgggagaccgaagcacgttgcgagactgagcgtcgccgactggaggaggagcatcaagcacaagaacaagaacggctacggcgtgagcagcaggagcgtgagcggaccgcgaaggaggctgaagatcgacggcagcgagctttggaagcagggcgccgagcgcgtgatctcatcggccaacaagatgttgaagggacaccggttttccgcacccctcaacagaatgcgattgccgcgatcaccctcctcgacaccctcctcaaggaaaacgagctcaatcaatctgatcacgtcgtcaacatcttgaaccagacgaagaccatgattgcggcttcggtcccagttaactccgaaagcgtccacacgccgactggcagccgagtcccccacttccgatctcatgactaccgtcatccaagcctcagcatcaccggcgcaggatccaatcgcaggagcaggggtcacgacgagcggtccgttcactcacctcccgaccatcatagggagcgccgagtggaacggcctcgctcaccacctcgtcgccgccccgtcgatcttcgcgacacaatcatacagcgccgagcagctcgaggccatcatcattcgccggaccgccacgacgacgacctcgacggagtagcagccttcaccgacgacctgcgtcgagtggattggccagccggcttcaagccgactggaatagagaagtatgacggtaccactaacccagaatcgtggcttaccgtctacggtctcgcaatccgcgcagcaggaggagacagcaaggccatggcgaactatttaccagtggctttagcggattccgcccgatcttggctccatggattgccccgtggtacaattggatcttgggctgaattacgcgaccacttcatcgccaactttcaaggcaccttcgagcgtcccggcacacaatacgacctttacaacgttattcagaagtccggagaatcccttcgagattacatccgacgattttccgaacaacgtaacaagatctccgacatcaccgacgacgttatcatcgccgcattcaccaaagggattcgccacgaagaattggtcggcaagttcgggcgtaagcctcccaagacagtcaagcttatgttcgaaaaagccaacgagtacgccaaggccgaagacgccgtcaccgcatcaaagcagtcaggtcccagttggaagccaaacaagggtacgccggctaagggaggaggtggaagtaacaatcataaggaccgcaagcgtaagcctgaggaacttgttgcaaccgccactcactcttctcgacagcgttcgcgcgtcaacacgttcgacaagatcatgaactcccaatgcccgcaccatcctaactccaaccacgtggccaaagattgtttcgtctacaagcagtttgcggagcaatacaccaagactacacggaagaactccgacgaagaacaaagtacgtcgaggaagaaggacgacggcgacaccccggcaggatttcaagaccaccgcaaggagctcaaccatatcttcggcggccccctggcttatgagtctaaaaggaagcaaaagttgactgaacgggagatcaatgctgttcagcccgacacgccccagtatcttcgatggtcagaaattgcaatcaagtttgaccgctcggatcatcctgaccgagtggtccacccggggcggtaccccctggtactagacccagtggtccgtaatgtcaagcttcgcagaaccctcatcgacggcggcagtgcactcaatatcctcttcgccaagaccttggatgatatgcagattcctcgctccgagctaaaaccaagcaatgcgccttttcacggaatcaccctcccggtcacttttggcactcgggaaaacttccgcatagagaatatcagctttgaagtcgccgatttcgagacagcataccatgccatactcggacgcccggcgttagccaagtttatggccgtcccgcactacacttacatgatgatgaagatgcctggtccccgaggagtcctatccctacggagcgacatcaagcaagccgtcacatgcgacaaggagagttgcgacatggcccaaacccgcgagatgacgtcagcccgagaggatatccgactggctgcagccacggcgagcgaaggagaagtgcccgctaccaagatttcaaaaagtggagaaagcgaagccaagactaaaaagattcccttagatccttctgattctactaaaactgctaacaataaagatatctttgcgtggaaaccatctgatatgcccggtattcctagagaggtgattgagcactccttacatgtcaaagaagatgccaagcctatcaaacaacgactccgccgattcgcacaagacagaaaagacgcgatcaaggaggaattaaccaagctgttagcagcaggcttcattaaagaagtccttcatcccgactggctggcaaacccggttctagttcggaagaaaacggggcaatggcgcatgtgtgttgattatactgacctcaacaaatcttgccctaaagatccttttgggttgcctcgcattgaccaggtagtcgactcgaccgccggctgtgagcttctcagttttttggactgctactcggggtatcatcagatccgactgaaggaattcgactgcttgaagacttcattcatcacgccctttggagcatactgctatgtcaccatgccgtttggactaaaaaacgcaggagcaacttatcaacgtatgatccagagatgcttctcaacgcagatcggccgcaacgttgaagcctatgtggatgatgtagttgtcaagaccaagcaaaaggatgatttgatctcggatctagaagaaaccttcgcgagcatccgcgctttcaggatgaaattaaaccctgaaaagtgcaccttcggagtaccgtcagggaagctgcttggttttatggtgtctcataggggcatccaagccaacccggagaaaattactgctatcctcaacatgaaaccgccaaccacctcccaggttgtgagcacagtcttggtcgttgagcgcgaggaagaaggccatgtccagaaagtccagcgaccgatttactttgtcagcgaagtcctagccgactccaaaacgaggtaccctcaggttcagaagctgttatatggtattctaattactaccaggaagctatctcactactttcatagtcactcggtaacggtggtcacatcatttccactcggtgatatactacacaaccgcgaagcaaacgggcggattgctaagtgggctttggagttgatgtctttggacatatcattcaagccccgaatttcaattaagtcccaagcgttagctgattttgtcgccgaatggaccgagtgccaggaggatacccccgcggagaagatggagcactggaccatgcattttgacggatcaaaacgactttcgggcactggagcaggagtggttttgatttccccaactggacaaagattaagctatgtgctttggatacatttttcggcatcccacaacgtcgccgagtatgaggcgctccttcatggactgcggattgcaatttccctaggaataaagcgtctaatagttcgaggcgattcacagctggttgtcaaccaggttatgaaagagtggtcctgccttgacgacaatatgatggcatatcgacaagaggtacgcaaattggaagacaagttcgatggactcgagctcagtcacgttcttcgacacaacaatgaagccgccgacagacttgccaactttggatccaagcgcgaggtggcgccctctgatgttttcgtcgaacacctttatacgccgaccgtacctcacaaggatactactcaaattgcgggcactcatgacgtagctctggttgaagccgattggcgagagcccctcatacgatttttgacttctcaagaactcccacaagacaaagatgaagccgagcggatttcaaggcggagcaaactttacgttatgcatgaagctgagttgtacaagaaaagcccttcagggattctgcaacgctgcgtatctttagaggaagggaggcaattgctgaaagacatacattctgggatatgcggaaaccatgctgccgcacgcaccattgtcggcaaagcttaccggcagggttttttctggcctactgcagtgtccgacgccgacaaaattgtgcgcacgtgcgaaggttgccaatttttcgccagacaaattcatctaccagctcaagagttgcagaccatcccactgtcttggccgtttgcggtttgggggctcgacatggttggcccatttaaaaaggcagtcggcggttacacgcacctttttgtggccattgacaaattctccaggtggattgaagctaaaccggttgtcacaatcacagcagataacgctcgagacttcttcatcaacattgtgcatagatttggagtgcccaatcggatcatcactgacaatggcagacaattcaccggcggagtttttaaagacttttgtgaagactttggaatcaagatttgctatgcctcagtggcacatcccatgagcaatggacaggtggagcgagccaatggcatgatacttcaagggattaaagcgcgtgtttttgaccggctaaaaccctatgccggcaaatgggtgaaacagctgccatcagtactttggtctttgcgaactacacccagtcgggccacaggccagtcaccttttttccttgtctatggggcagaagcaatgttgccgagtgaagttgaattcgagtctttgcgctttcgaaatttccgtgaagaacgctacgaagaggaccgagtggatgacttgcaccgattggaagaagtccgcgaagcagctttgattcagtcggctcgatacttacaagggctgcgacgttatcataatcgcaatgttcgatcccgtgcctttctagtcggcgacctggttttgaggaaaattcaaactacacgagatcggcacaaattatctcctctatgggaagggccatttatcatctctgaagtcacccgaccaggttcctatcgactcaagcgcgaagacggtacactcgttgacaactcttggaacattgaacatcttcgtcgtttctacgcttaa

SEQ ID NO: 47286 - DNA, 187 bp, Oryza sativa
  Clone ID: PAT_MRT4530_5006C.1
gggagatgatgaagtcgatcgttgcggatcagtctcatggaaccaagaacgtcctctgcaatggtttgcacgaggggtacggtgccaatgtcattggcgccctcatgttggaccataacaccaatgacgttagccccacaagaaaggtccattcccggaataaattctactggggtctatccgtcaa

SEQ ID NO: 47287 - DNA, 5959 bp, Oryza sativa
  Clone ID: PAT_MRT4530_50070C.1
atgggttccgtctccggcatcgacgacctcgtcttcccacccgggcagacgtttcggttcggcagcctcgacttcatcaccaacaacttcggcaagatttctctcctcgactcggaatcaaaccagtcgggagagaaccggatttcggtcccgtttggattcccgaacgcggctgaaagctacttcaagaccatctcaaccgagtcggcttcaaaccactcggccgagattgcatctcctccgacggagccagatcaagatgatggggcttacccaccagtcctgatgaagctccccgacgatttagcggccgtcttcaccacgacaacgtcttcatcccgtaggcctaggcggaagtcggcttcaacaccgatttcgcctagcttcagggaagtcggcgtcatcctccaaccactcggcacggtttcgacggatcagctggatgactacaacagctctcccaccgtcgactcgcgccccaccgacatcgtggagtacgatgagtttagctctcgctaccacgacccggatctcgacgacttcgacggaagcctagatgacaactacacccctctctactttggcgttttcatggccaataacgagacggaggagcaacgccaagcccgggagaccgaagagcgtcgccgactggaggaggagcaccaagcacaagaacaagaacggctacggcgcgagcagcaggaccgtgaacggatcgcgaaggaggctgaagatcgacgtcagcgagctttggaagcagggcgccgagcgcgtgatctcatcggccagcaagatgtcgaagggacaccggttttccgcacccctcaacagaatgcggttgccgcgatcacccttctcgacaccctcctcaaccaaaacgagctcaatcgatccgaccacgtcgtcaacatcctgaaccagacaaagaccatgattgcggcgacggtcccagttaactccgaaagcgtccacacgccgactggcagccgggtcccccacttccgatctcatgactaccgtcatccaagcctcagcatcaccggagcaggatccaatcgcaggagcaggggccacgacgagcggtctgttcactcgcctcccgaacttcatagggagcgccgagtggaacggcctcgctcaccacctcgtcgccgccccatcgatcttcgcgacacaatcacacagcgccgagcagctcgaggctaccatcactcgccggatcgccgcgacgacgaccttgacggagttgcagccttcaccgacgacctgcgtcgagtggattggccagccggcttcaaaccgactggaatagagaagtacgacggtaccactaatccagaatcgtggcttaccgtctacggtctcgcaatccgcgcagcaggaggagataacaaggccatggcgaactatttaccggtggctttagcagattccgcccgatcttggctccatggattgccccgtggtacaattggatcttgggccgaactacgcgaccacttcatcgccaacttccaaggcaccttcgagcgtcccggcacacaatatgatctttacaacgtcattcagaagtccggagaatctcttcgagattacatccggcgattttctgaacaacgtaacaagatctccgacatcaccgacgacgtcatcatcgccgcattcaccaaagggattcgccacgaagaattggtcggcaaattcgggcgcaaacctcccagaacagtcaagctcatgtttgaaaaagccaacgagtacgccaaagccgaagacgccgtcaccgcatcgaagcagtcgggtcccagttggaagccgaaaaatacgccggctacgggaggaggtggaagtaacaatcataaggaccgcaagcgtaagcctgaggaacttgttgcaaccgccgctcactcttctcgacagcgttcgcgcgtcaacaccttcgacaagatcatgaactcccaatgcccgcatcatccaaactccaaccacgtggccaaagagtgcttcatctacaaacagttcgcggagcagtacaccaagtctactcggaagaactccgacgaagaacaaagcacgtcaaggaagaaggatgacggcgacaccccggctggatttcaagaccaccgcaaggagcttaaccatatcttcggcggccccctggcttacgaatctaaacggaagcagaagttgactgaacgggagatcaatgctgttcaacctgacacgccccagtatcttcgatggtcagaaatcgcaatcaagtttgaccgctcggatcatcctgaccgagtggtccacccggggcggtaccccctggtactagacccagtggtccgtaatgtcaagcttcgcagaaccctcattgatggcggcagtgcactcaatatcctcttcgccaagactttggatgatatgcagatccctcgctccgagttaaaaccaagcaatgcgccttttcatggagtaattccaggattatccgcaactccactcggccagattactcttccggtcacttttggcactcgggaaaacttccgcacagagaatatcagctttgaagttgccgatttcgagacagcataccacgccatactcggacgcccggcgttagccaagttcatggctgtcccgcactacacttacatgatgatgaagatgcctggtccccgaggagtcctatccctacggagcgacatcaagcaagccgtcacatgcgacaaggagagttgcgacatggcccaaactcgcgagatggcgctagcccgagaggaaatccgactggctgcaaccacggaaagcgcgctcatcacctttcttcaaaataataaagatatctttgcgtggaaaccttcggatatgcccggtattcccagagaggtgattgagcactccttacatgtcaaagaagacgccaagcctattaaacaacgactccgccgatttgcacaagacaggaaggacgcgatcaaggaggaattgaccaagctgttagcagcaggcttcatcaaagaagttcttcatcccgactggctggcaaacccggttctggttcggaagaaaacagggcaatggcgcatgtgcgttgattacactgacctcaacaagtcttgccctaaagatcccttcgggttgcctcgcattgaccaggtagttgactcaaccgccggctgcgagcttctcagttttctggattgctactcggggtatcatcagatccgactgaaggaatccgactgcttgaagacttcattcatcacgccctttggggcatactgctacgtcaccatgccgttcggactaaaaaacgcaggggcaacttatcaacgcatgattcagagatgcttctcaacacagatcggccgcaacgttgaagcctacgtggatgatgtagtcgtcaagaccaagcaaaaggatgatctgatctcggatctacaagaaacctttgcgagcatccgtgctttcaggatgaaattaaaccctgaaaagtgcaccttcggagtaccgtcagggaagctgcttggcttcatggtgtctcataggggcatccaagccaacccggagaaagttactgctatcctcaacatgaaaccgccaagcacccagaaagatgttcagaagctgactggatgcatggcggcgctcagccgattcgtttcaagacttggcgagcgggggatgcccttcttcaagctactgaagaagacagataatttccaatggggacctgaagcacagaaggccttcgaagatttcaaacaactcctcaccaagccaccggtcttagcctcaccacatccgcaggagccgttgttgctgtatgtatcagccacctcccaggtcgtgagcacagtcttggttgtcgagcgtgaggaagaaggccatgtccagaaagttcagcgaccaatctacttcgtcagcgaggtcctggccgactccaaaacgaggtaccctcaggttcagaagctgttatatggtattttaattactaccaggaagctgtctcattactttcaaggtcactcggtaacggtggtcacatcattcccactcggcgatgtactacacaaccgcgaagcaaatgggcggattgctaagtgggctttggagttgatgtctttggacatatcattcaagccccgcacttcaatcaagtctcaagcgttagccgattttgtcgccgagtggaccgagtgccaagaggatacccccgtggagaaaatagagcactggaccatgcattttgacgggtcaaaaagactttcaggcactggagctggagtggttttaatttccccgactggagaaagattaagttatgtgctttggatacatttttcggcgtcccacaacgtcgccgagtatgaggcgctccttcatgggctacggattgcaatttccctagggataaagcgtctaatcgttcgaggtgattcacagctggttgtcaaccaagttatgaaagagtggtcttgcattgacgacaacatgatggcatatcgacaagaggtacgcaaactggaggataagttcgatggacttgagctcagccatgttcttcgacacaacaatgaagctgccgatagacttgcgaactttggatccaagcgcgaggcggcgccctctgatgtttttgtcgaacacctttatacgccgacggtacctcacaaagatgccactcaaattacgggcacccatgatgtcgctatggttgaagccgactggcgagagcccttcatacgatttttaacttctcaagagctccctcaagataaagatgaagccgagcggatttcaaggcggagcaaactttatgttatgcatgaatctgagttatacaagaaaagcccttcaggaattctgcaacgctgcgtatctttagaggaagggagacaattgctgaaagacatacattctgggatatgcggaaaccatgctgctgcgcgcaccattgtcggcaaagcttaccggcagggttttttctggcctactgcagtgtccgacgccgacaaaattgtgcgcacatgtgaaggttgccaatttttcgccagacaaattcacttaccagctcaagagttgcaaactatcccgctgtcttggccgtttgcggtttgggggctcgacatggttggcccgtttaaaaaggcagtcggcggttacacgcacctcttcgtggccatcgacaaattttccaagtggatcgaagctaagcctgttgtcacgattacagcagataatgctcgagacttcttcatcaacattgtgcatagatttggagtgcccaatcggataatcactgataatggcacacaattcaccggcggagttttcaaagacttttgtgaagatttcggaataaagatttgttatgcctcagtagcgcacccaatgagcaatggacaggtggagagggccaacggcatgatacttcaagggattaaagctcgagtttttgaccgggcttaaaccctatgccggcaaatgggtgtcacagttaccatcagtactttggtctttgcgtactacgcccagtcgggccacaggccagtcaccttttttccttgtctacggggcagaagcaatgttgccgagtgaagtcgagttcgaatctttgcgcttccgtaatttccgtgaagaacgctatgaagaagaccgagtggacgacttgcaccgactggaagaagtccgcgaagcagctttgattcagtcagctcggtacttgcaagggttgcgacgttatcataatcgcaatgttcgatctcgtgcctgtctagtcggcgacctggttttacggaaaattcaaaccacacgagatcggcacaagttatctcctctatgggaagggccatttattatctctgaagttacccggccaggttcatatcgactcaagcgcgaagacggcactctcgtcgacaactcttggaacattgaacatcttcgtcgtttctacgcttaa

SEQ ID NO: 47288 - DNA, 5925 bp, Oryza sativa
  Clone ID: PAT_MRT4530_50071C.1
atgggtcctttttccggcatcgacgacctcgtcttcccacccgggcagacgtttcggttcggcagcctcgacttcatcaccaacaacttcggcaagatttctctcctcgactcggaatcagaccagtcgggagagaaccggctttcggtcccgtttggattcccgaacgcggctgaaagctacttcaagaccatctcacccgagtcggcttcaaaccactcggccgagatcgcatcttctccaacgataccagatcaagatgatggggcttacccaccggtcctgatgaagctccccgacgatttagcggccgtcttcaccacgacagcgccttcatcccgtaggcctaggcggaagtcggcttcaacaccgatttcgcctagcttcagggaagtcggcgtcatcctccaaccactcggcacggtttcgacggaccagctggatgactacaacagctctcccaccgtcgactcacgtcctactgacatcgtggagtacgacgaatttagttctcgatacaacgacttcaacgacttcgacgacttcgacggaagcctagatgacaactacacccctctctactttggcgttttcatggccaataatgagacggaggagcaacgccaagcccgggagaccgaagaacgacgccgactggaggaggagcatcaagcacaagaacaagaacggctacggcgcgagcagcaggaccgtgagcggacagcgaaggaggctgaagatcgacgtcagcgagctttggaagcagggcgccgagcgcgtgatctcatcggccagcaagatgtcgaagggacaccggttttccgcacccctcaacagaatgcggttgccgcgatcacccttctcgacaccctcctcaaccaaaacgagctcaatcaatccgaccacgtcgtcaacatcttgaatcagacgaagaccatgattgcggcaacggtcccagttaactccgaaagcgtccacacgccgactggcagccgggtcccccacttccgatctcatgactaccgtcatccaagcctcagcatcactggagcaggatccaatcgcaggagcaggggccacgacgagcggtctgttcactcgcctcccgaacttcatagggagcgccgagtggaacggcctcgctcaccacctcgtcgccgccccatcgatcttcgcgacacaatcatacagcgccgagcagctcgaggctaccatcactcgccggatcgccgcgacgacgaccttgacggagttgcagccttcaccgacgacctgcgtcgagtggattggccagccggcttcaaaccgactggaatagagaagtacgacggtaccactaatccagaatcgtggcttaccgtctacggtctcgcaatccgcgcagcaggaggagataacaaggccatggcgaactatctaccggtggctttagcagattccgcccgatcttggctccatggactgccccgtggtacgatcggatcttgggccgaattacgcgaccacttcatcgccaacttccaaggcaccttcgagcgtcctggcacacaatatgatctttacaacgttatccagaaatccggagaatcccttcgagagtatatccgacgattttctgaacaacgtaacaagatctccgacatcactgacgacgtcatcatcgccgcattcaccaaagggattcgccacgaagaattggtcggcaaatttgggcgcaaacctcccagaacagtcaagctcatgtttgaaaaagccaacgagtacgccaaagctgaagacgccgtcaccgcatcaaagcagtcgggccccagttggaagccgaaaaatacgccggctacgggaggaggtggaagtaacaatcataaggaccgcaagcgtaagcctgaggaacttgttgcaaccgctactcactcttctcgacagcgttcgcgcgtcaacaccttcgacaagatcatgaactcccaatgcccgcatcatccaaattccaaccacgtggccaaagaatgcttcatctacaagcagttcgcggagcagtacaccaagtctacccggaagaactccgacaaggaacaaagcacgtcaaggaagaaggacgacggcgacaccccggctggatttcaagaccaccgcaaggagctcaaccatatctttggcggccccctggcttatgagtctaaaaggaagcaaaagctgaccgaacgggagatcaatgctgttcagcccgacacgccccaatatcttcgatggtcagagatcgcaatcaggtttgaccgctcggatcatcctgaccgagtggtccacccggggcggtaccccctggtactagacccagtggtccgtaacgtcaagcttcgcagaaccctcattgatggcggcagtgcactcaatatcctcttcgccaagactttggatgatatgcagatccctcgctccgagttaaaaccaagcaatgcgccttttcatggagtaattccaggattatccgcaactccactcggccagatcactctcccggtcacttttggtactcgggaaaacttccgcacagagaatatcagctttgaagttgccgatttcgagacagcataccatgccatactcggacgcccggcgttagccaagttcatggccgtcccgcactacacatacatgatgatgaagatgcctggtccccgaggagtcctaaccctacggagcgacatcaagcaagctgtcacatgcgacaaggagagttgcgacatggcccaaacccgcgagatggcgtctgcccgagaggaaatccgactggctgcaaccacggaaagcgcgctcatcacctttcttcaaaataataaagatatctttgcgtggaaaccttcggatatgcccggtattcccagagaggtgattgagcactccttacatgtcaaagaagacgccaagcctattaaacaacgactccgccgatttgcacaagacaggaaggacgcgatcaaggaggaattgaccaagctgttagcagcaggcttcatcaaagaagtccttcatcccgactggctggcaaacccggttctagttcggaagaaaacagggcaatggcgcatgtgtgttgattacactgacctcaacaagtctgccctaaagatcccttcgggttgcctcgcattgaccagttttctggattgctactcggggtatcatcagatccgactgaaggaatccgactgcttgaagacttcattcatcacgccctttggggcatactgctacgtcaccatgccgttcggactaaaaaacgcaggggcaacttatcaacgcatgattcagagatgcttctcaacacagatcggccgcaacgttgaagcctatgtggatgatgtagtcgtcaagaccaagcaaaaggatgacctgatcttggatctagaagaaaccttcgcgagcatccgcgccttcaggatgaaattgaaccctgaaaagtgcaccttcggagtaccgtcagggaagctgcttggctttatggtgtctcataggggcatccaagccaacccggagaaagttactgctatcctcaacatgaaaccgccaagcacccagaaagatgttcagaagctgactggatgcatggcggcgctcagccgattcgtttcaagacttggcgagcgggggatgcccttcttcaagctactgaagaaaacagataatttccaatggggacccgaagcacagaaggccttcgaagatttcaaacaactcctcaccaagccaccggtcttagcttcaccacacccgcaggagccgttgttgctgtatgtatcagccacctcccaggtcgtgagcacagtcttggttgtcgagcgtgaggaagaaggtcatgtccagaaagttcagcgaccaatctatttcgtcagcgaggtcctggccgactccaaaacaaggtaccctcaggttcagaagctgttatatggtattttaattactaccaggaagctgtctcattactttcaaggtcactcggtaacggtggtcacatcatttccactcggcgatgtactgcacaaccgcgaagcaaatgggcggattgctaaatgggctttggagttgatgtctttggacatatcattcaagccccgcacttcaatcaagtctcaagcgttagctgattttgtcgccgagtggaccgagtgccaggaggatacccccgtggagaaaatagagcactggaccatgcattttgacgggtcaaaaagactttcgggcactggagctggagtggttttaatttccccgactggggaaagactaagttatgtgctttggatacatttttcggcgtcccacaacgtcgccgagtatgaggcgctccttcatgggctacggatcgcaatttccctagggataaagcgtctaattgttcgaggtgattcacagttggttgtcaaccaagttatgaaagagtggtcctgcattgacgacaatatgatggcatatcgacaagaggtacgcaagttggaagacaagttcgatggactcgagcttagtcacgttcttcgacacaacaatgaagccgccgacaggcttgccaactttggatccaagcgtgaggcggcgccctctgatgttttcgtcgaacacctttatacgccgacggtacctcacaaagataccgctcaagttgcgggcactcatgatatcgctatggttgaagccgactggcgagagcccttcatacgatttttaacttctcaagagctccctcaagataaagatgaagccgagcggatttcaaggcggagcaaactttatgttatgcatgaagctgagttatacaagaaaagcccttcaggaattttgcaacgctgcgtatctttagaggaagggagacaattgctgaaagacatacattctgggatatgcggaaaccatgctgctgcgcgcaccattgtcggcaaagcttaccggcagggttttttctggcctactgcagtgtccgacgccgacaaaattgtgcgcacatgtgaaggttgccaattttttgccagacaaattcacttaccagctcaagagttgcaaactatcccgctgtcttggccgtttgcggtttgggggctcgacatggttggcccgtttaaaaaggcagtcggcggttatacgcacctcttcgtggccattgacaaattttccaagtggatcgaagctaagcctgttgtcacgattacagcagataatgctcgagatttcttcatcaacatcgtgcatagatttggagtgcccaatcggataatcactgataatggcacacaattcaccggcggagttttcaaagacttttgtgaagattttggaataaagatttgttatgcctcagtagcgcacccaatgagcaatggacaggtggagagggccaacggcatgatacttcaggggattaaagctcgagtttttgaccggcttaaaccctatgccggcaaatgggtgtcacagttaccatcagtactttggtctttgcgtactacccccagtcgggccacaggccagtcaccttttttccttgtctacggggcagaagcaatgttgccgagtgaagtcgagttcgaatctttgcgcttccgtaatttccgtgaagaacgctatgaagaagaccgagtggacgacttgcaccgactggaagaggcccgcgaagcagctttgattcagtcagctcggtatttacaagggttgcgacgttatcataatcgcaatgttcgatctcgtgcctttctagtcggcgacctggttttacggaaaattcaaaccacacgagatcggcacaagttatctcctctatgggaagggccatttattatctctgaagttacccggccaggttcatatcgactcaagcgcgaagacggcactctcgtcgacaactcttggaacattgaacatcttcgtcgtttctacgcttaa

SEQ ID NO: 47289 - DNA, 2547 bp, Oryza sativa
  Clone ID: PAT_MRT4530_50072C.1
atggcgtctgcccgagaggaaatccgactggctgcaaccacggtgagcgaaggagaagtgccagctgccaagatttcaaaaagtggggaaaccgaagccgagactaaaaagattcccttagatccttccgatcctaccaaaactgctgtaataggcgccgaagaggtgattgagcactccttacatgtcaaagaagacgccaagcctattaaacaacgactccgccgatttgcacaagacaggaaggacgcgatcaaggaggaattgaccaagctgttagcagcaggctgcatcaaagaagtccttcatcccgactggctggctaacccagtcctggttcggaaaaagacagggcaatggcgcatgtgtgtcgattacactgaccttaacaaatctttcccaaaagatcctttcgggttgcctcgcattgaccagatcggccgcaacgttgaagcctatgtggatgacgtagtcgtcaagaccaagcaaaaggatgatttgatctcggatctagaagaaacctttgcaagcatccgtgctttcaggatgaaattgaatcctgaaaagtgcaccttcggagtaccgtcagggaagctgcttggttttatggtgtctcataggggcatccaagccaacccggagaaagttactgctatcctcaacatgaaaccgccaagcacccagaaagacgttcagaagctgactggatgcatggcggcgctcagccgattcgtttcaagacttggcgagcgggggatgcccttcttcaagctactgaagaaaacagataatttccaatggggacccgaagcacagaaggctttcgaagatttcaaacaactcctcaccaagccaccggtcttagcttcaccacacccgcaggagccgttgttgctgtatgtatcagccacctcccaggtcgtgagcacagtcttggttgtcgagcgtgaggaagaaggccatgtccagaaagttcagcgaccaatctacttcgtcagcgaggtcctaaccgactccaaaacgaggtaccctcaggttcagaagctgttatatggtattttaattactaccaggaagctgtctcattactttcaaggtcactcggtaacggtggtcacatcatttccactcggcgatgtactgcacaaccgcgaagcaaatgggcggattgctaagtgggctttggagttgatgtctttggacatatcattcaagccccgcacttcaatcaagtctcaagcgttagctgattttgtcgccgagtggaccgagtgccaagaggatacccccgtggagaaaatagagcactggaccatgcattttgacgggtcaaaaagactttcaggcactggagctggagtggttctgatttccccaactggagaaagactaagttatgtgctttggatacatttttcggcgtctcacaacgtcgccgagtacgaggcgctccttcatgggctacggattgcaatttccctagggataaagcgtctaattgtccgaggtgattcacagctggttgtcaaccaagttatgaaagagtggtcctgcattgacgacaacatgatggcatatcgacaagaggtacgcaaactggaggataagttcgacgggcttgagctcagccatgttcttcgacacaacaatgaagctgccgatagacttgccaactttggatccaagcgcgaggcagcgccatctgatgttttcgtcgaacacctttattcgccgacagtacctcacaaagatgctactcaagttgcggacactcatgacatagctatggttgaagctgactggcgagagcccctcatacgatttttaacttcccaagagctccctcaagataaagatgaagccgagcggatttcaaggcggagcaaactttatgttatgcatgaagccgagttatacaagaaaagcccttcaggaattctgcaacgctgcgtatctttagaggaagggagacaattgttgaaggacatacattctgggatatgcggaaaccatgctgcagcgcgtaccattgttggcaaagcttaccggcagggttttttctggcctactgcagtgtccgacgccgacaaaattgtgcgcacatgtgaaggttgccaattttttgccagacaaattcatctaccagctcaagagttgcagactatcccgctgtcttggccgtttgcggtttgggggctcgacatggtcggcccgtttaaaaaggcagtcggcggttacacgcacctctttgtggccattgacaaattttccaagtggatcgaagctaagcctgttgccacgattacagcagataatgctcgcgatttcttcatcaacattgtgtacagattcggagtacccaatcggatcatcaccgataatggcacacaattcaccggcggagttttcaaagacttttgtgaagattttggaatcaagatttgctatgcctcagtagcacacccaatgagcaatggacagaacgctatgaagaagaccgagtggacgacttgcaccgactggaagaggtccgcgaagcagctttga

SEQ ID NO: 47290 - DNA, 591 bp, Oryza sativa
  unsure (1)..(591): unsure at all n locations
  Clone ID: PAT_MRT4530_50073C.1
ggtgcangattcggcacgagtcgtgcgaattcggcacgaggaaaaagctgtgtctagggagaaggtngtnncaccttgctctcctttgncttcnganaaaccggaagcaatggcgtctgctactctcctcnagtcatctttccttccccanaaatctgaatggggtgccacccgccaggctgccgcccccnanccngtgactgtctccntggttgtccgcnctggtgcctacnaccataaacttgtcnagaccgcgaaaaccnttgcatccccncgaaagggtttccttgccntggatnaatctaaccnacctgcggtnanaagcttgcgtntattggccntnaaaacaccnangccnaccgccnggcttaccggacctccttgtctccgcaccnggcttngganatncatctcccgtgctatcctcttccaaganantctgttccnntccactgtttattgnnagaaaattgtccanatccnccctgancanaaaatccttccncgtttcnaggtccanaaaggtcttgtnccccntgctggntcccacaacaatctttgttgccnaggtctcnaangggctttcctccc

SEQ ID NO: 47291 - DNA, 463 bp, Oryza sativa
  Clone ID: PAT_MRT4530_50074C.1
gttatgttcacctcgaggaaatcatttataacatgattttaattggtgtggaagcaaacaaagcatactgctagattatagtataaacttgtgaaagatatatttcctttgccttgtttatatcctaatagattaattgtgtttagagaaatacctgagctgaaaatgctatcgagattatggctaaaagaatttgattttggtagaatatataagagggaacaaaaaaatattcatttcacaaaagtcgtgtgtgtgcatgtatctgcgcataggcattttttttagcaaaaatactatatggtgattcttttacaaattgtcaatccattgttccatctgtgtaatgggactatctttttccctatggataatcatggcaaattcatagttgaagcgatgaaaaccgatctacatgttactagccattggaaggtataacatatcaattttgctgaacgag

SEQ ID NO: 47292 - DNA, 6057 bp, Oryza sativa
  Clone ID: PAT_MRT4530_50075C.1
atgggtttcgtctccggcatcgacgacctcgtcttcccgcccgggcagacgtttcggttcggcagcctcgacttcgtcaccaacaacttcggcaagatttctctcctcgactcggaatcagaccagtcgggagagaaccggatttcggtcccgtttggattcccgaacgcggctgaaagctacttcaagaccatctcaaccgagtcggcttcaaaccactcggccgagatcgcatcttctccaacgacaccagatcaagatgatggggcttacccaccagtcctgatgaagctccccgacgatttagcggccgtttccaccacgacaacgtcttcatcccgtaggcctaggcggaagtcggcttcaacaccgatttcgcctagcttcagggaagtcggcgtcatcctccaaccactcggcacggtttcgacggatcagctggatgactacaacagctctcccaccgtcgactcacgtcctactgacatcgtggagtacgacgaatttagttctcgctacaacgacttcgacgacttcgacggaagccttgatgacaactacacccctctctactttggcgttttcatggccaataatgagacggaggagcaacgccaagcctgggagaccgaagaacgtcgccgactggaggaggagcatcaagcacaagaacaagaacggctacggcgtgagcagcaggaccgtgagcggaccgcgaaggaggctgaggatcgacgtcagcgagctttggaagcagggcgccgagcgcgtgatctcatcgaccagcaagatgtcgaagggacaccggttttccgcacccctcaacagaatgcggttgccgcgatcacccttctcgacaccctcctcaaccaaaacgagctcaatcaatccgatcacgtcgtcaacatcttgaaccagacgaagaccatgattgcggcttcggtcccagttaactccgaaagcgtccacacgccgactggcagccgagtcccccacttccgatctcatgactaccgtcatccaagcctcagcatcaccggcgcgggatccaatcgcaggagcaggggtcacgacgagcggtccattcactcacctcccgaccaatatagggagcgccgagtggaacggcctcgctcaccacctcgtcgccgccccgtcgatcttcgcgacacaatcatacagcgccgagcagctcgaggccatcatcattcgccgaaccgccacgacgacgaccttgacggagtagcagccttcaccgacgacctgcgtcgagtggattggccagccggcttcaagccgactggaatagagaagtacgacggtaccactaacccagaatcgtggcttaccgtctacggtctcgcaatccgcgcagcaggaggagacaacaaggccatggcgaactatttaccagtggctttagcggattcggcccgatcttggctccatggattaccccgtggtacaattggatcttgggctgaattacgcgaccacttcatcgccaacttccaaggcacctttgagcgacccggcacacaatacgacctctacaacgttattcagaagtccggagaatctcttcgagattacatccggcgattttctgagcaacgtaacaagatctccgacatcaccgatgacgtcatcattgccgcattcaccaaagggattcgccacgaagaattggtcggcaagttcgggcgtaagccccccatgacagtcaagcttatgtttgaaaaagccaacgagtacgccaaggctgaagacgccgtcaccgcatcaaagcagtcgggtcccagttggaagcaaaacaagggtacgccggctacgggaggaggtggaagtaacaatcataaggaccgcaagcgtaagcctgcggaacttgttgcaaccgccagtcactcttctcgacagcgttcgcgcgtcaacacgttcgacaagatcatgaactcccaatgctcgcaccatcctaactccaaccacgtggccaaagattgtttcgtctacaagcaattcgcggatcaatacaccaagactgcacggaagaattctgacgaagaacaaagcacgtcgaggaagaaggacgacggcgacaccccggcaggttttcaagatcaccgcaaggagctcaatcatatcttcggcggccccctggcttatgagtctaaacggaagcagaagttgactgaacgggagatcaatgctgttcagcccgacacgccccaatatcttcgatggtcagagatcgcaatcaagtttgaccgctcggatcatcctgaccgagtggtccacccggggcggtaccccctggtactagacccagtggtccgtaatgtcaagcttcgcagaaccctcatcgacggtggcagtgcactcaatatcctcttcgccaagaccctggatgatatgcagatccctcactccgagttaaaaccaagcaatgcgccttttcacggagtgattccaggattatccgcaactccactcggccagatcaccctcccagtcacttttggcactcgggaaaactttcgcacagagaacatcagctttgaagtcgctgatttcgagacagcataccatgccatactcggacgcccggcgttagccaagttcatggccgtcccgcactacacttacatgatgatgaagatgcctggtccccgaggagtcctatccctacggagtgacatcaagcaagccgtcacatgcgacaaggagagttgcgacatggcccaaactcgcgagatggcgtctgcccgagaggatatccgactggctgcagccacggcgagcgaaggagaagagcccgctaccaagatttcaaagagtggagaaagcgaagccaagactaagaagattcccctagatccctctgatcctgctaaaactgctaacaataaagatatctttgcgtggaaaccatctgatatgcccggtattcctagagaggtgattgagcattccttacatgtcaaagaagacgccaagcctatcaaacaacgactccgccgatttgcacaagacaggaaagacgcgatcaaggaggaattaaccaagctgttagcagcaggcttcatcaaagaagtccttcatcccgactggctggcaaacccggttctagttcggaagaaaacagggcaatggcgcatgtgtgttgattataccgacctcaacaaatcctgccctaaagatccttttgggttgcctcgcattgaccaggtagttgactcgaccgccggccgtgagcttctcagttttttggattgctactcggggtatcatcagatccgactgaaggaatccgactgcttgaagacttcattcatcacgccttttggggcatactgctacgtcaccatgccgttcggactaaaaaacgcaggagcaacttatcaacgcatgattcagagatgcttctcaacgcagatcggccgcaacgttgaagcctatgtggatgacgtagtcgtcaagaccaagcaaaaggatgatttgatctcggatctagaagaaacctttgcgagcatccgtgctttcaggatgaaattgaaccctgaaaagtgcaccttcggagtaccgtcagggaagctggttggctttatggtgtctcataggggcatccaagccaacccggagaaagttactgctatcctcaacatgaaaccgccaagtacccagaaagatgttcagaagctgactggatgcatggcggcgctcagccgatttgtttcacgacttggcgagcgggggatgcccttctttaagctgctgaagaaaacagataacttccagtggggacccgaagcacagaaggccttcgaagatttcaagaaactcctcactgagccaccagtcttagcctcaccacacccgcaggagccgttgttgctgtatgtatcagccacctcccaggttgtgagcacagtcttggttgttgaacgcgaggaagaaggccatgtccagaaagtccaacgaccgatttattttgtcagcgaggtcctagccgactccaaaacgaggtaccctcaggttcagaagctgttatatggtattctaattactaccaggaagctatctcactactttcaaggtcactcggtaacggtggtcacatcatttccactcggtgatatactgcacaaccgcgaagcaaacggacgtattgctaagtgggctttggagttgatgtctttggacatatcattcaagccccgaatttcaatcaagtcccaagcgttagctgattttgtcgccgaatggaccgagtgccaggaggatacccccgcggagaacatggagcactggaccatgcattttgacggatccaaacgactttcgggcactggagcaggagtggttttgatttccccaactggagaaagattgagctacgtgctttggatacatttttcggcgtcccacaacgtcgccgaatatgaggccctccttcatggactgcggattgcaatttccctagggataaagcgtctaatagttcgaggcgattcacagctggttgtcaaccaagttatgaaggagtggtcctgccttgacgacaacatgatggcatatcgacaagaggtacgcaaattggaagataagttcgatggactcgagctcagtcatgttcttcgacataataatgaagccgccgatagacttgccaactttggatccaagcgcgaggtggcgccctctgatgttttcgtcgaacacctttatacgccgacagtacctcacaaagataccactcaagttgcgggcactcatgacgtcgctatggttgaaaccgactggcgagaacccctcatacgatttttgacttctcaagaactccctcaagacaaagatgaagccgagcggatttcaaggcggagcaaactttatgttatgcatgaagctgagttatacaagaaaagcccttcaggaattctgcaacgctgcgtatctttagaggaagggagacaattgctgcaggacatacattctgggatatgcggaaaccatgccgctgcacgcaccattgtcggcaaagcttaccggcagggttttttctggcctactgcagtgtccgacgccgacaagattgtgcgcacgtgcgaaggttgccaatttttcgctagacaaattcacttgccagctcaagagttgcaaactatcccgctgtcttggccgtttgcggtttgggggctcgacatggttggcccgtttaaaaaggcagtcggcggttacacacatctctttgtggccattgacaaattctccaagtggattgaagctaaaccggttgtcacaatcacagcagataatgctcgagacttcttcatcaacattgtgcatagatttggagtgcccaatcggatcatcactgataatggcacacaattcactggtggagtttttaaagacttttgtgaggactttggaattaaaatttgttatgcctcagtggcacaccccatgagcaatggacaggtggagcgagccaatggcatgatacttcaagggattaaagcacgtgtttttgaccggctaaaaccctatgccggcaaatgggtgcaacagctgccatcagtactttggtctttgcgaactacacccagtcgggccacaggccagtcaccttttttccttgtctatggggcagaagcaatgttgccgagtgaagtcgaattcgaatctttgcgctttcgaaatttccgtgaagaacgctacgaagaggaccgagtggatgacttgcaccgattggaagaagtccgcgaagcagctttgattcggtcggctcgatatttacaagggttgcggcgttatcataatcgcaatgttcgatcccgtgcctttctagtcggcgacctggttttgaggaaaattcaaactacacgggatcggcacaagttatctcctttatgggaggggccatttatcatctctgaagtcacccgaccaggttcctaccgactcaagcgcgaagacggtactctcgtcgacaactcttggaacattgaacatcttcgtcgtttctatgcttaagcttatcattgtatttccctatct

SEQ ID NO: 47293 - DNA, 775 bp, Oryza sativa
  Clone ID: PAT_MRT4530_50076C.1
atggcggtggctcgacgacgaggaggagggggcgacgacggcaaggtggatcctgcgaaggctcgctctggcgggtcggcgaaggcggtgcggcggtggcgaggttctgcggggagggagggagcaccggcggcggcggtgcacggtgagacgacgatggctcgcgaagggtcggagcagcggagccggtgggtggaggggggagtggtggcggcggctgctccgcacatatgggctcgggagtttgccaacggcagcacgggtatcctgctgcttgacatacttcggatggaatccattaagacacaatctcaaggttctgcctcttctgttccaaagaacccagccatgtcctcttgtcggaagaagaagtctgacgacgctacgttcctcgaagatctgaaagaccatatcgacgagttcatccatgcctccatggatgagcacaagcattgcttcaaaaacaccatccagaagatgtttgggatgtcaaaggttgtcgcagagcgttccgctgaagcaaaagaagctgaagtcgagagcgctttgcctcttcagaccagtgtctcgcagtaggatgccatggctgatggcagcttgtttgccttctgttgcctgtgttccgtcctgtggagcttaacaatcagtaatacctgtaatagcagtgaatatggagtctactgctttatgtttccttgtattttgctgtttttttcatatattttgagaacaaatcttgaacaaaatggggtataactaaaaagtctacttcaac

SEQ ID NO: 47294 - DNA, 5457 bp, Oryza sativa
  Clone ID: PAT_MRT4530_50077C.1
atgggttccgtctccgggatcgacgacctcgtcttcccacccgggcagacgtttcggttcggcagcctcgacttcgtcaccaacaacttcggcaagatctctctccttgactcggtgtcggcccagtcgggagagaaccggctttcagtcccgtttggactcctaaacgcggctgaaagttacttcaagaccatctcaatcgagttggcttcaaaccactcgggcgagatcgcatcttctccaacgacaccagatcaagatgatggggcttacccaccgatcctaatgaagctccccgacgattcggcggccgcctccatcacgacagcgtcttcatcccgtaggcctaggcggaagtcggcttcaacaccgatttcgcctagcttcagggaagtcggcgtcatcctccaaccactcggcacggtttcgacggatcagttggacggctactacagctctcccaccgtcgactcgcgccccaccgacatcgtggagtacgacgagtttagctctcgctacaacgaaccggatctcgacgacttcgacgaaagcctagatgacaactacacccctctctacttcggcgtcttcatggccgataacgagacggaggagcaacgccaagcccgggagaccgaagcacgtcgcgaggctgagcgtctccgactggaggaggagcgtcaagcacaagaacaagaacggttacggcgtgagcagcaggagcgtgagcggaccgcgaaggaggctgaagatcgacgacagcgagctttggaagcagggcgccgagcgcgtgatctcatcggccaacaagatgttgaagggacaccggttttccgcacccctcagcagaatgcggttgccgcgatcaccctcctcgacaccctcctcaaggaaaacgagctcaatcaatctgatcacgtcgtcaacatcttgaaccagacgaagaccatgattgcggcttcggtcccagttaactccgaaagcgtccacacgctgactggcagccgagttccccacttcagatctcatgactaccgtcatccaagcctcagcatcactggcgcaggatccaatcgcaagagcaggggtcacgacgggcggtccgttcactcacctcccgaccatcatggggagcgccgagtggaacggcctcgctcaccacctcgtcgccgccccgtcgatcttcgcgacacgatcatacagcgccgagcagctcgaggccatcatcatttgccggaccgccacgacgacgaccttgacggagtagcagccttcaccgacgatctgcgtcgagtggattggccagccggcttcaagccgactagaatagagaagtacgacggtaccactaacccagaattgtggcttaccgtctacggtctcgcaatccgcgcagcaggaggagacagcaaggccatggcgaactatctaccagtggctttagcggattccgcccgatcttggctccatggattgccccgtggtacaatcggatcttgggccgaattacgcgaccacttcatcgccaacttccaaggcaccttcgagcgtcccggcacacaatacgacctctacaacgttattcagaagtccggagaatcccttagagattacatccggcgattttctgaacaacgtaataagatctccgacatcaccgacgacgttatcatcgccgctttcaccaaagggattcgccacgaagaattggtcggcaagttcgggcgtaaacctcccaggacagtcaagcttatatttgaaaaagccaacgagtacgccaaagctgaagacgccgtcaccgcatcaaagcagtcgggtcctagttggaagccaaataagggtacgccggctacgggaggaggtggaagtaacaatcataaggaccgcaagcgtaagcctgcggaacttgttgcaaccgccagtcactcttctcgacagcgttcgcgcgtcaacacgttcgacaagatcatgaactcccaatgcccgcaccatcctaactccaaccacgtggccaaagattgtttcgtctacaagcaattcgcggatcaatacaccaagactacacggaagaactccgacgaagaacaaagcacgtcgaggaagaaggacgacggcgacgccccggcaggatttcaagaccaccgcaaggagctcaaccatatcttcggcggccccttggcttatgagtctaaacggaagcaaaagttgactgaacgggagatcaatgctgttcaacccgacacgccccagtatcttcgatggtcagaaatcgcaatcaagtttgaccgctcggatcatcctgaccgagtggtccacccggggcggtaccccctggtactagacccagtggtccgtaatgtcaagcttcgcagaaccctcatcgacggtggcagtgcactcaatatcctcttcgccaagaccttggatgacatgcagatccctcgctccgagctaaaaccaagcaatgcgccttttcacggagtaattccaggattatccgcaactccactcggccagatcaccctcccggtcacctttggcactcgggaaaacttccgcacagagaatatcagctttgaagtcgccgattttgagacagcatatcatgccatactcggacgcccggcgttagccaagttcatggccgtcccgcactacacttacatgatgatgaagatgcccggtccccgaggagtcctatccctacggagcgacatcaagcaagccgtcacatgcgacaaggagagttgcgacatggcccaaacccgcgagatggcgtctgtccgagaggatatccgactggctgcagccacggcgagcgaaggagaagtgcccgccaccaagacttcaaaaagtggagaaagcgaagccaagactaagaagattcccctagatccttctgatcctactaaaactgctaacaataaagatatctttgcgtggaaaccatctgatatgcccggtattcctagagaggtgattgagcactccttatatgtcaaagaagatgccaagcctatcaaacaacgactccgccgatttgcacaagacaggaaggacgcgatcaaagaggaattaaccaagctgttagcagcaggcttcatcaaagaagtccttcatcccgactggctggcaaacccggttctagttcgaaagaaaacagggcaatggcgcatgtgtgttgattatactgacctcaacaaatcctgccctaaagatccttttgggttgcctcgcattgaccaggtagtcgactcgaccgccggctgtgagcttctcagttttttggattgctactcggggtatcatcagatccgactaaaggaatccgactgcttgaagacttcatttatcacaccctttggagcatactgctatgtcaccatgccgttcggactaaaaaacgcaggagcaacttatcaacgtatgattcagagatgcttctcaacacagatcggtcgcaacgttgaggcctatgtggatgatgtagtcgttaagaccaagcaaaaggatgatttgattttggatctagaagaaaccttcgcgagcatccgcgctttcaggatgaaattaaaccctgaaaagtgcaccttcggagtaccgtcagggaagctgcttggttttatggtgtctcataggggcatccaagccaacccggagaaagttattgctatcctcaacatgaaaccgccaagtacccagaaagatgttcagaagctgactggatgcatggcggcgctcagccgatttgtttcaaggctcggcgagcgggggatgcccttctttaagctactaaagaaaacagacgacttccagtggggacccgaagcactgaaggccttcgaagatttcaagaaactcctcaccgagccaccagtcttagcctcaccacacccgcaggagccgttgttgctgtatgtatcagccacctcccaggttgtgagcacagtcttggtcgtcgagcgcgaggaagaaggccatgtccagaaagtccagcgaccgatttactttgtcagcgaggtcctagccgactccaaaacgaggtaccctcaggttcagaagctgttatatggtattctaattactaccaggaagctatctcactactttcaaggagtagttctaatttccccaactggagaaagattaagctatgtgctttggatacatttttcgacgtcccacaacgtcgccgagtatgaggcgctccttcatggactacggattgcaatctccctagggataaagcgtctaatagttcgaggcgattcacagctggtcgtcaaccaggttatgaaagagtggtcctgccttgacgacaacatgacggcatatcgacaagaagtacgcaaattggaagataagttcgatggactcgagctcagtcacgttcttcgacacaacaatgaagctgccgatagactcgccaactttggatccaagcgtgaggcggcaccctccgatgttttcgtcgaacacctttatacgccgacagtacctcacaaagatgctactcaagttgcgggcactcatgacgtagctatggttgaagccgactggcgagagcccctcatacgatttttgatttctcaagaactcccccaagacaaagatgaagccgagcggatttcaaggcggagcaaactttatgttatgcatgaagctgagctatacaagaaaagcccttcagggattctgcaacgctgcatatctttagaggaagggagacaattgctgaaagacatacattctgggatatgcggaaaccatgctgctgcacgtaccattgtcggcaaagcttaccggcagggttttttttggcctactgcagtgtccgacgccgacaaaatcgtgcgcacatgtgaaggttgccaatttttcgccagacaaattcatctaccagcccaagagttgcggactatcccgctgtcttggccgtttgcggtttgggggctcgacatggttggcccgtttaaaaaggcagtcggcggttacacgcacctctttgtggccattgacaaattctccaagtgggttgaagctaaaccggttgtcacaatcacagcggataacgctcgagatttcttcatcaacattgtgcatagatttggagtgcccaatcggatcatcactgataatggcagacaattcactggcggagtttttaaagacttttgtgaagactttggaattaagatttgctatgcctcagtggcgcatcccatgagcaatggacaggtggagcgagccaatggcatgatacttcaagggattaaagcgcgtgtttttgaccggctaaaaccctatgccggcaaatgggtgcaacagctgccatcagtactttggtctttgcgaactacacccagtcgggccacaggccagtcaccttttttccttgtctatggggcagaagcaatgttgccgagtgaagttgaattcgagtctttgcgcttttga

SEQ ID NO: 47295 - DNA, 213 bp, Oryza sativa
  Clone ID: PAT_MRT4530_50078C.1
atggagttcatgggtatgaaggttagaaacggcatgttcgacctaccagacttgagaatcgatcaattacgattcactaactacgaggttgcattgcacgcaatcatgaagtggccaatgacctccctcacctcctacatcgaggcgaaggcagccacacaacgatcaaacggtataaaatgccaaccaatgcacactattgtgaacccatag

SEQ ID NO: 47296 - DNA, 5895 bp, Oryza sativa
  Clone ID: PAT_MRT4530_50079C.1
atgggtcccatctccggcatcgacgacctcgtcttccctcccgggcagacgtttcggttcggcagcctcgacttcatcaccgacaacttcggcaagatttctctccttgactcggaatcggaccagtcgggagagaaccggatctcagtcccgtttggattcccaaacgcggctgaaacctacttcaagaccatctcaatcgagtcggcttcaaaccactcggctgagatcgcatcttcttcaacgtcaccagatcaagatgatggggcttacccatcggtcctgatgaagctccccgacgatttagcggccgtcttcaccacgacagcgtcttcatcccgtaggcctaggcggaagtcggcttcaacaccgatttcgcctagcttcagggaagtcggcgtcatcctccaaccactcggcacggtttcaacggaccagctggatgactacaatagctctcccaccgtcgactcacgtcctactgacatcgtggagtacgacgaatttagctctcgctacaacgacttcaacgacttcgacgacttcgacggaagcctagatgacaactatacccctctctactttggcgttttcatggccaataatgagacggaggagcaacgccaagcccgggagaccgaagaacgtcgccgactggaggaggagcatcaagcacaagaacaagaacggctacggcgcgagcagcaggaccgcgagcggactgcgaaggaggctgaggaccgacgtcagcgagctttggaagcagggcgccgagcgcgtgatctcatcggtcaacaagacgtcgaagggacaccggttttccgcacccctcaacacaatgcggttgccgcgatcaccctcctcgacacccttctcaaccaaaacgagctcaatcgttccgaccacgtcgtcaacatcttgaatcagacaaagaccatgattgcggcctcggttccagttaactccgaaagcgtccacacgccgactggcagccgagtcccccacttccgatctcatgactaccgtcatccaagcctcagcatcaccggcgcaggatccaaccgcaggagcaggggtcacgacgagcgatctgttcactcacctcccgaccttcatagggagcgccgagtggaacggcctcgctcaccacctcgtcgccgccccatcgatcttcgcgacacaatcatacagcgccgagcagctcgaggctaccatcactcgccggaccgccacgacgacgaccttgacggagtagcagcctttaccgacgatctgcgtcgagtggattggccagccggcttcaaaccgactggaatagagaagtatgacggtaccactaatccagaatcgtggcttaccgtctacggtctcgcaatccgcgcagcaggaggagacaacaaggccatggcgaactatctaccggtggctttagcagattccgcccgatcttggctccatggactgccccgtggtacgatcggatcttgggccgaattacgcgaccacttcatcgccaacttccaaggcaccttcgagcgtcctggcacacaatatgatctttacaacgttatccagaaatccggagaatcccttcgagagtatatccgacgattttctgaacaacgtaacaagatctccgacatcactgacgacgtcatcatcgccgcattcaccaaagggattcgccacgaagaattggtcggcaaatttgggcgcaaacctcccagaacagtcaagctcatgtttgaaaaagccaacgagtacgccaaagctgaagacgccgtcaccgcatcaaagcagtcgggccccagttggaagccgaaaaatacgccggctacgggaggaggtggaagtaacaatcataaggaccgcaagcgtaagcctgaggaacttgttgcaaccactactcactcttctcgacagcgttcgcgcgtcaacaccttcgacaagatcatgaactcccaatgcccgcatcatccaaattccaaccacgtggccaaagagtgcttcatctacaagcagttcgcggagcagtacaccaagtctactcggaagaactccgacgaggaacaaagcacgtcaaggaagaaggacgacggcgacaccccggctggatttcaggaccaccgcaaggagctcaaccatatttttggcggccccatggcttatgagtctaaaaggaagcaaaagctgaccgaacgggagatcaatgctgttcagcccgacacgccccaatatcttcgatggtcagagatcgcaatcaggtttgaccgctcggatcatcctgaccgagtggtccacccggggcggtaccccctggtactagacccagtggtccgtaacgtcaagcttcgcagaaccctcattgatggcggcagtgcactcaatatcctcttcgccaagactttggatgatatgcagatccctcgctccgagttaaaaccaagcaatgcgccttttcatggagtaattccaggattatccgcaactccactcggccagatcactctcccggtcacttttggcactcgggaaaacttccgcacagagaatatcagctttgaagttgccgatttcgagacagcataccatgccatactcggacgcccggcgttagccaagttcatggccgttccgcactacacatacatgatgatgaagatgcctggtccccgaggagtcctaaccctacggagcgacatcaagcaagctgtcacatgcgacaaggagagttgcgacatggcccaaacccgcgagatggcgtctgcccgagaggaaatccgactggctgcaaccacggaaagcgcgctcatcacctttcttcaaaataataaagatatctttgcgtggaaaccttcggatatgcccggtattcccagagaggtgattgagcactccttacatgtcaaagaagacgccaagcctattaaacaacgactccgccgatttgcacaagacaggaaggacgcgatcaaggaggagttaaccaagctgttagcagcaggcttcatcaaagaagtccttcatcccgactggctggcaaacccggttctagttcggaagaaaacagggcaatggcgcatgtgtgttgattataccgacctcaacaagtcttgtcccaaagatccttttgggttgcctcgcattgaccagatccgactgaaggaatccgactgcttgaagacttcattcatcacgccttttggtgcatactgctacgtcaccatgccgtttggattaaaaaatgcaggagcaacttatcaacgtatgattcagagatgcttctcaacacaaattggccgcaacgttgaagcctatgtagatgatgtagttgtcaagaccaaacaaaaggatgatttgatttcggatctagaagaaacctttgcgagcatccgtgctttcaggatgaaattgaaccctgaaaagtgcaccttcggagtaccgtcagggaagctgcttggttttatggtgtctcataggggcatccaagccaacccggagaaagttactgctatcctcaacatgaaaccaccaagcacccagaaagatgttcagaagctgactggatgcatggcggcgctcagccgattcgtttcaagacttggcgagcgggggatgcccttcttcaaactactgaagaaaacagataatttccaatggggacccgaagcacagaaggccttcgaagatttcaaacaactcctcaccaagccaccggtcttagcttcaccacacccgcaggagccgttgttgctgtatgtatcagccacctcccaggtcgtgagcacagtcttggttgtcgagcgtgaggaagaaggccatgtccagaaagttcagcgaccaatctacttcgtcagcgaggtcctggccgactccaaaacgaggtaccctcaggttcagaagctgttatatggtattttaattactaccaggaagctgtctcattactttcaaggtcacccggtaacggtggtcacatcgtttccactcggcgatgtactgcacaaccgcgaagcaaatgggcggattgctaagtgggctttggagttgatgtctttggacatatcattcaagccccgcacttcaatcaagtctcaagcgttagctgattttgtcgccgagtggaccgagtgccaagaggatacccccgcggagaacatggagcactggaccatgcattttgacggatccaaacgactttcgggcactggagcaggagtggttttgatttccccaactggagaaagattgagctatgtgctttggatacatttttcggcgtcccacaatgtcgccgagtatgaagccctccttcatgggctacggattgcaatttccctagggataaagcgtttaatagttcgaggcgattcacagctggttgttaaccaagttatgaaacagtggtcctgcctcgacgacaacatgatggcatatcgacaagaggtacgcaagttggaagacaaatttgatggactcgaactcagtcacgttcttcgacacaacaatgaagccgccgacagacttgccaattttggatccaagcgtgaggcggcgccctcagatgttttcgtcgaacacctttatacaccgactgtacctcacaaagataccactcaagttgcgggcactcatgatgtcgctatggttgaagccgactggcgagagcccttcatgcgatttttaacttctcaagagctccctcaagataaagatgaagccgagcggatttcaaggcggagcaaactttatgttatgcacgaatccgagttatacaagaaaagcccttcaggaattctgcaacgctgtatatctttagaggaagggagacaattgctgaaagacatacattctgggatatgcggaaaccatgctgctgcgcgcaccattgttggcaaagcttaccggcagggttttttctggcctactgcagtgtccgacgccgacaaaattgtgcgcacatgtgaaggttgccaattttttgccagacaaattcatctaccagctcaagagttgcaaacaatcccgctgtcttggccgtttgcggtttgggggctcgacatggttggcccgtttaaaaaggcagtcggtggttacacgcatctctttgtggccattgataaattctccaagtggatcgaagctaaaccggttgtcacaatcacagcggacaatgctcgagacttcttcatcaacattgtgcatagatttggagtgcccaatcggatcatcaccgataatggcacacaattcactggcggagtttttaaagacttttgtgaagattttggaattaagatttgctacgcttcagtggcacatcccatgagcaatggacaggtggagcgagccaatggcatgatacttcaagggattaaagcgcgtgtttttgaccggctaaaaccctatgccggcaaatgggtgcaacagctgccatcagtactttggtctttgcgaactacacccagtcgggccacaggccagtcaccttttttccttgtctatggggcagaagcaatgttgccgagtgaagtcgaatttgagtctttgcgcttccgtaatttccgtgaagaacgctatgaagaagatcgagtggacgacttgcatcgactggaagaggtccgcgaagcagctttgattcagtcagctcggtacttacaagggttgcgacgttatcataatcgcaatgttcgatctcgtgcctttctagtcggcgacctggttttacggaaaattcaaaccacacgagatcggcacaagttatctcctctatgggaagggccatttattatctctgaagttacccggccaggttcatatcgactcaagcgcgaagacggcactctcgtcgacaactcttggaacattgaacatcttcgtcgtttctacgcttaa

SEQ ID NO: 47297 - DNA, 3543 bp, Oryza sativa
  Clone ID: PAT_MRT4530_5007C.1
atgccgcccccaatcgccgggaacgcccgcgtcttcctcggccgccctccattgccgccggccgtgaaccccctctttgcgttctaccgttttggtctcctcccaagctctcccgtggtctctagccacctccccaccgtcgccctctctctcccacgttgccggccggcctccagccgcctctcccgcctcgccagagcgtcgtccggccgcgccgtcgcctcctccagcgtcgccgccacctcctccaccccggcctgccctccgcttcgcgcggtgaccgccggaggcgcactcccgccgtcgcccttctcattcctccttgccggccacctccagccgcacctcccgcctcacccgtgcaccctccggctgcgccgccacctctcccggcgtcgcagctgccccctctccctcgtggcgtcgccaccacttctccgcctccggccgcctctgccacgtccccggagcgccggccgacgtcgccaccaccttcctcggctccacgacgccgctctcatccccggcatcacctcctcctcgcccgaacttcgccggaacaccgtcgcccgcgccggcttctccttcctcctcggcggcatctcccccggctgcccttttcgccatgcccatgcgtcagccggcgctgccatctctcccttgcgtggtggcgtagccctccacctcgtccactcctcggtttcgccggaacgccatcgccgcgaacctctacatccgcctcgccggagttgttcggccacctgtccctcctcgccgtgcaccggtcgaccacacctccaccacctccggcatcgcagcggcaaggtcgcccttggcctcgcttcccctccatccaaacccctccgcggtccatcatcgtcgtctccgatcgttctcgtcgacgacgtcccgtcggtcgcccggctcgtcgtctcgcggcgccgcctccgtcgtcggcatcgtagcggcgtggtcctcgtcgtcctcgtccccgtgcagccgctgccggctgtcctcgtcgcctcctcgccggtcccggtcgtcgtcgtcgtcgtcgtcctctcgtcgttcccggtcgtcgtggcccccgtcctcgtctccgccctcggctccgcgtcgccaagcctcgtgccggccgcgtctcgcctttgtccaaggatcgccgccgaagtcgttccctcgccgttcgcctccgtcgtccccgagctgtcctcgccggtcccgttcgtcgttgtcgttcccaagcctcgtcgcgtggtgctttcgtcgttccggaggttccagaagcgtggttcgcggtcgtcgccgaagaatcggaacaacccagcaggggcaaccaacgttcaagtacctacagtccagcaacagtgcaagttatcagaatttctcaaaacggggcctccaacctttgccatggccgtcgatcctatggaagccagtgattggttgcgcacaatcgagaagaagctagggttgattcagtgcaccgaccaggagcgggttggcttcgcaactcatcagctggttggaccggcttcagagtggtgggatagctacgaagcatcatggccagaaggacataccatcacctggaacgagttttcatctgtattcaagagatcacatgttcccgcaggaatgatcacactaagaaaacgagagttccgctacctgaagcaaggagatttgaccgtcacagagtacctgcacgagttctatcgtttggctcaatatgcaccagaagatgtggaaacggatgaagacaaacaagagaagtttctccaggggttaaaagatgagcttgcagtgcaactacttctagaggattatgaagattttgagaaacttgtggacaaagccatgcaactcgaaagtgagcataatcggatgacgaactgcaagagaaggattgtcaacatcccagtatttccaggtggtaaccaaagacagcgcactgagccacttcagatcaccggatcttctgttgcgcctcaagagtttccgccccaagaagatggacgcaatgcagacaacaacactagcaatactaatgatgatgataccaccaacaaccatggttcttgccccattagtgaccactcgaataaagcgtgccatgtcagtagcattcaccaagatgtcaacgatagtatcaatgatggcacccaaaatgacaaccctagtaattgggactctgggcaggactccaatggtgatagcaataatggtaccactgatgccaatgtcatttctctagagattgtccacagccgaagcgtaacctgcgccatcactccggccattatgcaagaagaagacaagtcactcgccttgtggtcactggagcaaacgccgtacctccgcctctcccgcctcgccagagcgtcgtccggccgcgccgtcgcctcctccagcgtcgccgccacctcctccaccccggcctgccctccgcttcgcgcggtgaccgccggaggcgcactcccgccgtcgcccttctcattcctccttgccggccacctccagccgcacctcccgcctcacccgtgcaccctccggctgcgccgccacctctcccggcgtcgcagctgccccctctccctcgtggcgtcgccaccacttctccgcctccggccgcctctgccacgtccccggagcgccggccgacgtcgccaccaccttcctcggctccacgacgccgctctcatccccggcatcacctcctcctcgcccgaacttcgccggaacaccgtcgcccgcgccggcttctccttcctcctcggcggcatctcccccggctgcccttttcgccatgcccatgcgtcagccggcgctgccatctctcccttgcgtggtggcgtagccctccacctcgtccactcctcggtttcgccggaacgccatcgccgcgaacctctacatccgcctcgccggagttgttcggccacctgtccctcctcgccgtgcaccggtcgaccacacctccaccacctccggcatcgcagcggcaaggtcgcccttggcctcgcttcccctccatccaaacccctccgcggtccatcatcgtcgtctccgatcgttctcgtcgacgacgtcccgtcggtcgcccggctcgtcgtctcgcggcgccgcctccgtcgtcggcatcgtagcggcgtggtcctcgtcgtcctcgtccccgtgcagccgctgccggctgtcctcgtcgcctcctcgccggtcccggtcgtcgtcgtcgtcgtcgtcctctcgtcgttcccggtcgtcgtggcccccgtcctcgtctccgccctcggctccgcgtcgccaagcctcgtgccggccgcgtctcgcctttgtccaaggatcgccgccgaagtcgttccctcgccgttcgcctccgtcgtccccgagctgtcctcgccggtcccgttcgtcgttgtcgttcccaagcctcgtcgcgtggtgctttcgtcgttccggaggttccagaagcgtggttcgcggtcgtcgccgaaggttcggaaggccgttctctctgagcaaggcaagtcacatcatccttga

SEQ ID NO: 47298 - DNA, 5592 bp, Oryza sativa
  Clone ID: PAT_MRT4530_50080C.1
atgggttccgtctccggcatcgacgacctcgtcttcccacccgggcagacgtttcggttcggcagcctcgacttcgtcaccaacaacttcggcaagatctctctccttaactcggagtcagaccagtcgggagagaaccggatctcagtcccgtttggactcccaaacgcggctgaaagttacttcaagaccatctcaatcgagtcggcttcaaactactcgggcgagatcgcatcttctccaacgacaccagatcaagatgatggggcttacccaccaatcctgatgaagctccccgacgatttagcggccgtctccatcacgacagcgtctccatcccgtaggcctagacggaagtcggcttcaacaccgatttcgcctagcttcagggaagtcggcgtcatcctccaaccactcggcacggtttcgacggatcagctggacggctactacagctctcccaccgtcgactcgcgtcccaccgacatcgtggacctagatgacaactacacccctctctacttcggcgtcttcatggccgataacgagacggaggagcaacgccaagcccgggaaaccgaagcacgtcgcgagactgagcgtcgccgactggaggaggagcgtcaagcacaagaacaagaacggctacggcgtgagcagcaggagcgtgagcggaccgcgaaggaggctgaggatcgacggcagcgagccttggaagcagggcgccgagcgcgtgatttcatcggccaacaagatgttgaagggacaccggttttccgcacccctcaacagaatgcggttgccgcgatcaccctcctcgacaccctcctcaaggaaaacgagctcaatcaatctgatcacgtcgtcaacatcttgaaccagacgaagaccatgattgcggcttcggtcccagttaactccgaaagcatccgcacaccgactggcagccgagtcccccacttccgatctcatgactactgtcatccaagcctcagcatcaccggcgcaggatccaatcgcaggagcaggggtcacgacgagcggtccgttcactcacctcccgaccatcatagggagcgccgagtggaacggcctcgctcaccacctcgtcgccgccccgtcgatcttcgcgacacaatcatacagcgccgagcagctcgaggctatcatcattcgccggaccgccacgacgacgaccttgacggagtagcagccttcaccgatgacctgcgtcgagtggattggccagccggcttcaagccgactggaatagagaagtacgacggtaccactaacccagaatcgtggcttaccgtctacggtctcgcaatccgcgcagcaggaggagacagcaaggccatggcgaactatttaccagtggctttagcggattccgcccgatcttggctccatggattgccccgtggtacaattggatcttgggccgaattacgcgaccacttcatcgccaacttccaaggcaccttcgagcgtcctggcacacaattcgacctctacaacgtcattcagaagtccggagaatcccttcgagattacatccggcgattttctgaacaacgtaacaagatctccgacatcaccgacgacgttatcatcgccgcattcaccaaagggattcgccacgaagaattggtcggcaagttcgggcgtaagcctcccaggacagtcaagcttatgtttgaaaaagccaacgagtacgccaaagctgaagacgccgtcaccgcatcaaagcagtcgggtcccagttggaagccaaacaagggtacgccggctacgggaggaggtggaagtaacaatcataaggaccgcaagcgtaagcctgaggaacttgttgcaaccgtcactcactcttctcgacagcgttcgcgcgtcaacacgttcgacaagatcatgaactcccaatgcccgcaccatcctaactccaaccacgtggccaaagattgtttcgtctacaagcagtttgcggagcaatacaccaagactacacggaagaactctgacgaagaacaaagcacgtcgaggaagaaggacgacggtgacaccccggcaggatttcaagaccaccgcacggagctcaaccatatcttcggcggccccctggcttatgagtctaaaaggaagcaaaagttgactgaacgggagatcaatgctgttcagcccgacacgccccagtatcttcgatggtcagaaattgcaatcaagtttgaccgctcggatcatcctgaccgagtggtccacccggggcggtaccccctggtactagacccagtggtccgtaatgtcaagcttcgcagaaccctcatcgacggcggcagtgcactcaatatcctcttcgccaagaccttggatgatatgcagattcctcgctccgagctaaaaccaagcaatgcgccttttcacggagtaattccaggattatccgcaactccactcggccagatcaccctcccggtcacttttggcactcgggaaaacttccgcacagagaatatcagctttgaagtcgccgatttcgagacagcataccatgccatactcggacgcccggcgttagccaagtttatggccgtcccgcactacacttacatgatgatgaagatgcctggtccccgaggagtcctatccctacggagcgacatcaagcaagccgtcacatgcgacaaggagagttgcgacatggcccaaacccgcgagatggcgtcagcccgagaggatatccgactggctgcagccacggcgagcgaaggagaagtgcccgctaccaagatttcaaaaagtggagaaagcgaagccaagactaaaaagattcccctagatccttctgattctactaaaactgctaacaataaagatatctttgcgtggaaaccatctgatatgcccggtattcctagagaggtgattgagcactccttacatgtcaaagaagatgccaagcctatcaaacaacgactccgccgattcgcacaagacaggaaagacgcgatcaaggaggaattaaccaagctgttagcggcaggcttcattaaagaagtccttcatcccgactggctggcaaacccggttctagttcggaagaaaacggggcaatggtgcatgtgtgttgattatactgacctcaacaaatcttgccctaaggatccttttgggttgcctcgcattgaccagatcggtcgcaacgttgaagcctatgtggatgatgtagtcgtcaagaccaagcaaaaggatgatttgatctcggatctagaagaaaccttcgcgagcatccgcgctttcaggatgaaattaaaccctgaaaagtgcaccttcggagtaccgtcagggaagctgcttggttttatggtgtctcataggggcatccaagccaacccggagaaagttacagctatcctcaacatgaaaccgccaagtacccagaaagatgttcagaagctgactggatgcatggcggcgctcagccgatttgtttcaagacttggcgagcgggggatgcccttctttaagctactaaagaaaacagacgacttccagtggggacccgaagcacagaaggccttcgaagatttcaagaaactcctcaccgagccaccggtcttagcctcaccacacccgcaggagccgttgttgctgtatgtagcagccacctcccaggttgtgagcacagtcttggtcgttgagcgcgaggaagaaggccatgtccagaaagtccagcgaccgatttactttgtcagcgaggtcctagccgactccaaaacgaggtaccctcagtcccaagcgttagctgattttgtcgccgaatggaccgagtgccaggaggatacccccgcggagaagatggagcactggactatgcattttgacgggtcaaaaagactttcgggcactggagcaggggtagttctaatttccccaactggagaaagattaagctatgtgctttggatacatttttcggcatcccacaacatcgccgagtatgaggccctccttcatggactgcggattgcaatttccctagggataaagcgtctaatagttcgaggcgattcacagctggtcgtcaaccaagttatgaaagagtggtcctgccttgacgacaatatgatggcatatcgacaagaggtacgcaaattggaagacaagttcgatggactcgagctcagtcacgttcttcgacacaacaatgaagccgccgacagacttgccaactttggatccaagcgcgaggtggcgccctccgatgttttcgtcgaacacctttatacgccgacagtacctcacaaagatactactcaagttgcgggcactcatgatgtagctatggttgaagccgattggcgagaacccctcatacgatttttgacttctcaagaactcccccaagacaaagatgaagccgagcggatttcaaggcggagcaaactttacgttatgaatgaagctgagttgtacaagaaaagcccttcagggattctgcaacgctgcgtatctttagaggaagggagacaattgctgaaagacatacattctgggatatgcggaaaccatgctgccgcacgcaccattgtcggcaaagcttaccggcagggttttttttggcctactgcagtgtccgacgccgacaaaattgtgcgcacgtgcgaaggttgccaatttttcgccagacaaattcatctaccagctcaagagttgcagaccatcccactgtcttggccgtttgcggtttgggggctcgacatggttggcccgtttaaaaaggcagtcggcggttacacgcacctctttgtggccattgacaaattctccaagtggattgaagctaaaccggttgtcacaatcacagcagataacgctcgagacttcttcatcaacattgtgcatagatttggagtgcctaatcggatcatcactgataatggcagacaattcactggcggagtttttaaagacttttgtgaagactttggaattaagatttgctatgcctcagtggcgcatcccatgagcaatggacaggtggagcgagccaatggcatgatacttcaagggattaaagcgcgtgtttttgactggctaaaaccctatgccggcaaatgggtgaaacagctgccatcagtactttggtctttgcgaactacacccagtcgggccacaggccagtcaccttttttccttgtctatggggcagaagcaatgttgccgagtgaagttgaattcgagtctttgcgctttcgaaatttccgtgaagaacgctacgaagaggaccgagtggatgacttgcaccgattggaagaagtccgcgaagcggctttgattcagtcggctcgatacttacaagggctgcgacgttatcacaatcgtaatgttcgatcccgtgcctttctagtcggcgacctggttttgaggaaaattcaaactacacgagatcggcacaagttatctcctctatgggaagggccatttctcatctctgaagtcacccgaccaggttcctatcgactcaagcgcgaagacggtacactcgtcgacaactcttggaacattgaacatcttcgtcgtttctacgcttaa

SEQ ID NO: 47299 - DNA, 5928 bp, Oryza sativa
  Clone ID: PAT_MRT4530_50081C.1
atgggttccgtctccggcatcgacgacctcgtcttcccacccgggcagacgtttcggttcggcagcctcgacttcgtcaccaacaacttcggcaagatctctctccttgactcggtgtcggcccagtcgggagagaaccggctttcagtcccgtttggactcccaaacgcggctgaaagttacttcaagaccatctcaatcgagttggcttcaaaccactcgggcgagatcgcatcttctccaacgacaccagatcaagatgatggggcttacccaccgatcctaatgaagctccccgacgattcggcggccgcctccatcacgacagcgtcttcatcccgtaggcctaggcggaagtcggcttcaacaccgatttcgcctagcttcagggaagtcggcgtcatcctccaaccactcggcacggtttcgacggatcagttggacggctactacagctctcccaccgtcgactcgcgccccaccgacatcgtggagtacgacgagtttagctctcgctacaacgaaccggatctcgacgacttcgacgaaagcctagatgacaactacacccctctctacttcggcgtcttcatggccgataacgagacggaggagcaacgccaagcccgggagaccgaagcacgtcgcgaggctgagcgtctccgactggaggaggagcgtcaagcacaagaacaagaacggttacggcgtgagcagcaggagcgtgagcggaccgcgaaggaggctgaagatcgacgacagcgagctttggaagcagggcgccgagcgcgtgatctcatcggccaacaagatgttgaagggacaccggttttccgcacccctcagcagaatgcggttgccgcgatcaccctcctcgacaccctcctcaaggaaaacgagctcaatcaatctgatcacgtcgtcaacatcttgaaccagacgaagaccatgattgcggcttcggtcccagttaactccgaaagcgtccacacgccgactggcagccgagttccccacttccgatctcatgactaccgtcatccaagcctcagcatcaccggcgcaggatccaatcgcaggagcagggctcgaggccatcatcattcgccggaccgccatgacgatgaccttgacggagtagcagccttcaccgacgatctgcgtcgagtggattggccagccggcttcaagccgactggaatagagaagtacgacggtaccactaacccagaatcgtggcttaccgtctacggtctcgcaatccgcgcagcaggaggagacagcaaggccatggcgaactatctaccagtggctttagcggattccgcccgatcttggctccatggattgccccgtggtacaatcggatcttgggccgaattacgcgaccacttcatcgccaacttccaaggcaccttcgagcgtcccggcacacaatacgacctctacaacgttattcagaagtccggagaatcccttagagattacatccggcgattttctgaacaacgtaataagatctccgacatcaccgacgacgttatcatcgccgctttcaccaaagggattcgccacgaagaattggtcggcaagttcgggcgtaaacctcccaggacagtcaagcttatgtttgaaaaagccaacgagtacgccaaagctgaagacgccgtcaccgcatcaaagcagtcgggtcctagttggaagccaaataagggtacgccagctacgggaggaggtggaagtaacaatcataaggaccgcaagcgtaagcctgcggaacttgttgcaaccgccagtcactcttctcgacagcgttcgcgcgtcaacacgttcgacaagatcatgaactcccaatgcccgcaccatcctaactccaaccacgtggccaaagattgtttcgtctacaagcaattcgcggatcaatacaccaagactacacggaagaactccgacgaagaacaaagcacgtcgaggaagaaggacgacggcgacgccccggcaggatttcaagaccaccgcaaggagctcaaccatatcttcggcggccccttggcttatgagtctaaacggaagcaaaagttgactgaacgggagatcaatgctgttcaacccgacacgccccagtatcttcgatggtcagaaatcgcaatcaagtttgaccgctcggatcatcctgaccgagtggtccacccggggcggtaccccctggtactagacccagtggtccgtaatgtcaagcttcgcagaaccctcatcgacggtggcagtgcgctcaatatcctcttcgccaagaccttggatgacatgcagatccctcgctccgagctaaaaccaagcaatgcgccttttcacggagtaattctaggattatccgcaactccactcggccagatcaccctcccggtcacctttggcactcgggaaaacttccgcacagagaatatcagctttgaagtcgccgattttgagacagcatatcatgccatactcggacgcccggcgttagccaagttcatggccgtcccgcactacacttacatgatgatgaagatgcccggtccccgaggagtcctatccctacggagcgacatcaagcaagccgtcacatgcgacaaggagagttgcgacatggcccaaacccgcgagatgacgtctgtccgagaggatatccgactggctgcagccacggcgagcgaaggagaagtgcccgccaccaagacttcaaaaagtggagaaagcgaagccaagactaagaagattcccctagatccttctgattctactaaaactgctaacaataaagatatctttgcatggaaaccatctgatatgcccggtattcctagagaggtgattgagcactccttacatgtcaaagaagatgccaagcctatcaaacaacgactccgccgattcgcacaagacaggaaagacgcgatcaaggaggaattaaccaagctgttagcagcaggcttcatcaaagaagtccttcatcccgactggctggcaaacccggttctagttcggaagaaaacagggcaatggcgcatgtgtgttgattatactgacctcaacaaatcctgccctaaagatccttttgggttgcctcgcattgaccaggtagtcgactcgaccgccggctgtgagcttctcagttttttggattgctactcggggtatcatcagatccgactaaaggaatccgactgcttgaagacttcatttatcacgccctttggagcatactgctatgtcaccatgccgtttggactaaaaaacgcaggagcaacttatcaacgtatgattcagagatgcttctcaacacagatcggtcgcaacgttgaggcctatgtggatgatgtagtcgttaagaccaagcaaaaggatgatttgattttggatctagaagaaaccttcgcgagcatccgcgctttcaggatgaaattaaaccctgaaaagtgcaccttcggagtaccgtcagggaagctgcttggttttatggtgtctcataggggcatccaagccaacccggagaaagttattgctatcctcaacatgaaaccgccaagtacccagaaagatgttcagaagctgactggatgcatggcggcgctcagccgatttatttcaaggctcggcgagcgggggatgcccttctttaagctactaaagaaaacagacgacttccagtggggacccgaagcacagaaggccttcgaagatttcaagaagctcctcaccgagccaccagtcttagcctcaccacacccgcaggagccgttgttgctgtatgtatcagccacctcccaggttgtgagcacagtcttggtcgtcgagcgcgaggaagaaggccatctccagaaagtccagcgaccgatttactttgtcagcgaggtcctagccgactccaaaacgaggtaccctcaggttcagaagctgttatatggtattctaattactaccaggacgctatctcactactttcaaggtcactcggtaacggtggtcacatcatttccactcggtgatatactgcacaaccgtgaagcaaacggacggattgctaagtgggctttggagttgatgtctttggacatatcattcaagccccgaatttcgatcaagtcccaagcgttagctgattttgtcgccgaatggaccgagtgccaggaggatacccccgcggagaagatggagcactggaccatgcattttgacgggtcaaaacgactttcgggcactggagcaggagtagttctaatttccccaactggagaaagattaagctatgtgctttggatacatttttcgacgtcccacaacgtcgccgagtatgaggcgctccttcatggactacggattgcaatctccctagggataaagcgtctaatagttcgaggcgattcacagctggtcgtcaaccaggttatgaaagagtggtcctgccttgacgacaacatgatggcatatcgacaagaagtacgcaaattggaagataagttcgatggactcgagctcagtcacgttcttcgacacaacaatgaagctgccgatagactcgccaactttggatccaagcgtgaggcggcaccctccgatgttttcgtcgaacacctttatacgccgacagtacctcacaaagatgctactcaagttgcgggcactcatgacgtagctatggttgaagccgactggcgagagcccctcatacgatttttgacttctcaagaactcccccaagacaaagatgaggccgagcggatttcaaggcggagcaaactttatgttatgcatgaagctgagttgtacaagaaaagcccttcagggattctgcaacgctgcgtatctttagaggaagggagacaattgctgaaagacatacattctgggatatgcggaaaccatgctgctgcacgcaccattgtcggcaaggcttaccggcagggtttcttttggcctactgcagtatccgatgccgacaaaattatacgcacgtgcgaaggttgccagtttttcgccagacaaattcatctaccagctcaagagttgcagaccatcccactgtcttggccgtttgcggtttgggggcttgacatggttggcccgtttaaaaaggcagtcggcggttacacgcatctctttgtggccattgacaaattctccaagtggattgaagctaaaccggttatcacaatcacagcagataacgctcgagacttcttcatcaacattgtgcatagatttggagtgcccaatcggatcatcactgataatggcagacaattcactggcagagtttttaaagacttttgtgaagactttggaattaagatttgctatgcctcagtagcgcatcccatgagcaatggacaggtggagcgagccaatggcatgatacttcaagggattaaggcgcgtgtttttgaccggctaaaaccctatgccggcaaatgggtgaaacagctgccatcagtactttggtctttgcgaactacacccagtcgggccacaggccagtcaccttttttccttgtctatggggcagaagcaatgttgccgagtgaagttgaatttgagtctttgcgctttcgaaatttccgtgaagaacgctacgaagaggaccgagtggatgacttgcaccgattggaagaagtccgcgaagcggctttgattcagtcggctcgatacttacaagggttgcggcgttatcataaccgcaatgttcgatcccgtgccttcctagtcggcgacctggttttgaggaaaattcaaactacacgagatcggcacaagttatctcctctatgggaagggccatttatcatctctgaagtcacccgaccaggttcctatcgactcaagcgcgaagacggtactctcgtcgataactcttggaacattgaacatcttcgtcgtttctatgcttag

SEQ ID NO: 47300 - DNA, 3909 bp, Oryza sativa
  Clone ID: PAT_MRT4530_50082C.1
atgggttccatctccggcatcgacgacctcgtcttcccacccgggcagacgtttcggttcggcagcctcgacttcgtcaccaacatcttcggcaagatctctctccttgactcggagtcggaccagtcgggagagaaccagatttcggccccgtttggactcccaaacgcggctgaaagttacttcaagaccatctcgaccgagtcggcttcaaaccactcgggcgagatcgcatcttcaccaacgtcaccagatcaagatgatggggtttacccaccgatcctgatgaagctccccgacgatttggcggccgtctccatcacgccagcgtctctttcccgtaggcctaggcggaagtcggcttcaacaccgatttcgcctagcttcagggaagttggcgtcatcctccaaccactcggcacggtttcgacggatcagctagatggcgactacagctctcccaccgtcgactcgcgccccaccgacatcgtggagtacgacgagtttacctctcgctaccacgacccggatctcgacgacttcgacggaagcctagatgacaactacacccctctctattttggcgtcttcatggccaataacgagacggaggagcaacgccaagcccgggagaccgaagcgcgtcgcgagactgagcgccgccgactggaagaggagcatcaagcacaagaacaagaacggttacggcatgagcagcaggagcgtgagcggaccgcgaaggaggctgaggatcgacggcagcgagctttggaagcagggcgccgggcgcgtgatctcatcggccagcaagatgttgaagggacgccgacgaagactgtgattgcggcttcggtcccagttaactccgaaagcgtccacaggccgactggcagccgagtcccccacttccgatctcatgactaccgtcatccaagcctcagcatcaccggcgcaggatccaatcgcaggagcaggggccacgacgagcggtctgttcactcacctcccgaccaccatagggagcgccgagtggaacggcctcgctcaccacctcgtcgccgccccgtcgatcttcgcgatacaatcatacagcgccgcgcagctcgaggctatcatcactcgccggaccgccacgacgacgaccttgacggagtagcagccttcaccgacgacctgcgtcgagtggactggccagccggcttcaagccgactggaatagagaagtacgatggtaccactaacccagaatcgtggcttaccgtctacggtctcgcaatccgcgcagcaggaggagacagcaaggccatggcgaactatttaccagtggctttagcggattccgcccgatcttggctccatggattgccccgtggtacaatcggatcttgggccgagttacgtgaccacttcatcgccaactttcaaggcaccttcgagcgtcccggcacacaatacgacctctacaacgtcattcagaagtccggagaatcccttcgagattacatccggcgattttctgaacagcgtaacaagatctccgacatcaccgacgacgtcatcatcgtcgcattcaccaaagggattcgccacgaagaattggttggcaaattcgggcgtaagcctcccaggactgtcaagctcatgtttgaaaaagccaacgagtacgccaaagctgaagacgccgtcaccacgtcaaagcagtcgggtcccagttggaagccaaaaaaggatacgccggcttcgggaggaggtggaagtaacaatcataaggaccgcaagcgtaagcctgcagaacttgttgcaaccgccagtcactcttctcgacagcgttcgcgcgtcaacacgttcgacaagatcatgaactcccaatgcccgcaccatcctaactccaaccacgtggccaaagattgtttcgtctacaagcaattcgcggatcaatacaccaagactacacggaagaactccgacgaagaacaaagcacgtcgaggaagaaggacgacggcgacaccccggcaggttttcaagaccaccgcaaggagctcaaccatatcttcggcggccccctggcttatgagtctaaacggaagcaaaagttgaccgaacgggagatcaatgctgttcagcccgacacgccccaatatcttcgatggtcagagattgcaatcaagtttgaccgctcggatcatcctgaccgagtggtccacccggggcggtaccccctggtactagacccagtggtccgtaatgtcaagcttcgcagaaccctcatcgacggtggcagtgcactcaatatccttttcgccaagaccttggatgatatgcagattcctcgctccgagttaaaaccaagcaatgcgccttttcacggcgtaattccaggattatccgcaactccactcggccagatcaccctcccggtcacttttggcactcgggaaaactttcgcacagagaatatcagcttcgaagtcgccgatttcgagacagcataccatgccatactcggacgcccggcattagccaagttcatggccgtcccgcactacacttacatgatgatgaagatgcctggtccccgaggagtcttatccctacggagtgacatcaagcaagccgtcacatgcgacaaggagagttgcgacatggcccaaacccgcgagatagcgtctgctcgagaggatatccgactggctgcagccacggcggacgaaggagaagtgcccgctaccaagacttcaaaaagtggagaaagcgaagccaagactaagaagattcccctagatccctctgatcctactaaaactgctgtaataggcgccgaagaggtgattgagcactccttacatgtcaaagaagacgccaagcctatcaaacaacgactccgccgattcgcacaagacaggaaggacgcgatcaaggaggaattaaccaagctgttagcagcaggcttcattaaagaagtccttcatcccgactggctggcaaacccagttctagttcggaagaaaacagggcaatggcgcatgtgtgttgattacactgacctcaacaaatcctgccctaaagatccttttgggttgcctcgcattgaccaggtagttgactcgaccgccggctgtgagcttctcagttttttggattgctactcggggtatcaccagatccgactgaaggaatccgactgcttgaagacttcattcatcacgcccttcggggcatactgctacgtcaccatgccatttggactcaaaaacgcaggagcaacttatcaacgtatgatccagagatgcttctcaacgcagattggccgcgacgttgaagcctatgtggatgatgtagtcgtcaagaccaagcaaaaggatgatttgatctcggatctggaagaaaccttcgcgagcatccgtgctttcaggatgaaattaaaccctgaaaagtgcaccttcggagtaccgtcagggaagctgcttggttttatggtgtctcatagaggcatccaagccaacccggagaaagttactgctatcctcaacatgaaaccgccaagtacccagaaagatgttcagaagctgactggatgcatggcggcgctcagccgatttgtttcaagacttggcgagcgggggatgcccttctttaagctactaaagaaaacagatgatttccagtggggacctgaagcacagaaggccttcgaagatttcaagaaactcctcaccgagccaccggtcctagcctcaccacacccgcaggagccgttgttgctgtatgtatctgccacctcccaggttgtgagcactgtcttggtcgttgagcgtgaggaagaaggccatgtccagaaagtccagcgaccgatttattttgtcagcgaggtcctagccgactccaaaacgaggtaccctcaggtttag

SEQ ID NO: 47301 - DNA, 306 bp, Oryza sativa
  Clone ID: PAT_MRT4530_50083C.1
tggtggtgcgatgccccttgacacgtgtgtgactgtgctgcgtgatgatgatgcatgcttgggagggcctgagcttgtcaagtgaccgtgaccaaggatgcaatgatggcaatgaatggtgatggtgatggacaacacaaatgatgcaaggatgaacgggtgttggcgcaagtgaatgatgactgctatcgcagcatgcatattgtatattgtaaaataagatatacttatgttgtatcggtactgcttaattggatcccacacgatattgagtattgtacaccgtaaaaaaaaaaaaaaaaaaaa

SEQ ID NO: 47302 - DNA, 1329 bp, Oryza sativa
  unsure (1)..(1329): unsure at all n locations
  Clone ID: PAT_MRT4530_50084C.1
gcacgaggttcctcttcctcctcctcctccacccccaaatcgcctcgacgagcggcgcggcggcgagggcaggagagaggcggcggcggcggcggcggcgggggcgagatgagcgactcgttctgcccggactgcaagaagcacacggaggtggcgttcgaccactcggcgggggacacagtgtgcacggagtgcggcctcgtcctggaggcgcactccgtcgacgagacctccgagtggcggacgttcgccaacgagtccagcgacaacgaccccgtccgtgtcggcggcccgaccaacccgctcctcaccgacggcggcctctccaccgtcatcgccaagcccaacggcgcccagggggagttcctctcctcctccctcggcaggtggcagaaccgcggctccaaccccgaccgctccctcatcctcgccttccgcaccatcgccaacatggccgacaggttaggtcttgtggctacaatcaaggaccgagccaatgaaatatataagaaggtggaagatctcaagtctatcaggggaagaaatcaagatgccatattagctgcctgtttgtatattgcttgtagacaagaggatcggcctagaactgtaaaagaaatatgttcggtcgctaatggagcaacaaagaaagagataggccgagcaaaggaatttatcgtgaagcaactggaagttgaaatgggtcaatctatggagatgggaaccatccatgctggagatttcctgaggcgtttctgttcaactcttgggatgaacaatcaagctgttaaagcagcccaggaagcagttcagcgttcagaggaacttgatataaggaggagtcctatttccattgcggctgctgtcatttacatgataacccaactctcagatgataagaagcctctgaaagacatatccttggctactggtgtggcagaaggtaccatcagaaattcatacaaggatctgtatccctatgcttcaaggctcatcccaaacacctatgccaaggaggaagacctgaagaatctgtgcacaccataggaaatttttttcttttcttttttgtcacataacatggaaattagatttgccagagaggagtaatgttgtccttggatgtgagttttactggcccatgtatcactgcacctaattttatgtgcatggacctgttagaacaaagttatctcgaatcgaagctaagttatatgcaaagcttatttaggaatggcaaaaaaaaaaaaaaaaaaaaaaaaaaaaaaaaagggcggccccntgggtngacctcaagggggggcccggtncccaattgggccctatagc

SEQ ID NO: 47303 - DNA, 1024 bp, Oryza sativa
  Clone ID: PAT_MRT4530_50085C.1
cggcggcagtcgtccgttcgcgaatccaccggaagcgagcccccgatttctcgacttcgtcggcgaccgaccggggtccagaaccctaaccctaaccctagcgaggaagaaggcggcggcggcggccggaggggggagatggtgtactacgcgctgtactggtgggcggacctggacaacctcaccaacctgcagccccgctacggctgcgacgacccgacctacccctactacttcaagctgcggtgcgagaactgcggggaggtcagcgccaaggcaacctgcgtctccctcggcgaggtcgtcgacctgcccaacggacgcagcaccgctaaccttgtccagaagtgcaagctttgtgggagggatgcatcgattgtgatgattcctgggcaggggacaccactgactatggagcagagccaaaaaggagatagaacttgtttgatggtctttgactgcagaggctgtgaacctattgatttcgcttttggtaatggctggaaggctgaatctctggaagggacttcatttgacattgactgctctgaaggtgagtttgctgattacgatgagaagggggagtgccctgtaggtgtgggcaagctgcggtcagaattcagagtggtgaagaagcaggagagtcgtgggaagactaaatatgtctagatccagcggcatctggggtattcaatcatacaagctgggaatgtataaagcgtattataaaatgagacctttctctcgtatgtgtgaacaaaactcgggaacatccttttgctgatgctgtgggatgccaatggatttggcgacatgttaggcaccgaaccatccattattccctaccagttccattaacctggatcatttcgtgaagtcttgcacatgtctgatatcgaatgttttacccgtgtctctgatgttgaaggttctgctcatgtctgatattgaatgttttgctcatgtctgacatctgtgcaggccatagcaaattgtaattgcaaatgctgccagagcctcatat

SEQ ID NO: 47304 - DNA, 156 bp, Oryza sativa
  Clone ID: PAT_MRT4530_50086C.1
atggctctgctgtggaagctgagcgacatggttgcgttgagtgaaactactctggactcctatgatcctatcagatactcctaccttccaagctcagtggaggccaccattgataatagtgctcaacttcctacttactggtgcaatcgtctttaa

SEQ ID NO: 47305 - DNA, 290 bp, Oryza sativa
  Clone ID: PAT_MRT4530_50087C.1
actcctccccctgctcccatctcctgaagcccccctcctccccgtgttttagtagtagtagcaatatttttagtagtagtaattatttataacgattgcttccccatccacgagcgctcacgcccatcggtcctcacttcgagccgtttgcgttctccagttcgattcggttgagctcgctccgatctatccctttcctgctttcgatcagaagcagtcggccttgatggaggcggagcttgctggttcttcgtgcaaagagaaaatcatttacttactttggaattaag

SEQ ID NO: 47306 - DNA, 169 bp, Oryza sativa
  Clone ID: PAT_MRT4530_50088C.1
gttgaggcaatgagatccataaggcattatatcatgaataccattacgactttaggagggcaataattaaccatacacttgacacatccattgtttcgaaacaatcaatgaccataagcaaagcgaccagcatggctgaaaagtcaaagaagcgcacgaacaacatgta

SEQ ID NO: 47307 - DNA, 350 bp, Oryza sativa
  Clone ID: PAT_MRT4530_50089C.1
aacttgatatgctgaagtgaaattggggatgtagggaacatgaaatgctggggatgatgccctaggatgcccgtgtgggtgatgtgaggatgtgatggtgcctgaatgcccaagtgactgagggttggagttgtgtgtgtgtgttgggaacgcgggagggaaagtgaatggtgagtgatgaatgatggtgttgtggcacttgttgccgtggtgaaaaaaaaagatggcgcctaagcaatgttggtgaccattgggtgtgaaagtgcatgcatgtggtggcttgatgggtggttgcttatgtgttgctatgatgctaatgttgcagtgttgctgtgatgaaaaaaaaaaaa

SEQ ID NO: 47308 - DNA, 207 bp, Oryza sativa
  Clone ID: PAT_MRT4530_5008C.1
atggccgccgaaaaccgcccacgccgccactttttccgcacctcctcacgccctctctcgcgtgtgccgggatgccgcccaccttccccaccactatccccactttccccgcaaaacccggctgccatttcctccacgttggtgccccacttcctaccagttgccaccccgatttcgtctctcccggactcgatcccgccattctaa

SEQ ID NO: 47309 - DNA, 522 bp, Oryza sativa
  unsure (1)..(522): unsure at all n locations
  Clone ID: PAT_MRT4530_50090C.1
ttgtttttttttttttttttttttttttttttttttttttttttttttttttttttttttttttttttttttttttttttttttttttttttttttttttttttttttttttttaagatttgcccatttttttttttttttttatctgtgggggggtttaaaataccttttttgttttttttttaaaaaaacccatatttatttataaggaatttacataaaatatcctaattaataaatacaattgcttttccataattttatttcttcattggattcatttttgaattcattaacttgaacccgatgtcgtgtacaagtcatattgncggaatcggctgtattgacttacttagcccaactcagacctagcccatcctaaccataacccatctgaactccggccaattactgctctgtttccaaactcgatttccgcttccgacctttctttgatccaatcnnntttaaaaanggngggcactctgtcnngcttagngacaaaggattttcacttgttgc

SEQ ID NO: 47310 - DNA, 223 bp, Oryza sativa
  Clone ID: PAT_MRT4530_50091C.1
ataaaaaggggagaagattttttttaaatttatttgaccctaagtttcaacaggcccacatgaagatgggtgactttttttttaacatacgaactttttttttggttcaatttaagacccgacacccccaacagggggaatgcttctgggagccctttattagttaggggaaataccccatattgatgggaaatttaagggcaacaaaatttgggctttttct

SEQ ID NO: 47311 - DNA, 148 bp, Oryza sativa
  Clone ID: PAT_MRT4530_50092C.1
atgcgttttgtgcagatgcagccatggagaggaggcaagtttgggcgatgcttttatggctgcaatgacggctcggcccatatgctcgattgctgcggcatgtggcccaggcgccgcggcccgtgcatgatcggggcacacccaaagc

SEQ ID NO: 47312 - DNA, 582 bp, Oryza sativa
  Clone ID: PAT_MRT4530_50093C.1
atggaggtggctgtggcccggcggaggcaagaggggcggcgggccggacctcgcctccgccagatccggcggcatagaggcacggctgcggtccgacgggtggcggcggacgtcggccggacctcgcctcctccagatccggcggcatggaggccgctgcggttcggcggggcgggagaggcggcggcggggcgggcggccgggcctcgcctccaccagatccggcggctgcggccgggcggcggcgggaggggcggcgggccgaacctcgcctccgccagatccggtggcatggaggcgtggctgacgtcagcacgggggaggaggcgcggcgctgacatgcgggacccaccggtcagcggctcgggagagggaggaaggggcgccggcacgcgggacccaccggtcagcgactcaagggggagggcggttcaccatggaccgggaccacgcgggtggtccaccgccggccggccaagcggccacggcgactgcgacggcgcgcgcgcgaacgcgttgccggcgacggccaccggcggcggaggcgacggcgcaaaggcgacgcgaaggcggcagcgctga

SEQ ID NO: 47313 - DNA, 333 bp, Oryza sativa
  Clone ID: PAT_MRT4530_50094C.1
atggcggagtcgcggcggcggtggtggggtggattttatacggaggccacgcctccccctcctacgtgctctcgctgtcgacttcgacccgtccgtccccacgctggtgcgtgccaaagtcaacttggcgagcacttgggtttttcggctttaccgagggcgtcgtcgtcgtctcttcgtcctcgcagctccgcgacactgacctttggaggacgaggtgtcgtcgcgtgcctgcgtccgtccgtgcgatctgggtggtgtgggtgtgggtgggtgggtatcctgctgcgctgtgtggcagaggcgcgccgcgtgtgcgcgggcctcgcctga

SEQ ID NO: 47314 - DNA, 654 bp, Oryza sativa
  Clone ID: PAT_MRT4530_50095C.1
atgccaccggatctggcggaggcgaggttcggcccgccgcccctcccgccgccgcccggccgcagccgccggatctggtggaggcgaggcccggccgcccgcctacacgcggtccgacccactacctccatgacagagagagagagagacgacgccgccgcctctcccgccccgccggaccgcagccgcctccatgccgccggatctggcagaggcgaggtccggccgacgtcagccgccaccgccgccgcacctccccaccatgaacagagagagagagagagagaaagagaccccgccgccgcctctcccgccccgccgaaccgcagcggcctccatgccgccggatctggaggaggcgaggtccggccgacgtccgccgccactgccaccgcacctccccaccatgaacacacacagagagagagagacgacgacgtcgcctctcctaccccgtcggaccgcagccgtgcctctatgccgccggatctggcggaggcgaggtccggcccgccgcccctcttgcctccgccgggccacagccacctccatgccgcccctcccgctgccgccgcagagagagagaggggggagaagtggagagagagtgggaggagaagtggtctgctcgccggagggaaacggccggccggc

SEQ ID NO: 47315 - DNA, 167 bp, Oryza sativa
  Clone ID: PAT_MRT4530_50096C.1
atcgccaagccattcgtaggagaagcgctgaaccgcctacgaaggggtaaacactacaacaaatattgcaatgccagcggctgacggaactactgattagtacacgaagctggtgggcaatgaattgtgaagtcttcgatctgaaggacctcgatgactagcactac

SEQ ID NO: 47316 - DNA, 429 bp, Oryza sativa
  Clone ID: PAT_MRT4530_50097C.1
atggcggccgccaccgccgccgccgccgccgagctggagcggcgggtgatggcggcggtgaaggcgtccgcggcgcgcggcgaccccccgctcctgcaggccgccgaggccgcgcgctgcgcccgggaggcctcctcctccatctccgtcgatggcggggccggggccgcgctcgccgcggcgctggtgtccaacctgtgcttcgcgcacaacacgggcgcgatgtggaaggtgctggaccaggccatggcgtcccgccttgtctccccgctcctcgccctcgcgctgctcaccccgagggtggtgcccaaccggcaggcgcagccggaggcatacaggctctacctcgagctgctcggccagtacacggtcgccccggtctgcacggagagcgtggagacgaaggccatggtagggctgatggtttga

SEQ ID NO: 47317 - DNA, 474 bp, Oryza sativa
  Clone ID: PAT_MRT4530_50098C.1
cggacgcgtgggaaaaaaaaaaaaaaaaaaaaaaaaaaaaaaaaaaaaaaaaaaaaaaaaaggaaagggtaaaaaaaaagaaaaaaaaaataaaaaaaaaaaaaaaaaataaagggggcggcctttttaggggtcccgactttccgtccccgggctgccgaggttttgttttttttttggggccccctaattctaatttctgggccggcgttttccttcgtttggcctggcaaacccctgccgttccccactttaacccctttgcgttccatccccctttctccggttggcgtttttccaaagaggcccccccctgctgcctttcccagctgttgccccctccttatgggcatttgggccccgccccctgtgcggggccccttatacgccgcggcgggttgtggtgtttcccccctttttttccccctttccctttgcctgcgctcttggccccgggtcccttgcctttttttt

SEQ ID NO: 47318 - DNA, 254 bp, Oryza sativa
  Clone ID: PAT_MRT4530_50099C.1
gcggggagtacgtgcaccacctcaccaccaacggtggcttcgtgtccttcggtacgtagcagtagcacatatcgcacgcggcatccgcgtccgctcgctcgcttgccccgcaccgcaccaaccacgcatattctccgtttcgcccccacgcggccacgccacggcaccgtgccgacgcgcgcgttttgtgtgcgcccgcaccgcgcgatcgcgagaggccggtctccgttccgcggtgacagtggccactaccg

SEQ ID NO: 47319 - DNA, 1827 bp, Oryza sativa
  Clone ID: PAT_MRT4530_5009C.1
atggcgggaggatccttcgacacagggtcgtttgaggttatagctacggcgttctcgtttccggtcattgatggaccagccgagattggtaccgtgaaccttgagcaccaagttcccgtacctggcgcgccactgtcgacaggggacacccgtagaccggatatagagggtattggggtccgttggtatgaggatctacgtagtacgacatcaagccctaatctagttggctccggctccgtaggctgtgggggatgtgttggcagtaatcttcgatgccttaggtcctttcccagggcgtcccttatatactgcgggtcagttgatatccaagtaggactcagagatatcggacccctcacgatatggtggttctatctccagatagagaactcggatcccgtccttgttgtccctgaggagcaaccggaaaaaattccagagtggaccaccaaacccaccctaactccctccctccaatcctttattgatatcatcgatgatctccgaagacgggggttgtcgggatacgaagtcgctgccgacttcgtaggtcggcggattcagccgctgcaggcccgcgcccatccagcctttgattattctgggccagaggacacgacccgggtctctcctgacttaccgagtttccgttctcgatttattggtctaaacagtgacatcgtggggcgccatgttggtcaaataatgatcagcgcactctcgggggcgctccctttgacggacgtcatcgggccccttgtggaccaccaggcagcagcatcgttgaaggagagcgtcaccaaggaggcatctgacgctgtcactgccaccacgagtggcagcaatgttccgaagaggggaaggaaattctcctctgtactcgggactcgccggaaggcgacaaactctgtgcctcatgaagaaaaagaaaatcttcgctggaaggcgcgggcaaaggtggtgcacggtgggactgatgctgtctctagcgcgtcccctacggcgacttcgacagaagtcgtggtcgctactaaggaccaggaggcgacaccgagtagccctgtcgtcggcctcatgcccacccggggcttgtccaccgatgccctcacctggggggagctccaagtggagatggagcgcatcctccaggccggcgctcgtggcataggtcacgagatcgaggaggccagggcggtggcgttgtcggcgaaccagcgtgccgaccagctggcacgcgatctggcggaggcccgcgaggacctcctaaagatgagggagctggtagccggcaacgagatgcagcgacgcgggctcgaggactggatgtcggagctcaagggccacatgatcaacatccgcggttcgctgcgaacgtcgttcaccagcctgcaccaactcgccagggagtgcggtgtcacgactaccatcccggcacaccccgatgagttctcgttgacgtcatcgctcacggaactggctacggcgatggaggagatcccctccaagcactcggccatgatcggcgaggagacgtccaacgcatgtgatcctgagtacttttctcgttgtagatatgctgttttcaaggatgtccagcagcgtgggcagcccgatgtgccggtggtcattccgctgctcacacttgagccacatacgccgctggtggagggcgataagagcccgtccgtggaaacaaacatggccatgacgtccttagattttgagaacatgttggctgatcgagatcgtcgaatccagtactggaagacgaaactcgacgtgaccaaactcgaaagggccatggtggaggtgaagaaggactag

SEQ ID NO: 47320 - DNA, 2082 bp, Oryza sativa
  Clone ID: PAT_MRT4530_500C.1
ctagcgatcagcggacatcttgcatagcttctgtttccttggcttggcgtccggcttgactgccaggtgatgcatgatgagatctgccgaaacacctcctacttcatcggggccccaggcgaagatatcaatgttctttttaagtacctctaggatgttcttagcttcttcttcgcccatgtcgccccctagtgatacgagttttgtggggtcggcatcatcaatctgcatcttgactatcttgccgtgaggtgcgggctttgacgcatgtttcgcccggtcatgcggttcggcctcaacattgcgtactgctctcttgattatggccaaaacgcattttgaagcaggcgaaagctgaagccccttgaccacgatcactcctttcgggccgggcatcttgagcttgagataattgtgatgggaaatggcttcgaacttgttcaaggttgcacggccgaagatggcgttatagctgtacgggatgtcgacaacgtcgaacaatacttgctcttcgcgtctattttcccccgagccgaaggctatcattaacttgaactgcttctccgccgaagccagaggatcttggtgcgggaacattactccttcggcgtcttctggcccaaaagagatttgctggttcagatattgcggagacccttcgcctgctgaagttatattgtggatcgttcgcagctgcatcttcttttgtcgcttcgacagttggattggcgggtcggcccttgtaatcacttggattactctgcgttgtgcatcttggcgttgttcggccgggggtgcttgttcttgagctacttcgcgaggtgcttcgactgctgctccctgctgtggccttgaatcttgctcgttaccacgttgccgaatgtttcggcattgctccgtggtgtgcgaagagcgtctgtggaaggcgcagtagaggtcttttcgggccttcttgcgggcaggctgctgatggttgcttgcttcctgagcgtcgaactccttgcggagggcttgcacttcttcgacagtcatcacagccttgcccgcacggtcggttctgaacttcctccaggtcataggggcttgaccttgccttgacggttgtccttgtatcgccggctggggctggcgaacagtgagaggaggtggttcggcaatttgaacttgcgcttgggcttgagcagcggcgacggaagccttatcatactcagcttgcatagcttgccgtcgcttggaatcctcctcgccccttacgaacccgtcaatgatgtgaagtaggtgttcaagtgtctgtagctccttgttggcgatttttcttgtgagttcgctctcgagcagactagccgaagcggcgtttatgacagacgcctcggttatgtcttgaacttggcatcgagcttgcgagaagcgacgcatgtactcccttatcgactcccccagcctctggcgaatgccgagcagatgttgctgcatcttcggctcctcatatgtacatcgaaagttaaggacaaagacatcgcgcaattgctcccatgagtaaatgctattggctggttgatttgaaggcaaccaactaggcgcatcttgacttgtattcccctccgggagggccgaaggggctgtacttgaaatgttgtggggttggctgagctgctgaaggaaagcttggagctgcgccttggaccgccttgccgcctcgtacgcttgttgctgtccttgcatttggcgaagcatgtcttggagtcgtgtcatgttctgtcgtatgccttccatgtcggcttcggtttgtgtctcggggtcagggttgacttggacttgcacagcagcgagcgtagttggggccgctgctggctgtgacggagtggcttggggcaccagcagttggcttgtcgaaaggatctccgccctggtctggagtgccctcgccgccgcagctgccttcgccatgtcagctgcgttcggcacctgcacagaggtagcaagggctgaaggcggtagtgatggcgcaggtgcggaagcagatggcgctcctccatcttcagcgacaggcgccgaaggctctgctccctcttcggtggccat

SEQ ID NO: 47321 - DNA, 354 bp, Oryza sativa
  Clone ID: PAT_MRT4530_50100C.1
ataggaacatcataattttattaaataacagggggaatttactaactggagcccatcaattctatcattttttttctgcgcctctacccacaatggatcgattattacacttccattgtgcaatacttataatcaaacctccctgaatagagcaacatgtctatattgtacagcagtatatacatgaatgatgaatcaattcaactgacatttcatgactaaaactaggaaaaaaacatgaatgaaagaaagaactatcctgaccacgtttatttatcatctatgagaatcaatgtatatacataaatgagcattacgtgtttaaattgacgagctggaataagttactggggg

SEQ ID NO: 47322 - DNA, 510 bp, Oryza sativa
  Clone ID: PAT_MRT4530_50101C.1
cgtagcttggtcctatgagcggacgggccgccctttttttttttaatttgactttaaatgcccagcctgccttgttaatggagacgaggctagggtaaacatagcacaaacaccagctacgtagatatatgcatataattgaagaccactgaaggacatcaactaatatatgagtagttagggttgaggagcagagcacattgacggaaacccctgtgacttaaacatctagacctatagggctacacaagaattttatctatcaacaaaagctttgtagcataccaccaatgttgtgttgacaagattcactggctgaaacccaatatgaatccgtaaagaagaccaccaggctcgaagcatgtgcatttattaagggcagggtgcggcattgttagctgcaggcagatcttaccacatttatgtggacaaagaatgtgtacagtataccgacaaagcatagagattctaggttgcatcgttgtcacaacaccatcaaaaaaagccctt

SEQ ID NO: 47323 - DNA, 1886 bp, Oryza sativa
  Clone ID: PAT_MRT4530_50102C.1
atgacggccggcgcatggccggccgccgccgccgccgccacctccgcgccactgtccgccgcggtgcgcggggccatgcgcacgctcggccacctccttccccgcccccaaccctccgccgccgccgccgccgccttctcctcctctccccacaccctccacgactacaaccgcctcctggatgccttcgcccgcgacggcgacggcgacgcggcgctgcgggtgctccgccgcatgcgccactcctccccggcgtgcgcgcccacggccgcctcctacacctccgccatgtcggcgctcgccaaggccggccgccccgccgacgccgcggccctcttcgacgacatgctcgccaatggcgtcgcccccgaccggtgcgccttctccttcctcctccaggtctactcctcccacctccacctcccgtcggccgcgcactccgtcctcgtctggatgtcccgcttcggccttcccccgactcccatcgactacgcggacctcgtcttctccttctgccgcgcgggccgcctcccggacgcgctccagctgctcgacgaaatgcgcgccctcaattacccgctcaccctgcacagctacacaccgatcctccaggtgtactgtgccaatgctgatatgcagtcggctgatgcgctcatcagctccatgcgctccactggatgccaccccgatgtcgtattttacaacatctacgtaaatgggttatgtaaggttggggattttgatgctgtccagaggaccattgatgagagtggccggaatgggtgggtgccagatgcagttacatacagcacctacattgctgggctttgccggttcgggtatgtcgaagaggcactccggcagctggaaatcatggtaacgatggggttacagccgacagtagttggtctgaacatactgctcgactatgttgcccaggaccttgatatgtgggcaggcaaggaggtgctggaacgatgccaggagcttggctttgtggtagatgtcgtgacatacaatacggtcatggatcatttctgcaagaagaggaaatggctgcgtgttctaaaactgttcacagatcttctcaagaagcccataacacccaatgtgcaaacctggaaagtttcagtttgccaagtttgtgttcagcagcaaggggttcatggcagacactgtgacttgtacattctaattcatgcattctatgaggccgggaaggaggatgagcttggttttctgttcgctgatgtgaatgcgggtaaaattgccccagatacgatcacatacaatacgctggttgattgcctctttaggtcagggaggagagccgaggctgtcaatttgatcagacatattgatgatggctatcctgttgagcctgttgcacgcttggcgtattggttggttaggagtggaaatgttcgtgaggcattgaggttgtttgatgatatgctagaaaaaggattgttattagatagtaggatttttgctaatgtcatcaaggcattctgcagaaagggtccaggggaatgcacagaaatgctgcagctgtgttctgtattagataggatgcttggaattgggtgatccttctgtttaatgtgtttataacttggaagtgcttgattggagttaaggaaaaaaaagggacaacttgagagtgctcataggtctgccaattctttttcactactttacatggtagtggcattgtttttggacatgtactatcagtgaatagcccatgaaggtaaaattcctgttgcttttgtcatgcaaattttcattaatatactctgctgatataatctatcagccaacacttgtaaaaaaaaaaaaaaaaaaaaaaaaaaaaaaaaaaaaactcgagactagttctctcc

SEQ ID NO: 47324 - DNA, 2718 bp, Oryza sativa
  Clone ID: PAT_MRT4530_50103C.1
atggagaactcctctataatgttagtttgcaacccggcaaccaaggagatcgccgagctgccggccttcggatgcgaggttttgtccctcggctcgccggcgtggaggccgctcgccgaccctccctacctcgccctgaacaaagcgtcaccgtgcatcctcggtggcatctactggatcgtggccctaccgtcgccgcccaccggcagctgcaccacccctggaatgctacgcttcgacgtgtgcagcgaggagtttaccagtttcctgagcccaccgttcatggggcggcaggttatacgtgacgttagtggggccctgacggagcttgccggaaagctgtgctacatgcacgctcccaccgacggtaaagttgagctctggacaacttccgccgccgccgacgacgacgaaggcggcggcgggccgcggtggtcgctgcattgcaccgtcgtgctaccgcacccctttcaaaccatcttcccgtttacccacgattaccaaggaagcgtatttttcaacgtggattgcgccgtgatttaccggtacgatgtggaacgcggagttgtggaacgcgtggtggacatgctcgaggagatgacctacttcaactgttcaacgcacaagttgtaccgccgtccaggggactggaagctccgtaccattcagtacagtgagagcctggtggcagtgaacgccagttacagtattcccacggctttggtgagggtcaccatgtcgatcagctccgtgaccttgcccgtttccttggcttctcgtgtcccgagtacgcggggtactctgtggaccgtgttcctccttgctccaccgcctctcagggtccgccttccggatggtcccttccttccctttggccacacagacactaagtacccttgtccctactacgagtcgcaccccgtgctgacccgcatgattgagctttctgaggctcaagccactcagcacgacctgctccttgaggcctaccgctccctggctcgccgctacgccgctttggaggctcgccttgttgaggagggtgtctcctccgtggacactatctcttgggattccgatcgtctctgccatgccagccacctgtccttccacagttcccgtggttctactcgcactcccagcggcccgcgctcccccagcttgcgtgtgccatactcgccagctcaccgacgaggggagagcggagggaggagaggagctcgtcgcgatggttacggctcggggctctcggtgccaaggcggccgcaatttgatggatttgtccccttcgttgacagccacggcgaccaggccagcgtcgtgttcgacgactacgtcagcagagggatgccaaatgccatgctcgattgtgttgcgtgcttccctgtgacatcaaaagcaacaaggtcagcaagcgaaagactcccgagcatttcaacgaacacctcatgcgcgagtagaacggagcggcagaagcggcgaactcgtcctgtcgcggcgacggtgaacggcagtagtagaggccccaacagcggcagcggccacagatcgacgcccacatgcgttctgcgacgtgccgacctcgcaaggctgcggcgccgctcggggttcggtgtgtccaattcggaacccggaacccaccgtgacggcgaaccacccgacgggttcgtaacatcttggtatcagagcacgatcctggagcggccgacattcaagacgcgtttgcaaggtcaagtggacgccatggagaagcagcatgaaggcttcgggaagatgctgtccagtattcaggaggcgatcggcgccatgtcggtgaagcaaggcgaggtgcaggagacgatgaacaaaatggagaaatccatttcaagttggcgacctcaggttgatgctgcggtgcagagcttgcagcgcgacatggagttgctgagaaatcaagtcggcgttggaggagcgggaggaaattgctcgtcgcacatctcagttgccgacgtcgccaaccacgtctctgccagtatcgcaggcgttggaggagcgggaggaaattgctcgtcgcgcacctctgttgccgacgccgccaaccgcgtctatgccagcctcgactggcgaaattggtctggatggccaccgcatttcaactcagttccgggggagggcatcgggggtagtcactactctcgtcccacctccgggcaagggaagtttgataggaatagacaccttcagcttgttcgtcagattgatcaactcaagcagtcagggtcggtgaatgagtattatgagcgttttgatgatttgtggagtcagttgttagtttatgatccaaccttgagcactgaggaattgggagaggctggtggatctttggtgtccaaggatgggaagaaattgggtgatcacgctgctcgaattaaaagtgcttaccctttacctttaccaccacccaaatttgtgcatgctggcaagggagatgataaaagaacagctgaagttcctaaagtggccaattcttctgataaattggttgctctcaaggcctatcgacgagctcaaggtctttgctatgtttgtgctgaaaaatggtctcctactcacaagtgttcaggatcagtacagttacatgctgttcaagaactcttcagtgttttggcagctgatgtttctgaggctgttgcacaatcaaggagctgtggagtccttggttcagctcactgccagtga

SEQ ID NO: 47325 - DNA, 3702 bp, Oryza sativa
  unsure (1)..(3702): unsure at all n locations
  Clone ID: PAT_MRT4530_50104C.1
atggagaagcagcacgaaggcttcgggaagatgctgtccagtattcaagaggcgatcggcgccttgtcggtgaagcaaggcgaggtgcaggagacgatgaacaaaatggagaaatccatttcaagttggcgacctcaagttgatgctgcggtgcagagcttgcagcgtgacatggagttgctgagaaatcaagtcggtgcggtggagcgacatcaagcggaagctgacaaatcgtcgaacacctcgcaggcgttggaggagcgggaggaaattgctcgtcgcacatctctgctgccgacgccgccaaccacgtctctgccagtatcgcaggcgttggaggagcgggaggaaattgctcgtcacgcacctctgttgccgacgccgccaaccgcgtctatgccagcctcgactggcgaaattggtctggatggccaccgcatttcaactcagttccgggggagggcaccgggggtagtcactactctcgtcccacctccgggcaagggtacgcactctctaccgtttcctcctcgtgttcattcaaatttttcggagtttgttggtcgcgaggagagtgggggatcagaggggcgtgggtacaatcacagattgccgaaattggattttccccaatttgatgacagtgatcctcagaattggcgtttaagatgtgaacattattttggggtttatggcactcatccagatttgtgggttagagtagctaccatttatttcattggtcgagctgcatcttggttacgttcttcgcgagctcatttgctttgtgggagttggggagttttttgtgatacggtggataggaagtttgataggaatagacaccttcagcttgttcgtcagattgatcagctcaagcagtcagggtcggtgaatgagtactatgagcgttttgatgatttgtggagtcagttgttggtttatgatccaaccttgagcactgtgagttgtgtccatagattcacggagggattacgcagtgatattaaaaatgcagtgttaatgcattttccccaagatttggagactgctttggctcttgctatcttacaggaggaattgggagaggctggtggatctttggtgtccaaggatgggaagaaattgggtgatcacgctgctcgaattaaaggcgcttaccctttacctttaccaccacccaaatttgtgcatgctggcaagggagatgataaaagagcagctgaagttcctaaagtggccagttcttctgacaaattggttgctctcaaggcctatcgacgagctcaaggtctttgttatgtttgtgctgaaaagtggtctcctactcacaagtgttcaggaccagtacagttacatgctgttcaagaacttttcagtgttttggcagctgatgtttctcatgcacaactagtcaacattcgcccatatcgttatacncctgatcagaagaatgaaattgaaaaacaagttcagnaaatgttgaaaaaagctcaattgcgtcagtctgtcttggtctttgttgatgatatcttagtttacagtcgttctttggaagagcataagaatcatctgagacaagtattaagcactttgacacatcaccaattgaaggttaaactctcaaaatgttcttttgctcaacaaagcttggcttatttgggtcacatcattagtgctcagggggtagctactgatgaggagaaaattattgctgtcaaggattggcccactcctctttctgtcaaagacttgcgtagttttttgggattaactggttactatcgcaagtttgtcagaaattatggtgttatttgtaaaccattaaccaatttgctacgaaaaggggtactgtttcaatggacttctgtcactcaggaggcttttgtagctctcaagactgctttgattgaagctccagtattggctttacctaattttcagcaaccctttgttgttgaaacggatgcatcggacaaagggattggagctgttcttatgcaaaatagtcatcccattgcctttctcagtaaagcacttggacctcgcactcaaggtctgaggtataaaatctgttataagaagggattggagaatggggctgctgatgcattatctcgccgacaatctgatggtttggaggaattgtctgccatttctatatgtttgccggactggctacaggagctaattgctggttatcagtctgactcggaggctcagaaattacttcaagctttatctgtgtcaggtgcaggtccatctaactttgaagtgctgaatggcattttgtattttaaacatagaatctggattggtcataacaaacttttgcaacaaaagattttggccaatttacatactgcagcagtggggggtcattcaggaattttggttacttatcaaagagttaagcagttgttctcttggccaggcctgcgcaaagatgttcaggagtttgtccaacattgtgatatttttcaaagagctaaatctggacatgttaaatacccagggttattgcagccattggaggtttacccagatcggcttcatttgactgtatactggttattgtggataaattctctaagtttgctcatttttttacccctgaaacacccctttactgcctttggagtggctcagcttttcatggaacatattcatagtatacatggtttacctcaagctattgtatctgaccgtgatcgagtgttcactagttctctttggaaggaattgtttcgccgagctggtactcaactccgaatgagttcttcgtatcacccacaatcggatggacaaacagagcgtgtgaatcaatgtgtggaaatgtttttgcgctgctttgttcattcttgtccttctcggtggaagcattggctggcattggctcaatattggtacaatacgtcatttcattcagccttgggtatgactccttttgaagtattatttgggcacaaacctcgttactttggattatccacttcatctgttgatgctcctggagatcttgcaagttggttaagtgagcgaaatgacatgaatactttgattcatcatcatttgttgcgagctcagcaacggatgaagagccaagctgattcgaagcgatctgagcgttgttttgcggttggtgattgggtgttcatgaaattacaaccatatattcaacaatcagttatgactcgatctaacaggaagttatccttcaaatattatggtccatttcaagtcttacaacgaattggattggtggcttacagattacagttgcctgctcacagcttaatacaccctgtcgtccatgtgtctcagctcaagaaggctctcgcaccatctgaagcagttcagccttctttgcctgtgttgaatcctgatgctggtcatttagcgattccaatcaaaattctggatcatcgttcgattcgtcgaggttccaagatgatcaagcaagttctaattcgttggtccggtgtgtcttcttctgctgacacctgggagagtttagatgaaatgcaagctaagtttccagctgcaccagcctggggacaggctgaaactcaaggagggaggaatgttacggcatcaatacagagcactacccataactctagtatcattgggcctagaagatccaaacgagaagtccacaccaacccaaagtatatgggctgtgattggtctaatagttga

SEQ ID NO: 47326 - DNA, 3798 bp, Oryza sativa
  Clone ID: PAT_MRT4530_50105C.1
atggagaagcagcacgaaggcttcgggaagatgctgtccagtattcaggaggcgatcggcgccttgtcggtgaagcaaggcgaggtgcaggagacgatgaacaaaatggagaaatccatttcaagttggcgacctcaagttgatgctgcggtgcagagcttgcagcgtgacatggagttgctgagaaatcaagtcggcgttggaggagcgggaggaaattgctcgtcgcacatctctgctgccgacgccgccaaccacgtctctgccagtatcgcaggcgttggaggagcgggaggaaattgctcgtcacgcacctctgttgccgacgccgccaaccgcgtctatgccagcctcgactggcgaaattggtctggatggccaccgcatttcaactcagttccgggggagggcaccgggggtagtcactactctcgtcccacctccgggcagggtacgcactctctaccgtttcctcctcgtgttcattcaaatttttcggagtttgttggtcgcgaggagagtgggggatcagaggggcgtgggtacaatcacagattgccgaaattggattttccccaatttgatggcagtgatcctcagaattggcgtttaagatgtgaacattattttggggtttatggcactcatccagatttgtgggttagagtagctaccatttatttcattggtcgagctgcatcttggttacgttcttcgcgagctcatttgctttgtgggagttggggagttttttgtgatatggtggataggaagtttgataggaatagacaccttcagcttgttcgtcagattgatcagctcaagcagtcagggtcggtgaatgagtactatgagcgttttgatgatttgtggagtcagttgttggtttatgatccaaccttgagcactatgagttgtgtccatagattcacggagggattacgcagtgatattaaaaatgcagtgttaatgcattttccccaagatttggagactgctttggctcttgctatcttacaggaggaattgggagaggctggtggatctttggtgtccaaggatgggaagaaattgggtgatcacgttgctcgaattaaaggcgcttaccctttacctttaccaccacccaaatttgtgcatgctggcaagggagatgataaaagagcagctgaagttcctaaatgttcaggaccagtacagttacatgctgttcaagaacttttcagtgttttggcagctgatgtttctgatggtgaacaggatgctgattctacctctagtctgatggctatttctttacaggccattcaaggcacggtttctgcacatactttgcgattacaagggtccattcaaggctttgatgtgttaattttggtggattcaggcagctcttgcagttttcttagttcagtggttttacctcatctcactggtgtgaaatctttacttactccaattcaagtaaaggtagccaatggtactgttctttattgtacctctgagttgccggctgcaaaatgggaggttcaagggcatcagttctctactaatttcaaactgcttcctttggacaattatgatatgatcttgggtatggactggctagagaaatatagtccaatggatatcaattggcaggccaaaacaattcagttttgtcttcatgataagtcagtggaacttaaaggagtggtacctgaattggataaatgtgatctggtctctattcaccagttacagttgttgcacaatcaaggagctgtggagtcattggttcagctcactgccagtgacggctctagttcttctcaaaatgttccaagttcaattcagtccattttggatgaatttgctgacatttttactgaaccagaagggttgccaccttctcgatcttatgatcacactatccctttgattgctggagcacaactagtcaacattcgcccatatcgttatacacctgatcagaagaatgaaattgaaaaacaagttcaggaaatgttgaaaaaaggtatcattcgtcctagttccagtcctttttcttctcctgtgttgttggtcaagaaaaaagatggcacatggcgtttttgtgtggattaccgacatctcaatgccataaccatcaagaataaataccctttacctgttattgatgaattattggacgaattggcgggtgcttgttggttttctaagttagatttgcgctcgggatatcatcaaatccgcatggctcctcaggatgaacataagactgcatttaagacccacaatggccatttcgagttcagagttcttccttttggtcttaccagtgctccagccacttttcagggtgttatgaattctgttttggcagctcaattgcgtcagtctgtcttggtctttgttgatgatatcttagtttacagtcgttctttggaagagcataagaatcatctgagacaagtattaagcactttgacacatcaccaattgaaggttaaactctcaaaatgttcttttgctcaacaaagcttggcttatttgggtcacatcattagtgctcagggggtagctactgatgaggagaaaattattgctgtcaaggattggcccactcctctttctgtcaaagacttgcgtagttttttgggattaactggttactatcgcaagtttgtcagaaattatggtgttatttgtaaaccattaaccaatttgctacgaaaaggggtactgtttcaatggacttctgtcactcaggaggcttttgtagctctcaagactgctttgattgaagctccagtattggctttacctaattttcagcaaccctttgttgttgaaacggatgcatcggacaaagggattggagctgttcttatgcaaaatagtcatcccattgcctttctcagtaaagcacttggacctcgcactcaaggtttgtctacctatgaaaaggagagtcttgcaatcatgttagcaattgaccattggcgttcttatttgcaacatgacgagtttgtgattagaacggatcatcgcagtctgtcttttctaataaatcagagattgtcgaccccttggcaacaaaaagctttgactaaacttttaggtctgaggtataaaatctgttataagaagggattggagaatggggctgctgatgcattatctcgccgacaatctgatggtttggaggaattgtctgccatttctatatgtttgtcggactggctacaggagctaattgctggttatcagtctgactcggaggctcagaaattacttcaagctttatctgtgtcaggtgcaggtccatctaactttgaagtgctgaatggcattttgtattttaaacatagaatctggattggtcataacaaacttttgcaacaaaagattttggccaatttacatactacagcagtggggggtcattcaggaattttggttacttatcaaagagttaagcagttgttctcttggccaggcctgcgcaaagatgttcaggagtttgtccaacattgtgatatttgtcaaagagctaaatctgaacatgttaaatacccagggttattgcagccattggaggtaccttctcaatcatggcaagtaattactatggattttatcgaaggtttacccagatcagcttcatttgactgtatactggttattgtggataaattctctaagtttgctcttttttttacccctgaaacacccctttactgcctttggagtggctcagcttttcatggaacatattcacagtatacatggtttacctcaagctattgtatctga

SEQ ID NO: 47327 - DNA, 4902 bp, Oryza sativa
  Clone ID: PAT_MRT4530_50106C.1
atggagaagcagcacgaaggcttcgggaagatgctgtccagtattcaagaggcgatcggcgccttgtcggtgaagcaaggcgaggtgcaggagacgatgaacaaaatggagaaatccatttcaagttggcgacctcaagttgatgctgcggtgcagagcttgcagcgtgacatggagttgctgagaaatcaagtcggtgcggtggagcgacatcaagcggaagctgacaaatcgtcgaacacctcgcaggcgttggaggagcgggaggaaattgctcgtcgcacatctctgctgccgacgccgccaaccacgtctctgccagtatcgcaggcgttggaggagcgggaggaaattgctcgtcacgcacctctgttgccgacgccgccaaccgcgtctatgccagcctcgactggcgaaattggtctggatggccaccgcatttcaactcagttccgggggagggcaccgggggtagtcactactctcgtcccacctccgggcaagggtacgcactctctaccgtttcctcctcgtgttcattcaaatttttcggagtttgttggtcgcgaggagagtgggggatcagaggggcgtgggtacaatcacagattgccgaaattggattttccccaatttgatgacagtgatcctcagaattggcgtttaagatgtgaacattattttggggtttatggcactcatccagatttgtgggttagagtagctaccatttatttcattggtcgagctgcatcttggttacgttcttcgcgagctcatttgctttgtgggagttggggagttttttgtgatacggtggataggaagtttgataggaatagacaccttcagcttgttcgtcagattgatcagctcaagcagtcagggtcggtgaatgagtactatgagcgttttgatgatttgtggagtcagttgttggtttatgatccaaccttgagcactgtgagttgtgtccatagattcacggagggattacgcagtgatattaaaaatgcagtgttaatgcattttccccaagatttggagactgctttggctcttgctatcttacaggaggaattgggagaggctggtggatctttggtgtccaaggatgggaagaaattgggtgatcacgctgctcgaattaaaggcgcttaccctttacctttaccaccacccaaatttgtgcatgctggcaagggagatgataaaagagcagctgaagttcctaaagtggccagttcttctgacaaattggttgctctcaaggcctatcgacgagctcaaggtctttgttatgtttgtgctgaaaagtggtctcctactcacaagtgttcaggaccagtacagttacatgctgttcaagaacttttcagtgttttggcagctgatgtttctgatggtgaacaggatgctgattctacctctagtctgatggctatttctttacaggccattcaaggcacggtttctgcacatactttgcgattacaagggtccattcaaggctttgatgtgttaattttggtggattcaggcagctcttgcagttttcttagttcagtggttttacctcatctcactggtgtgaaatctttacttactccaattcaagtaaaggtagccaatggtactgttctttattgtacctctgagttgccggctgcaaaatgggaggttcaagggcatcagttctctactaatttcaaactgcttcctttggacaattatgatatgatcttgggtatggactggctagagaaatatagtccaatggatatcaattggcaggccaaaacaattcagttttgtcttcatgataagtcagtggaacttaaaggagtggtacctgaattggataaatgtgatctggtctctattcaccagttacagttgttgcacaatcaaggagctgtggagtcattggttcagctcactgccagtgacggctctagttcttctcaaaatgttccaagttcaattcagtccattttggatgaatttgctgacatttttactgaaccagaagggttgccagcttgtcgatcttatgatcacactatccctttgattgctggagcacaactagtcaacattcgcccatatcgttatacacctgatcagaagaatgaaattgaaaaacaagttcaggaaatgttgaaaaaaggtatcattcgtcctagttccagtcctttttcttctcctgtgttgttggtcaagaaaaaagatggcacatggcgtttttgtgtggattaccgacatctcaatgccataaccatcaagaataaataccctttacctgttattgatgaattattggacgaattggcgggtgcttgttggttttctaagttagatttgcgctcgggatatcatcaaatccgcatggctcctcaggatgaacataagactgcatttaagacccacaatggccatttcgagttcagagttcttccttttggtcttaccagtgctccagccacttttcagggtgttatgaattctgttttggcagctcaattgcgtcagtctgtcttggtctttgttgatgatatcttagtttacagtcgttctttggaagagcataagaatcatctgagacaagtattaagcactttgacacatcaccaattgaaggttaaactctcaaaatgttcttttgctcaacaaagcttggcttatttgggtcacatcattagtgctcagggggtagctactgatgaggagaaaattattgctgtcaaggattggcccactcctctttctgtcaaagacttgcgtagttttttgggattaactggttactatcgcaagtttgtcagaaattatggtgttatttgtaaaccattaaccaatttgctacgaaaaggggtactgtttcaatggacttctgtcactcaggaggcttttgtagctctcaagactgctttgattgaagctccagtattggctttacctaattttcagcaaccctttgttgttgaaacggatgcatcggacaaagggattggagctgttcttatgcaaaatagtcatcccattgcctttctcagtaaagcacttggacctcgcactcaaggtttgtctacctatgaaaaggagagtcttgcaatcatgttagcaattgaccattggcgttcttatttgcaacatgacgagtttgtgattagaacggatcatcgcagtctgtcttttctaataaatcagagattgtcgaccccttggcaacaaaaagctttgactaaacttttaggtctgaggtataaaatctgttataagaagggattggagaatggggctgctgatgcattatctcgccgacaatctgatggtttggaggaattgtctgccatttctatatgtttgccggactggctacaggagctaattgctggttatcagtctgactcggaggctcagaaattacttcaagctttatctgtgtcaggtgcaggtccatctaactttgaagtgctgaatggcattttgtattttaaacatagaatctggattggtcataacaaacttttgcaacaaaagattttggccaatttacatactgcagcagtggggggtcattcaggaattttggttacttatcaaagagttaagcagttgttctcttggccaggcctgcgcaaagatgttcaggagtttgtccaacattgtgatatttttcaaagagctaaatctggacatgttaaatacccagggttattgcagccattggaggtttacccagatcggcttcatttgactgtatactggttattgtggataaattctctaagtttgctcatttttttacccctgaaacacccctttactgcctttggagtggctcagcttttcatggaacatattcatagtatacatggtttacctcaagctattgtatctgaccgtgatcgagtgttcactagttctctttggaaggaattgtttcgccgagctggtactcaactccgaatgagttcttcgtatcacccacaatcggatggacaaacagagcgtgtgaatcaatgtgtggaaatgtttttgcgctgctttgttcattcttgtccttctcggtggaagcattggctggcattggctcaatattggtacaatacgtcatttcattcagccttgggtatgactccttttgaagtattatttgggcacaaacctcgttactttggattatccacttcatctgttgatgctcctggagatcttgcaagttggttaagtgagcgaaatgacatgaatactttgattcatcatcatttgttgcgagctcagcaacggatgaagagccaagctgattcgaagcgatctgagcgttgttttgcggttggtgattgggtgttcatgaaattacaaccatatattcaacaatcagttatgactcgatctaacaggaagttatccttcaaatattatggtccatttcaagtcttacaacgaattggattggtggcttacagattacagttgcctgctcacagcttaatacaccctgtcgtccatgtgtctcagctcaagaaggctctcgcaccatctgaagcagttcagccttctttgcctgtgttgaatcctgatgctggtcatttagcgattccaatcaaaattctggatcatcgttcgattcgtcgaggttccaagatgatcaagcaagttctaattcgttggtccggtgtgtcttcttctgctgacacctgggagagtttagatgaaatgcaagctaagtttccagctgcaccagcctggggacaggctgaaactcaaggagggaggaatgttacggcatcaatacagagcactacccataactctagtatcattgggcctagaagatccaaacgagaagtccacaccaacccaaagtatatgggctgtgattggtctaatagttga

SEQ ID NO: 47328 - DNA, 437 bp, Oryza sativa
  Clone ID: PAT_MRT4530_50107C.1
gaatcgttttacatagtaaagatcgattaagcgtgctctgtagcactctcgattacagtcaccacttatacaaagaatttctaataatcttacagtatgcatacaactactacaagttctagggtggagaacagacccaaacaagggagaagctgctatatcacaagcaacctagaggcattgtcctctgcaggtattatgcgtgcgaattcctcagggttaatgggaggtacagggttaacgcagaggatttgccaagaatagaacttcgaacaagctttgacgatacaggcatcacaaatgtccagcgcgatctgtgccacttcatccaccgtgagtgctgtcatgtgcgaggagaattcttcaacccagagggtgcccgagctacaagtgacgaattcaagcaacttcaggagtggaacactgctatgccataa

SEQ ID NO: 47329 - DNA, 499 bp, Oryza sativa
  Clone ID: PAT_MRT4530_50108C.1
atgaagctctcatgatcaacgcttacagtttaactagatgaatagaagctattgtcacagcacatagcaatttataggttgaagcaaaccatatatgatcctctgacattgaagaagccataaataacaaacaacaaccggaaacagactccgtgttgcctcagccggtttgtttcaagacttggcgagcgggggatgcccttctttaagctactgaagaaaacagatgatttccagtggggacccgaagcacagaaggcctttgaagatttcaagaaactcctcaccgagccaccagtcttagcttcaccacatccgcaggaaccccgtgttgcctgtatgtatcaaccacctcccagttgtgagcacgggcttgggtcgttgaacgccaggagaaggccatgttcataaagtccagcgaacgatttactttgttaacgaagtcctaccgactcaaaaccagtcccctcaggttcaaagctggtaattgggatcctac

SEQ ID NO: 47330 - DNA, 672 bp, Oryza sativa
  Clone ID: PAT_MRT4530_50109C.1
atggtggcctcgggctgctcggcgctgtatgatcgtgtcgcgaagatcgacggggcgacgacgaggtggcgaacgaggtcattccactcggcgctccctatgatgctcgggaggcgagtggacagatcgctcatcgtgacccctgctcctgcgattagatcctgcgccggtgatgctaaggcttggctggtggtagtcatgagatcgaagatgggggactcggctaccagtcggcgtgcggacgcttccggagttaactgggaccgaagcagcgatcatggtcttggtctggttcaagatgttgaccacatgatcagattgattaagctcattctccttgaggagggtgtcgaggagggtgatcgcggcaacagcgttctgttgtggggtgcggaaaaccggtgttccctcaacatcttgctggccaataagatctcgcgctcggcgccctgcatccaaggctcgttgccgtcggtcttcagcctcagcggcccgctcgcgctcctgttgctcacgccgcagccgttcttgttcctgtgcttgacgctcctcccccagtcggcgtcgttcggcttcacgtcgcgcttcggcttctcgggcttggcgttgctcctccgtctcgttatcggccaaaaagacgccgaaatagagaggggtgtagttatcttctag

SEQ ID NO: 47331 - DNA, 600 bp, Oryza sativa
  Clone ID: PAT_MRT4530_5010C.1
atggctctcgcggtcggaatagtgctcgctccgtgttcctctctatccgccgtcgccgccaagatcagttccgcagcagccgccgctcaggacctcctcccgactcggcgacacctccgtccgcttcgccgtgttgccgccgaccccgtccgccgctccgcttcgtccgccgactgccggagcaccgtcgccctcgtcatcccgacccgcgccgccgccttcctccgctccggccgccgttctcgtcgtcgtcgttgtcccggggtgagccgagtaccgccgttcgccttcccccttccctcctctctctcgggcgccgctccgccgcgccggtggtcgccggcggtgaccatcggggcgcgggcgcgccactcccgtcggccgcgccggcgaggccgccctcgggcgcgccctcgcggctgccaagtgggcccggccgtcagccgcccgcgcccgcgggtgcggctgacgcgcgggacccacggcgccgaccgccgccagccgcgtgcgcccggtccaccgtggaccgtggggctgacgcgtgggccccacttcccgtggacccggtccgcgcgcccgctccctcggctgacgcaataa

SEQ ID NO: 47332 - DNA, 482 bp, Oryza sativa
  Clone ID: PAT_MRT4530_50110C.1
gagagagaactagtctcgagttttttttttttttttttttgaacaaatacaccaattggggttgttacaattaggtacgccacaaccaaccgaccaaccaaaccaagcaaccatcccaacctcttctttttttttttttgcacaccaaatgttaaattagatatccatcaccgttgctttgccgcacccacaccatcatcgatcagattaaacaaaacaaaaaaaaaagaagccgagaaaaagaaacggaaacaaaccatgcagcagcagttcaatcgatcagtctcatcaaagaagctctcctagaagaaaaaaatcactcctaatgacggcaacggggaggacgagtccaagaatgtcgtagtaggctatgtccatccatcagggggttttgttttgtttgttagaccagcgcgatgctgctcttgccgccggggggggcttgcggatcccaccaaggtagtcccgcgacggcgctttgc

SEQ ID NO: 47333 - DNA, 5204 bp, Oryza sativa
  Clone ID: PAT_MRT4530_50111C.1
atggcgtcagaacccaaaaagcaacctgagctcgttgatggtcctggaggagatatacaggtagtgcaagaccccgtatggcaacaagaggacattgaagaagcctttgcacttgcagagcacgaacaagccaatgcagagcaagcccatgtacttgcagaacagcacaacccagttgtagagcaacaagatgatgcacttgcaaaacaaaacaacaacccagtagtagagcaacaaggtgacgcacttgcagaacaaaacaacaacccagtcgtggagcaacaagaacaaaacaacaacccagtcgtagagcaacaagatgatgatcaggcaagactgagtctggagactttgatcggagagaatcgttgggaggaagcactacggcggttggagcgcatggtccgtgatggcgaagctaacaatggcccagtgcctaccgcgccctcccacgacatttacagggcacaccccgagcttgtcctgctgctgaggggagaagagtaccttaggatcaagaggttacccaatgctgctgctgatgcaacgtgcttctaccatgaacacatccagaacctgtaccgttcaggagcaactggaagctcctttgttgacactggtgttctcaaggatatccaggattgggagaacggaagcagggccaccccatcgggacatcaaagtgaaatccatatgcaggaaacccgccaggctgtcaatgactacttaaagctctactttcctgcctacagtgcaatgggttccgtctccggcatcgacgacctcgtcttcccacccgggcagacgtttcggttcggcagcctcgacttcgtcaccaacaacttcggcaagatctctctccttgactcggtgtcagaccagtcgggagagaaccggatttcagccccgtttggactcccgaacgcggctgaaagttacttcaagaccatctcaatcgagttgacttcaaaccactcggctgagatcgcatcttctccaacgtcaccagatcaagatgatggggcttacccaccgatcctaatgaagctccccgacgatttggcggccgtctccatcacaacagcgtctccatcccgtagggctaggcggaagtcggcttcaacaccgacttcgcctagcttcagggaagtcggcgtcatcctccaaccactcggcacggtttcgacggatcagctggatggctactacagctctcccaccgtcgactcgcgccccaccgacatcgtggagtacgacgagtttagctctcgctacaacgacccggatctcgacgacttcgacggaagcctagatgacaactacacccctctctacttcggcgtcttcatggctgataacgagacggaggaacaacgccaagcccgggagaccgaagcacgtcgcgagactgaacgtcgccgactggaggaggagcatcaagcacaagaacaagaacggctacggcgtgagcagcaggagcgtgaacggaccgcgaaggaggctgaggatcgacggcaacgagctttggaagcagggcgccgagcgcgtgatctcatcggccaacaagatgttgaagggacaccggttttccgcacccctcaacagaatgcggttgccgcgatcaccctcctcgacaccctcctcaaggaaaacgagctcaatcaatctgatcacgtcgtcaacatcttgaaccagacgaagaccatgattgcggcttcggtcccagttaactccgaaagcgtccacacgccgactggcagccgagtcccccacttccgatctcatgactaccgtcatccaagcctcagcatcaccggcgcaggatccaatcgcaggagcaggggtcacgacgagcggtccgttcactcacctcccgaccatcatagggagcgccgagtggaacggcctcgctcaccacctcgtcgccgccccgtcgatcttcgcgacacaatcatacaacgccgagcagctcgaggccatcatcattcgccggaccgccacgatgacgacctcgacggagtagcagccttcaccgacgacctgcgtcgagtggattggccagctggcttcaagccgactggaatagagaagtatgacggtaccactaacccagaatcgtggcttaccgtctacggtctcgcaatccgcgcagcaggaggagacaacaaggccatggcgaactatttaccagtggctttagcggattccgcccgatcttggctccatggattgccccgaggcacattcgagcgtcccggcacacaatacgacctctacaacgttattcagaagtccggagaatcccttcgagattacatccgacgattttccgaacaacgtaacaagatctccgacatcaccgacgacgttatcatcgccgcattcaccaaagggatccgccacgaagaattggtcggcaagttcgggcgtaagcctcccaagacagtcaagcttatgttcgaaaaagccaacgagtacgccaaggccgaagacgccgtcaccgcatcaaagcagtcaggtcccagttggaagccaaacaagggtacgccggctaagggaggaggtggaagtaacaatcataaggaccgcaagcgtaagcctgaggaacttgttgcaaccgccactcactcttctcgacagcgttcgcgcgtcaacacgttcgacaagatcttgaactcccaatgcccgcaccatcctaactccaaccacgtggccaaagattgtttcgtctacaagcagtttgcggagcaatacaccaagactacacggaagaactccgacgaagaacaaagtacgtcgaggaagaaggacgacggcgacaccccggcaggatttcaagaccaccgcaaggagctcaaccatatcttcggcggccccctggcttatgagtctaaaaggaagcaaaagttgactgaacgggagatcaatgctgttcagcccgacacgccccagtatcttcgatggtcagaaattgcaatcaagtttgaccgctcggatcatcctgaccgagtggtccacccggggcggtaccccctggtactagacccagtggtccgtaatgtcaagcttcgcagaaccctcatcgacggcggcagtgcactcaatatcctattcgccaagaccttggatgatatgcagattcctcgctccgagctaaaaccaagcaatgcgccttttcacggagtaattccaggattatccgcaactccactcggccagatcaccctcccggtcacttttggcactcgggaaaacttccgcacagagaatatcagctttgaagtcgccgatttcgagacagcataccatgccatactcggacgcccggcgttagccaagtttatggctgtcccgcactacacttacatgatgatgaagatgcctggtccccgaggagttctatccctacggagtgacatcaagcaagccgtcacatgcgacaaggagagttgcgacatggcccaaacccgcgagatggcgtcagcccgagaggatatccgactggctgcagccacggcgagcgaaggagaagtgcccgctaccaagatttcaaaaagtggagaaagcgaagccaagactaaaaagattcccttagatccttctgattctactaaaactgctgtaataggcgccggagaggtgattgagcactccttatatgtcaaagaagatgccaagcctatcaaacaacgactccgccgattcgcacaagacagaaaagacgcgatcaaggaggaattaaccaagctgttagcagcaggcttcattaaagaagtccttcatcccgactggctggcaaacccggttctagttcggaagaaaacggggcaatggcgcatgtgtgttgattatactgacctcaacaaatcttgccctaaagatccttttgggttgcctcgcattgaccagatagtcgactcgaccgccggctgtgagcttctcagttttttggactgctactcggggtatcatcagatccgactgaaggaatccgactgcttgaagacttccttcatcacgccttttggagcatactgctacgtcaccatgccgttcggactaaaaaacgcaggagcaacttatcaacgtatgatccagagatgcttctcaacacagatcggccgcaacgttgaagcctatgtggatgatgtagtcgtcaagaccaagcaaaaggatgatttgatctcggatctagaagaaactttcgcgagcatccgcgctttcacgatgaaattaaaccctgaaaagcgggcccgcccgccaccctcgctgacgggtggggcccacctgtcatccccgacctcgcgccgcgcccgccgcccgcccgtgccctagcgccgccgccgccgcgaatccgccgcatcccgccgtccccgcgcgcattgaagtggggggaattattccccgcgattccctctcccgtttcccccgttttcccctctctctctctccctcggattcgtccggattcatcccgcaatcgtcgccggcgtcttcaatggcggccgagatctccgcgccggtttccttcctctccggccgcgctctccccctctcggcgctataaaaacgttgcccgtgctccgctcttccgtttccgccgctcaccgctcgctctcgccgtcggattcgtgctcgcgccgttcacctctctctccgccgtcgccgccgaccttcggttcgccgccgtcgccgctccggacctcttcccgactcggcgccacctccatcggcttcgccgcgtcgtcgccgactccgtccgccccttcgtttcgcccgccgaccgccggagcaccgtcgccctcgtcatcccgaaccgcgccgccgtcttcctccgctccggccgtcgtttccgccgccttcgctgtctcggggtgagccgtggaccgctccgttcgtttcccccttccctcctctctctcgggtgccgctccgccgcgccggtggtcgccggcggtgaccatcggggcgcgggcgcgtccccctcccgtcggccgtgccggcgaggccgccttcgggcgcgccctcgcggctgccaagtgggcccggccgtcagccgcccgcgcccgcgggtgcggctgacgcgcgggacccacggcgccgaccgccgccagccgcacgctgcagcttcggaagatccgctcttcgtggaagttgaagccggcgtttgggaaagtgagcaaggcaagtcacatcatccttga

SEQ ID NO: 47334 - DNA, 402 bp, Oryza sativa
  Clone ID: PAT_MRT4530_50112C.1
atctggtcgatcgcccataaccgcggggacggctattcgaatagttttactctggccagaggtgcacaattgttcccacaagacacaatccatcgtcatgtcaccgcgccaggcctgacacatcaccatgtcgagtgattgtgacaagacccttcatataaccctcccctaaccatccacaccactctaaggtttcacccccaccccctaccccggaggtgggcagtccccttgtgcgctgcggtgaatccggcagctagacaaccggacaccccggccgacctaactccatcacgcccacccttgccaccgatgcctaggaaagggttgagctatacttcagatcaagcagttacccactcccgcttgtggcaagcactgtatgtcttctagggtttcccg

SEQ ID NO: 47335 - DNA, 840 bp, Oryza sativa
  Clone ID: PAT_MRT4530_50113C.1
atgggttccatctccggcatcgacgacctcgtcttcccacccgggcagacgtttcggttcggcagcctcgacttcatcaccaacaacttcggcaagatttctctcctcgactcggaatcagaccagtcgggagagaaccggctttcggtcccgtttggattcccgaacgcggctgaaagctatttcaagaccacctcaaccgagtcggcttcaaaccactcggccgagatcgcatcttctccacgataccagatcaggatgatgggccttacccaccgggaagtcggcgtcatcctccaaccactcggcacggtttcgacggatcagctggatgactacaacagctctcccaccgtcgactcacgtcctactgacatcgtggagtacgacgaatttagttctcgctacaacgacttcgacgacttcgacgacttcgacggaagcctagatgacaactacacccctctctactttggcgttttcatggccaataatgagacggaggagcaacgccaagccagggagaacgaagaacgtcgccgactggaggaggagcatcaagcgcaagaacaagaacggctacggcgtgagcagcaggaccgtgagcggaccgcgaaggaggctgaggatcgacgtcaacgagctttggaagcagggcgccgagcgcgtgatctcatcggccagcaagatgtcgaagggacaccggttttccgcacccctcaacagaatgcggttgccgcgatcacccttctcgacgccctcctcaaccaaaacgagctcaatcaatccgaccacgtcgtcaacatcttgacccagacgaagaccatgattgcggcgacg

SEQ ID NO: 47336 - DNA, 5868 bp, Oryza sativa
  Clone ID: PAT_MRT4530_50114C.1
atgggttccatctccggcatcgacgacctcgtcttcccacccgggcagacgtttcggttcggcagcctcgacttcgtcaccaacaacttcggcaagatctctctccttgactcggtgtcagaccagtcgggagagaaccggatttcagtcccgtttggactcccaaacacggctgaaagttacttcaagaccatctcaatcgagttggcatcaaaccactcgggtgagatcgcatcttctccaacgtcaccagatcaagatgatggggcttacccaccgatcatgatgaagctccccgacgatttggcggccatctccatcacgacagcgtctccatcccgtaggcctaggcggaagtcagcttcaacaccgatttcgcctagcttcagggaagtcggcgtcatcctccaaccactcggcacggtttcgacggatcagctggatggctactacagctctcccaccgtcgactcgcgccccaccgacatcgtggagtacgacgagttttgctctcgctacaacgacccggatctcgacgacttcgacgaaagcctagatgacaactacacccctctctacttcggcgtcttcatggccgataacgagacggaggagcaacgccaagcccgggagaccgaagcacgtcgcgagactgagcgtcgccgactggaggaggagcgtcaagcacaagagcaagaacggttacggcgtgagcaacaggagcgtgagcggaccgcgaaggaggctgaggatcgacggcagcgagctttggaagcagggcgccgagcgcgtgatctcatcggccaacaagataatgcggttgccgcgatcaccctcctcgacaccctcctcaaggaaaacgagcttaatcaatctgatcacgtcatcaatatcttgaaccagacgaagaccatgattgcggcttcggtcccagttaactccgaaagcgtccacacgccgactggcagccgagtccctcacttccgatctcatgactaccgtcatccgagcctcagcatcaccggcgcaggatctaatcgcaggagcaggggtcacgacgagcggtccgttcactcacctcccgactatcatagggagcgccgagtggaacggcctcgctcaccacctcgtcgccgccccgtcgatcttcgcgacacaatcatacagcgccgagcagctcgaggtcatcatcattcgccggaccgccacgacgacgaccttgacggagtagcagccttcaccgacaacctgcgtcgagtggattggccagccggcttcaagccgactggaatagagaagtacgacggtaccactaacccagaatcgtggcttaccgtctacggtctcgcaatccgcgcagcaggaggagacagcaaggccatggcgaactatttaccagtggctttagtggattccgcccgatcttggctccatggattgccccgtggtacaattggatcttgggctgaattacgcgaccacttcatcgccaacttccaaggcaccttcgagcgtcccggcacgcaatacgacctctacaacgttgtccagaagtccggagaatcccttcgagattatatccggcgattttctgaacaacgtaacaagatttctgacatcaccgacgacgtcatcatcgctgcattcaccaaagggattcgccacgaagaattggtcggcaagttcgggcgtaagcctcccaggacagtcaagcttatgtttgaaaaagccaacgagtacgccaaagctgaagacgccgtcaccgcatcaaagcagtcgggtcccagttggaagccaaaaaaggatacgccggcttcgggaggaggtggaaattgtttcgtctacaagcaattcgcggagcaatacaccaagattacacggaagagctctgacgaagaacaaagcacgtcaaggaagaaggacgacggcgaccccccggcaggatttcaagaccaccgcaaggagctcaaccatatcttcggcggccccttggcttacgagtctaaaaggaagcaaaagttgaccgaacgggagatcaatgctgttcagcccgacacgccccaataccttcgatggtcagagattgcaatcaagtttgaccgctcggatcatcctgaccgagtggtccacccggggcggtatcccctggtactagacccagtggtccgtaatgtcaaacttcgcagaaccctcatcgacggcggcagtgcactcaatatcctcttcgccaagaccttggatgatatgcagattcctcgctccgagctaaaaccaagcaatgtgccttttcacggagtaattccaggattatccgcaactccactcggccagatcaccctcccggtcacttttggcactcgggaaaacttccgcacagagaatatcagctttgaagtcgccgatttcgagacagcataccatgccatactcggacgcccggtgttagccaagtttatggccgtcccgcactacacttacatgatgatgaagatgcctggtccccgaggagtcctatccctacggagcgacatcaagcaagccgtcacatgcgacaaggagagttgcgacatggcccaaacccgcgagatggcgtctgctcgagaggatatccgactggctgcagccacggcgagcgaaggagaagtgcccgctaccaagatctcaaaaagtggagaaagcgaagccaagactaaaaagattcccctagatccttctgattctactaaaactgctaacaataaagatatctttgcatggaaaccatctgatatgcccggtattcctagagaggtgattgagcactccttacatgtcaaagaagatgccaagcctatcaaacaacgactccgccgattcgcacaagacaggaaagacgcgatcaaggaggaattaactaagctgttagcggcaggcttcattaaagaagtccttcatcccgactggctggcaaacccagttctagttcggaagaaaacggggcaatggcgcatgtgtgttgattatactgacctcaacaaatgttgccctaaagatccttttgggttacctcgcattgaccaggtagtcgactcgaccgccggctgtgagcttctcagttttttggattgctactcggggtatcatcagatccgactgaaggaatctgactgcttgaagacttcattcatcacgccctttggagcatattgctacgtcaccatgccgttcggactaaaaaacgcaggagcaacttatcaacgtatgatccagagatgcttctcaacgcagatcggccgtaacgttgaagcctatgtggatgatgtagtcgtcaagaccaagcaaaaggatgatttggtctcggatctagaagaaacctttgcgagcatccgcgctttcaggatgaaattaaaccctgaaaagtgcaccttcggagtaccgtcagggaagctgcttggttttatggtgtctcataggggcatccaagccaacccggagaaagttactgctatcctcaacatgaaaccgccaagtaaccagaaagatgttcagaagctgactggatgcatggcggcgctcagccgattcgtttcaagacttggcgagcgggggatgcccttctttaagctactgaagaaaacagatgatttccagtggggacccgaagcacagaaggccttcgaagatttcaagaaactcctcaccgagccaccagtcttagcttcaccacatccgcaggagccgttgttgctgtatgtatcagccacctcccaggttgtgagcacagtcttggtcgttgagcgcgaggaagaaggccatgtccagaaagtccagcgaccgatttactttgtcagcgaggtcctagccgactccaaaacgaggtacccccaggttcagaagctgttatatggtattctaattactaccaggaagctatctcactactttcaaggtcactcggtgacggtggtcacatcatttccactcggtgatatactgcacaaccgcgaagcaaacggacggattgctaagtgggccttggagttgatgtctttggacatatcattcaagccccgaatttcaatcaagtcccaagcgttagctgattttgtcgccgaatggaccgagtgccaggaggatacccccgcggagaagatggagcactggaccatgcactttgacgggtcaaaaagactttcgggcactggagcaggagtagttctaatttccccaactggagaaagattaagctatgtgctttggatacatttttcggcgtcccacaacgtcgccgaatatgaggcgctccttcatggactgcggattgcaatttccctagggataaagcgtctaatagttcgaggcgattcacagctggtcgtcaaccaagttatgaaagagtggtcctgccttgacgacaacatgatggcgtatcgacaagaggtacgcaaattggaagacaagttcgatggactcgagctcagtcacgttcttcgacacaataatgaagccgccgacagacttgccaactttggatccaagcgcgaggcggcaccctctgatgttttcgtcgaacacctttatacgccgacagtacctcacaaagatactactcaagttgcgggcactcatgacgtagctatggttgaagccgactggcgagagcccctcatacgatttttgacttctcaagaacttccccaagacaaagatgaagccgagcggatttcaaggcggagcaaactttatgttatgcatgaagctgagttatacaagaaaagcccttcaggagttctgcaacgctgcgtatctttagaggaagggagacaattgctgaaagacatacattctgggatatgcggaatccatgctgctgcacgcaccattgtcggcaaagcttaccggcagggttttttctggcctactgcagtgtccgacgccgacaaaattgtgcgcacatgtgaaggttgccaatttttcgccagacaaattcatctaccagctcaagagttgcagactatcccgctgtcttggccgtttgcggtttgggggctcgacatggtcggcccgtttaaaaaggcagtcggcggttacacgcacctctttgtggccattgacaaattctccaagtggattgaagctaaaccggttgtcacaattacagcagataacgctcgagacttcttcatcaatattgtgcatagatttggagtgcccaatcggatcatcactgataatggcagacaattcactggcggagtttttaaagacttttgtgaagactttggaattaagatttgttatgcctcagtagcacatcccatgagcaatggacaggtggagcgagccaacggcatgatacttcaagggattaaagcgcgagtttttgaccggctaaaaccctatgccggcaaatgggtgaaacagctaccatcagtgctttggtctttgcgtactacacccagtcgggccacaggccagtcgccttttttccttgtctatggggcagaagcaatgttgccgagtgaagtcgaattcgagtctttgcgctttcgtaatttccgcgaagaacgctatgaagaggaccgagtggatgacttgcaccgactggaagaagtccgcgaagcagctttgattcggtcggctcgatacttacaagggttgcggcgttatcataatcgcaatgttcgatcccgtgccgttttagtcggcgacctggttttgaggaaaattcaaactacacgggatcggcacaagttatctcctctatgggaggggccatttatcatctctgaagtcacccggccaggttcctatcgactcaagcgcgaagacggtactctcgtcgacaactcttggaacattgaacatcttcgtcgtttctacgcttag

SEQ ID NO: 47337 - DNA, 385 bp, Oryza sativa
  unsure (1)..(385): unsure at all n locations
  Clone ID: PAT_MRT4530_50115C.1
aaggttaaggttgaagccaaggngccgttggcttacttcctgaaacttgaggtccaatcgacatcaaggtatatcagtttgataaaaattgatttaaattagaggtatctcaactgtgcttagctttaagcgttncaacgtatggtgaagatctcagtagtggaccagctttatggaacaaatacagttggacatcattgtcgaaaccctctaataattgaacaactgattgtactgtataacttgattttgacaaaacaacatatgtggctgtgctatttattttagttctcccaaaatttcttttgaccttttgggtcagagaagtttgtgaatttgagcttttctacaataaaatggatctgtttactcaaaaaaaaaaaaa

SEQ ID NO: 47338 - DNA, 2409 bp, Oryza sativa
  Clone ID: PAT_MRT4530_50116C.1
atgggttccgtctccggcatcgatgacctcgtcttccctcccgggcaggcatttcggttcggcagcctcgacttcatcaccaacgacttcggcaagatctctctcctcgactcggaatcagaccagtcgggagagagccgtatctcggccccgtttggagttctgaacgcggctaagatctactccaagtctatctcgatcgagtcggcttcaacatcaccagatcgagatgatagggcctacccaccgatcctaatgaagctccccgacgatttggcggccgtcttcaccaccacgacgtccccttcccgtaagcctaggcggaggtcggcttcaacaccgatctcgcctagctccaggaaagttggcgtcatcctccagccactcggcacagtttcgacggaccagttggagggctactggagctctctcggcgtcgactcgcgtccgactgagatcttggagtacgatgagttcggctttcgcagcaacgacccagatctcgacaactttgacgaaagcttagaagacaactacacccctctctatttcggcgtcttcatggccgataatgagacggaagagcaacgccaagcccgagaaaccgaagcacgacgcgaggccgaacgacgccgactggaggaggagcgtcaagcacaagaacaagaacggctgcggtgtgagcaacaggagcgtgagcgggccgcaaaggaggctgaagaccggcggctacgagctttggaggcagggcgccgagcgcgatatcttatcggccagcaagacgttgaggggacaccggttttccgcaccccacaacagaatgttgttgccgcgatcaccctcctcaaggagaacgagctcaatcagtctgatcatgttgtcaacatcttgaaccagaccaagaccatgattgcagcttcggtcccagttaactccggaagcgtccgcacgccgagtggcagccaagttccccatcttcgatctcatgaccaccatcagccaagcctcagcatcaccggtgcaggatctaatcgcaggagcaggggccacgacgagcgatctgttcacttgccccccgagcatcatagggagagccgagtggaacgacctcgctcgccgcctcgtcgtcgccccgtcgatcttcgtgacacgatcattcagcgccgagcggcccgaggccaccatcattcatcggatcgctacgacgatgacctagatggagttgccgctttcaccaacgacctgtgtcgagtggattggccagccggctttaagccgactggaatagagaagtacgacggtaccactaatccagaatcatggcttaccgtctacggtctcgcaatccgctcagcaggaggagacaacaaggccatggcaaactatttacctgtggctttagcggattccgcccgatcttggctccacggattgccctgtggaattcgccacgaagaattggtcggcaagttcgggcgtaagcctcccaaaacagtcaaactcatgtttgaaaaagccaacgagtacgccaaggctgaagacgccgtcatcgcatcaaagcagtcgggctccagttggaagccaaaaaaggatacgccggctacgggagggggtggaagtaacaaccataaggaccgcaagcataagcctgaggaacttattgcaaccactactcactcttctcgacagcgttcacgcatcaatacgttcgataagatcatgaactcccaatgcccgcatcatcttaactccaatcacgcggccaaagattgtttcgtctacaagcagttcgcagaacaatacaccaagactacatggaagaactccgacgaagaacaaagcacgtcgaagaagaaggaagatggcgaccccccggcaggttttcaagaccaccgcaaagagcttaaccatatctttggcggccccttggcttatgaatctaaaagaaagcaaaagttgactgagagggagattaacgctgttcagcccgacaagccccaatatcttcgatgtttagaaacagcaatcaagtttgaccgctcggatcatcccgaccgagtggtccacccggggcggtaccccctagaactagacccagtggtccgtaacgtcaagcttctcagaaccctcatcgacggcggcagcgcactaaatatcctcttcgccaaaaccctggatgatatgcagattcctcgctcagagttaaaaccaagcaatgcgccctttcacggagtcatctcggggctatctgcaactccactccgccagatcaccctcccagtaacctttggcactcgggaaaacttccgcacggagaatatgtgttttgaagtcgccgatttcgagacagcgtatcacgccatactcgaacgcccggcgttagccaagttcatggccgtcccgcactag

SEQ ID NO: 47339 - DNA, 197 bp, Oryza sativa
  Clone ID: PAT_MRT4530_50117C.1
gtccattctcattacaacctcaagcaggatatgcggacaggattacactagcagaccatttgcagcgcacgagattaaccagtgttgacgttccaaccatgtagagttgctttgctagctccgatcatacttattcatcagctagtgcaggtgtatagctatggcacaactttaagcaacagttatttattggagta

SEQ ID NO: 47340 - DNA, 5910 bp, Oryza sativa
  Clone ID: PAT_MRT4530_50118C.1
atgggtcccgtcaccggcatcgacgacctcgtcttaccacccgggcagacgtttcggttcggcagcctcgacttcgtcaccaacaacttcggcaagatctctctccttgactcggagtcggaccagtcgggagagagccggatctcagtcccgtttggattcccaaacgcggctgagagttacttcaataccatctcaaccgagtcggcttcaaaccactcggctgagatcgcatcttctccaatgtcaccagatcaagatgatggggcttacccaccgatcctgatgaagctccccgacgatttgacggccgtctccatcacgacagcgtctccttcccgtaggcctaggcggaagtcggcttcgacaccgatttcgcctagcttcagggaagttggcgtcatcctccaaccactcggcacgatttcgacggatcagctagatggcgactacagctctcccaccgtcgactcgcgccccaccgacatcgtggagtacgacgagtttagttctcgctaccacgacccggatctcgacgacttcgacggaagcctagatgacaactacacccctctctactttggcgtcttcatggccaataacgagacggaggagcaacgccaagcccgggagaccgaagcgcgtcgcgagactgagcgccgccgactggaggaggagcatcaagcacaagaacaagaacggctacggcgtgagcagcaggaccgtgagcggaccgcgaaggaggctgaggatcgacggcagcgagctttggaagcagggcgccgagcgcgtgatctcatcggccaacaagatgttgaagggacaccggttttccgcacccctcaacagaatgcggttgccgcgatcaccctcctcgacaccctcctcagggaaaacgagctcaatcaatctgatcacgtcgtcaacatcttgaaccagacgaagaccatgattgcggcttcggtcccagttaactccgaaagcgtccacacgccgactggtagccgagtcccccacttccgatctcatgactaccgtcatccaagcctcagcatcaccggcgcaggatccaatcgcaggagcaggggccacgacgagcggtctgttcactcacctcccgatcaccatagggagcgccgagtggaacggcctcgctcaccacctagtcgccgccccgtcgatcttcgcgacacaatcatacagcgccgagcagcacgaggctatcttcactcgccggaccgccacgacgacgaccttgatggagtagcagccttcaccgacgacctgcgtcgagtggattggccagccggcttcaagccgactggaatagagaagtacgatgcaggaggagacagcaaggccatggcgaactatttaccagtggctttagcggattccgcccggtcttggctccatggattgccccgtggtacaattggatcttgggccgaattacgcgaccacttcatcgccaacttccaaggcaccttcgagcgtcccggcacacaatacgacctctacaacgttattcagaagtccggagaatcccttcgagattacatccggcgattttctgaacaacgtaacaagatctccgacatcaccgacgacgtcatcatcgccgctttcaccaaagggattcgccacgaagaattggtcggcaagttcgggcgcaagcctcccaggacagtcaagctcatgtttgaaaaagccaacgagtacgccaaagctgaagacgctgtcaccgcatcaaagcagtcgggcccgagttggaaaccaaaaaaggatacgccggctccgggaggaggtggaagtaacaatcataaggaccgcaagcgtaagcctgcggaacttgttgcaactgctagtcactcttctcgacagcgttcgcgcgtcaacacgttcgacaagatcatgaactcccaatgcccgcaccatcctaactccaaccacgtggccaaagattgtttcgtctacaagcaattcgcggatcaatacaccaagactgcacgaaagaactccgacgaagaacaaagcacgtcgaggaagaaggacgacggcgacgccccgactggatttcaagaccaccgcaaggagctcaaccatatcttcggcggccccctggcttatgagtctaaacggaagcaaaagttgaccgaacgggagatcaatgctgttcatcccgacacgccccaatttcttcgatggtcagagattgcaatcaagtttgaccgctcggatcatcctgaccgagtggtccacccggggcggtaccccctggtactagacccagtggtccgtaatgtcaagcttcgcagaaccctcatcgacggtggcagcgcactcaatatcctcttcgccaagaccttggatgatatgcagattcctcgctctgagctaaaaccaagcaatgcgccttttcacggagtaattccaggattatccgcaactccactcggccagatcactctcccgatcacttttggcactcgggaaaactttcgcacagagaatatcagctttgaagtcgccgatttcgagacagcataccatgccatactcggacgcccggcgttagccaaattcatggccgtcccgcactacacttacatgatgatgaagatgcctggtccccgaggagtcctatccctacggagcgacatcaagcaagccgtcacatgcgacaaggagagttgcgacatggcccaaacccgcgagatgacgtctgcccgagaggaaatccgactggctgcagccacggcgagcgaaggagaagtgcccgctaccaagacttcaaaaagtggagaaagcgaagccaagactaagaaaattcccctagatccttctgatcctactaaaactgctaacaataaagatatctttgcgtggaaaccatctgatatgcccggtattcctagagaggtgattgagcactccttacatgtcaaagaagacgccaagcctatcaaacagcgactccgccgattcgcacaagacaggaaggacgcgatcaaggaggaattaaccaagctgttagcagcaggcttcatcaaagaagtccttcatcccgactggctggcaaacccggttctagttcggaagaaaacagggcaatggcgcatgtgtgttgattatactgacctcaacaaatcctgccctaaagatccttttgggttgcctcgcattgaccagatccgactgaaggaatccgactgcttgaagacttcattcatcacgcccttcggggcatactgctacgtcaccatgccgttcggactaaaaaatgcaggagcaacttatcaacgtatgatccagagatgcttctcaacacagatcggccgcaacgttgaagcctatgtggatgatgtagttgtcaagaccaagcaaaaggatgatttgatttcggatctggaagaaaccttcgcgagcatccgcgctttcaggatgaaattaaaccctgaaaagtgcaccttcggagtaccgtcagggaagctgcttggttttatggtgtctcataggggcatccaagccaacccggagaaaccgccaagtacccagaaagatgttcagaagctgactgggtgcatggcggcgctcagccgatttgtttcaagacttggcgagcgggggatgcccttctttaagctgctgaagaaaacagacgacttccagtggggacccgaagcacagaaggccttcgaagatttcaagaaactcctcactgagccaccagtcttagcctcaccacacccgcaagagccgttgttgctgtatgtatcagccacctcccaggttgtgagcacagtcttggttgttgagcgcgaggaagaaggccatgtccagaaagtccagcgaccgatttattttgtcagcgaggtcctagccgactccaaaacgaggtaccctcaggttcagaagctgttatatggtattctaattactaccaggaagctatctcactactttcaaggtcactcggtaacggtggtcacatcatttccactcggtgatatattgcacaaccgcgaagcaaacggacggattgcaaagtgggctttggagttgatgtctttggacatatcattcaaggcccgaatttcgatcaagtcccaggcgttagccgattttgtcgccgaatggaccgagtgccaggaggatacccccgcggagaagatggagcactggaccatgcattttgacggatcaaaacgactttcgggcactggagcaggagtggttttgatttccccaactggagaaagattaagctatgtgctttggatacatttttcggcatcccacaacgtcgccgagtatgaagcactccttcatggactacggattgcaatttccctagggataaagcgtctaatagttcgaggtgattcacagctggttgtcaaccaggttatgaaagagtggtcctgccttgacgacaatatgatggcatatcgacaagaggtacgcaaattggaagataagttcgatggactcgagctcagtcatgttcttcgacacaataatgaagccgccgatagacttgccaactttggatccaagcgcgagacggcaccctctgatgttttcgtcgaacacctttatacgccgacagtacctcagaaagatactactcaagttgcgggcactcgtgacgttgctatggttgaaaccgactggcgagagccccttatacgatttttgacttctcaagaacttccccaagacaaagatgaagccgagcggatttcaaggcggagcaaactttatgttatgcatgaagctgagttatacaagaaaagcccttcgggaattctgcaacgctgcgtatctttagaggaagggagacaattgctgaaagacatacattctgggatatgcggaaaccatgctgctgcacgcaccattgttggcaaagcttaccggcagggttttttctggcctactgcagtgtccgacgccgacaaaattgtgcgcacatgcgaaggttgccaatttttcgccagacaaattcatctaccagctcaagagttgcagactatcccgctgtcttggccgtttgcggtttgggggctcgacatggttggcccgtttaaaaaggcagtcggcggttacacgcatctctttgtggccattgacaaattctccaagtggattgaagctaaaccggttgtcacaatcacagctgataacgctcgagatttcttcatcaacattgtgcatagatttggagtgcccaatcgaatcatcactgataatggcacacaattcactggtggagtttttaaagacttttgtgaagacttcggaattaagatttgctatgcttcagtggcacaccccatgagcaatggacaggtggagcgagccaatggcatgatactccaagggattaaagcacgtgtttttgaccggctaaaaccctatgccggcaaatgggtgcaacagctgccatcagtactttggtctttgcgaactacacccagtcgggccacaggccagtcaccttttttccttgtctatggggcagaggcaatgttgccgagtgaagttgaattcgagtctttgcgctttcgaaatttccgtgaagaacgctacgaagaggaccgagtggatgacttacaccgattggaagaagtccgtgaagcagctttgattcggtcggctcgatacttacaagggttgcggcgttatcataatcgcaatgttcgatcccgtgcctttttagtcggcgacctggttttgaggaaaattcaaactacacgggatcggcacaagttatctcctttatgggaggggccatttatcatctctgaagttacccgaccaggttcttatcgactcaagcgcgaagacggtactctcgtcgacaactcttggaacattgagcatcttcgtcgtttttacgcttaa

SEQ ID NO: 47341 - DNA, 1645 bp, Oryza sativa
  Clone ID: PAT_MRT4530_50119C.1
attgggtacctcaaaaaaactgagttgcatgattatagcaaaactcaactggggtctgagccttggtcctctaacttcgtcttcagctcagaagcactacacttctgaaaaggggaataatagtaaggctgagtacaaccaccgtactcaggaagccacaccaacgatgcagacgtgcaaggggattcaagaatgagtttcacccccactcctcgcaaggcagcgggcagtcccctcgtgcgccgcggtgaatccggcagctggacaaccggacaccccggccgacccaactccatcacgccctccctcgccaccggtgcctaggaaagggtcgagctatacttcagatcaagcagttacccactcccgcttgtggtaagcactggaatgggacggctgacatcatcaagggggaggggcggcgccggcaagcgggacccacacgtcagcgagacaaggaggcggtccaccgtggaccgggaccacaaggacggtccatcgccggtccacgggttggacggcccagatcggccaagccaatcgggcggctgagggggaggcagccggctggggcacgggcgcggccgagaccggcccggccgagcgaaggcgcggcggcggcacgcgaccaccggcggcaacagccggcgacggcgcggggagcggcggcacacgcgggcggcggcggcgcatcgagaaggcgatgggaaggcggccggtggcaaggaacagcgacggcaggcccctcgggagggcgacgtggtggagcttcaacaaccactggcgaacgcggaagggaatggacctccggtgggtttctggtggcttggagcagcgatcggggcacagcagggcgcagcgacactgtgggaggcggttgtgcggcgagaggtgatcgggagtagagccaaatggcggccggaggcggcaaaaacggtggtgaccttgggcctgcggtgggggaggtggttccggtgacgaatgggtggaatgaggcggcggccgggcttgcccttgcagcggcgaagccggcggaggttgtcgcgtggcgcgctgacggctaggacggcgacgaggtgcggctggaggcggtagaggtgaggcggctcgggtgtggtggtggtagtggtgctccggcgatggaatggggacacagagcgggggccagggtacggcgaggcacgtcgaagccggttgtggcggcggcacagcaccgcgacggctatagcggcggtggcgagcagcggcgagagcccgggagaggcggaatcggctggccggagtgggggagcggcgtgggttcgtgggggtcgatccggtgccggttttgggggaaaagagggggaaggggtggaggagtgggcggcaaccatgtccgcatggtcggacgtgtgcgcgcgaggcgggaggcggcggttttggcagcggcgtggggcaacaatggtggcttcggcagttgaagccggccggctggaggaatggggtgaagctgacacatggggccttaggaccatgtcggtcagagagagaggacccggggggaaaaagtagacttttttgcaagggcgggccgagggcatcaagtacacatgagacaaagattatactggttcaggcccctcatgaggtaatagtcctaatccag

SEQ ID NO: 47342 - DNA, 1154 bp, Oryza sativa
  Clone ID: PAT_MRT4530_5011C.1
ttctttttctccccctccttccctcttgggccggctcggcccacttctccctccctctctctcctcccccgcggcccatcggcctccccgcgcgcgcgcgccgctgacaggcgggcccgcccgccactctcgctgacgggtggggcccacctgtcatcttcctcctcccgccgcgtccgtcgccgcccgtgccccccgcgtttccctctcccgattccccctcttttccctctctctctccctcggattcgtccggattcatcccgcgaagttcgccggcgtcttcaatggcgcccgagacctccgcgcgcggtttccttcctccccggccgccctctttccctcttggcgctataaaatcgtcccccgtgcccttctcttccgtttccgccgttcgccgcttgctctcgccgtcggaatcgcgctcgcgccgtcgcatcttctctccgccgtcgccgacgagctccggttcgccgccgccgtcgctccggtcttcctcccggctcggcgccacctccctcggcatcgccgcatcgccgtcgacctcgtccgcgtctccgtttcgcccgccgaccgccggagcaccgtcgtcgtcgtcatcccgaaccgcgccgtcgtctccctccgctccggttcgccgccgacgtcgctccggtcctcctcccgactcggcgacacctccctcggcatcgccgcatcgccgtcgacctcgtccgcgcctccgtttcgctcgccgaccgtcggagcaccgtcgtcatcgtcatcccgagccgcgccgccgtctccctccgctccggccgccgttctcgtcgtcgtcgttgtcccggggtgagccgaggaccgccgttcgccttcccccttccctcctctctctcgggcgccgctccgccgcgccgatggtcgccggcggtgaccatcggggcgcgggcgcgtcgctcccgtcggccgcgccggcgaggccgccctcgggcgcgccctcgcggctgccaagtgggcccggccgtcagccgcccgcgcccgcgggtgcggctgacgcgcgggacccacggcgccgaccgccgccagccgcgtgcgcccggtccaccgtggaccgtggggctgacgcgtgggccccactccccgtggacccggtccgcgcgtcccctccctcggct

SEQ ID NO: 47343 - DNA, 396 bp, Oryza sativa
  Clone ID: PAT_MRT4530_50120C.1
atgggctgccagctggcgcgcgcgccgacaacgttgctgcttcttatgctccttctctccgactgtgtctgtgccatcgtgctctccaaaaccaagagcaactccaagccaaagagaagcaacaatcatggcgtggggttggataacgaggagcccgaggcggcgcagcccaccaccatggaggaaaataccatggcggcacctgtgatagcgcggcggggcgcgcagatgtgctgccatcacaataccgtgacagctaaaggggaatgggagaaggccttggaggttgtttggcttaggaggcatcaggagttgtcatttcaccgggtcatcattctcattgccatcgtggtggaatctgatgtatggtccagagtgcgctcgctgctggcgtga

SEQ ID NO: 47344 - DNA, 383 bp, Oryza sativa
  Clone ID: PAT_MRT4530_50121C.1
gtgaatgaagcttcttttcaccaatggatgtgcgatagcagaatggtgctaagtgagtcacatcgtcgaggcttcgacacggtggtgacgttgatagcatggacaatatggaaggaacggaacggtcagatcttcaatcagcagtatagatcttggatggatgtggctagagggatggtggacgaagcctctctttggcgtaaagcaaacccgacaatccctgcgcttgaacttcatcaatacagctgatttttttggcaaacatggttaattaacgaagtacaaaacaccacatttgcggcagcaaatgcaacgtagggttccattttttcaggcaccggtcatctaaccaatttagcatctgaatatatctgtgctgtatg

SEQ ID NO: 47345 - DNA, 189 bp, Oryza sativa
  Clone ID: PAT_MRT4530_50122C.1
ctcctgctcgcgattaattctaacattccccttattctttctaactcttcctccaatattaatccaaagaaactatatcattaccaaccatcttacattaattatctactacttaaacctaacacaaacactccccccactttataataccactactccctctcacataacatctccctccaagaatat

SEQ ID NO: 47346 - DNA, 542 bp, Oryza sativa
  Clone ID: PAT_MRT4530_50123C.1
atggaaacgacaaggactactcggattgtatccatatttgtttccctagttctacttggacaatgggacacctatgggtataaatacaagcccccctaggaggacaaggggacactcaccatgagacgatcaacaggatcaacatgatcaacagacgagcacctcaatcaacacacccaccgcaatctacgggacaacatacaaaccaacatacgccaagacaagacgccgccggatatcaacttgggataggcatggctattcccctacggtgtccttggataccgtcaggagagacgaaagcgctatctctgatctcgctgggcacggattcgaggaggaaggctaccctgttatcgactacgagtcagacctttagaccgacatatcgacaacagttagatcggctaccccacatattgtactgtctcgtgtatatcctagcaccgacggtccccatactatgcaaataccagaattacgacaccaaacgtcgacatcaaaaccctaaccctaaccctccccacccctcccctcccccc

SEQ ID NO: 47347 - DNA, 796 bp, Oryza sativa
  Clone ID: PAT_MRT4530_50124C.1
ggagtgtgacgagtagagagacgatgagggtagagaaaagaaactagaaagaaagaggagaggaggtgaagaaggaagagagaaaggaacacagggcacggaaaagagaaaagcgagggagggaagcgcaagaagggaaggaaagacggagcaggacgcacggagaggaagcaagaaaaaaaagagacgaagaacaggggagcgggaaagaagaagagaggcaagcagagcaaagcgagacacgataaggggagaaaagaaaaagagggaaaaggagcacgaggaggagaaaagaaagacaaaaagaaaaaaggaagagagcagaaaaaaaagggagagacaagggaagaagaagcgaaaaagaaaagaagggagaggggaggagagaagaggagaaggaaggaagagaggaggagagagaaaaaaagaaaagacaaaaaaaagccgccgcccgcccccgcaggcgtcgccgcatcgggcggcgtgtcccgggaggcggaccacgacgcggagcgccagaacttcttccccgcgccgccgccgacaccccctccgccgtcgtcgggcgtggccatggccacccgaatcggaccaccggcgacgcaaacctacacgaaatcgcaccaaacccgcatggtgattctcacgccattccacaccccccaaaaaaattccaaaaaaaatcagaaaaaaaaacaaaaggcggcgcttggggacgagcagatcgggagatcgaggcgagcagcgaggtcgcgggtgagaggagaagagaggagaggagaggaggggaagtggg

SEQ ID NO: 47348 - DNA, 321 bp, Oryza sativa
  Clone ID: PAT_MRT4530_50125C.1
atgggcgcggggaagacggggcgtgcgggagtggggcacggggaaggcggagaaggtgggtggcgcgcgcgcggtgcggcggtcgccggctcggggagcggctggaggttggggaaggggctgacaggtgggccccacctgtcagtgcctgagggagagagggggaggcggcctggacttcgggaggagaagggaaaacgggctggcccgggtttctcctgctttgactctggtattgtctcaaggaatgatggagaggatcaaaagcagagtggattcgcgtgggctggattcggactgcagaacagcaccaacttgtga

SEQ ID NO: 47349 - DNA, 1053 bp, Oryza sativa
  Clone ID: PAT_MRT4530_50126C.1
ctcgaggcaaatctggatgcttccaacccccaccatccccaccacctccctcctcgatccctcgcctcggaggccgcaggtccaaggcaggcagtatttgagcggttgtctcccgaggaagaggagggattgctagtgttgatccattgtagtaacagagagagagagagagagccaatcttttgatgttttagagcataggtgttcttttttgcagttccaatggatgctaagggtgttaatgaccgggatgctctaattgatctggagagtggaaataacattgttgtcggcgagcataacaacggggcggatgccaattttgctgttgcccaagaaagaacagcaccgaatggttcatggaatggtgccatgggcaccaatggatgcctgaaagatgatgtaaatcatcagcacatgtgttgctgtctgtcctctccagatgctgctgccaaaaatggagatgaccggaagtctgatggggaggagaagctgggccttctggatacttccggaggcgagaaaacaaagaagaagcggtccaagaagccaccgcgaccaccacggccaccaacacccacgccattggatgtttccgaccagaagctcctcaatgagctgagtgaacttgctatattgaaacgggcaaggattgagcggatgaaggctttgaagaagatgaagaacgccaaacatgggtcttcaagtggcaacttgtttcccctgatcattaccattatcttctgcctcgtcatactctggcaaggttttttctcacgaacggggtcggctgtgagcttccatggatcacctgaatcgtccgttagagcgcatagcagtctgatctccattcggttctacaagaacaataattctaatagcagatctcgagaggccatatcggcagctcccaagagggatctctctgtggatggattccagatctgcacagtatacagcacgcgtgtgtggtctgatgttaattcccacatggcattgcttgctgatcgtccagctacactgttgagctggactggactggactctgcttga

SEQ ID NO: 47350 - DNA, 624 bp, Oryza sativa
  Clone ID: PAT_MRT4530_50127C.1
ggtggggcgccgcggcggtgggtgtggaggctaaggcgaggccgggcgccgcggcgacgggcgcagaggtggaggcaggcgccatggcagccgtaagcgagcttcttggcggcgacggacaggccgcgaaggagcgggaggacctccggatagaaaccaaaagccatggaaggcctgcaccgagaacgactcgatccgccacctatgccgactccgacaacccctgcctcgacttcttcttccagatcacgggcatccatggagctcgcggtgggggcagccgccacggcctcatgctcctccggcacctcgctccatcttccacgggctccacctccacctccggggtcgcagcttacctgctcgacgggcgactgccgcggccgcgcgcggcgatcgccgtcggagcccggtgaattttgatgctgtaatagcagtgttgctcccatctgcctgacatgtgttctacgttacgcggacctggcaaatctggcaaccatttttttcttgcgtactgtggtgatttcttgcctatgctgtaaaaaatatctttgcatgtatgaatggttagctgctcattttcctccaaaaaaaaaaaaaaaaaaactcgagggggggcccggt

SEQ ID NO: 47351 - DNA, 397 bp, Oryza sativa
  unsure (1)..(397): unsure at all n locations
  Clone ID: PAT_MRT4530_50128C.1
ctcaaccatccataggttagattgatgccatggcattctggagtgcgtnagtctcgaggcaaatctggatgcttccaacccccaccatccccaccacctccctcctcgatccctcgcctcggaggccgcaggtccaaggtttcctcgcgagctgggctctctctctttcttccactttcggattggtgattggtgttgggggcgtttcttgattcggtggtggggtgggatcgatcgccatgggagagcagcggcactggatttatttgtgaggatgattgttgaattggcaggcagtatttgagcggttgtctcccgaggaagaggagggattgctaagtgtttgatccattgtagtaacagagagagagagaagagagccaatcttttttnaatg

SEQ ID NO: 47352 - DNA, 620 bp, Oryza sativa
  Clone ID: PAT_MRT4530_50129C.1
tcaagtggcaacttgtttcccctgatcattaccattatcttctgcctcgtcatactctggcaaggttttttctcacgaacggggtcggctgtgagcttcccatggatcaccctgaatcgtccgttagagcgcatagcagtctgatctccattcggttctacaagagcaataattctaatagcagatctcgagaggccatatcggcagctcccaagaatgctgagacaccatcgaggctggagatccatagcaaagcaagaaagatcacgagatgaacattgcgccccgagcatgatccgccatccatgattgccgtcgccgcaatgcctcccaacttggccattttgaaacctcatcacgtcaggttgatgtaaattatgagaatttcagtgcttctcgaggccgtcctcactgtaaatgatgaactactcttttagtgtgggtgtgtgcccccctctctgggttctatgctaaccagtggtggtaagagcaagctgtcttgttacaataataataaaatgttgctcttaataatagtagtatgatctagtctaattactgtttggccctgtaatgctgcatctggtagcaataaaaatcagaagtgtgtgttcttggct

SEQ ID NO: 47353 - DNA, 1142 bp, Oryza sativa
  Clone ID: PAT_MRT4530_5012C.1
acgaatagagtacccactagttggagttttgtttattctagggtgaacaagccgggagagagggcgcgcggaccgggtccacgggagtggggcccacgcgtcagcccctcggtccacggtggaccaggtgcacgcggctgacgccggccggcgccgtgggtcccacgcgtcagccgcacccgcgggcgcgggcggctgacggccgggcccacctggcagccgcggggcgcgcccgaaggcggcctcgccggcacggccgacggaaggcggcgcacccacgccccgatggtcgccgccggcgaccaacggcgcggcggagcggcgcccgagagagaggagggaagggggaagcgaaaggagcggtcctcggctcaccccgggtcgacgaggacggcggaaacgacgaccggagcggaggaagacggcggcgcggctcgggacggcgaggacgacggtgctccggcggtcggcgggcgaaacggaggagcggacgaggtcgacgacgacgcggcgaagccgaaggaggtgacgccgagacgggaggaagtccgaggcgacgacgacggcgaaccgaagctcggcggcgacggtggagagagaggacgacggcgcgagcacgaatccgacggggagagcgagcggcgagcggcggaaacggaggagagaggcacggggaacaattatatagcaccgggagggggagaaagcggccggagggggaggaatcggccgcggagatctcggctccatcaatgacgccggcgaggattgcgggaataaaatcggacgaatccgagggagagagagaggggaaagcgggggaaacgggagagggaatcgcggggaataattccccccactttaatgcgcgcggggacggcgggatgcggcggattcggcggcggcggcggcgctagggcacgggcgggcggcgggcgcggcgcgaggtgggggatgacaggtgggccccacccgtcagcgagggtggcgggcgggcccgcctgtcagcggcgcgcgcgcggggaggaggccgatgggccgcggggagaggagagagagggagggaattgggccgagccggcccaagaagggaaggggggaaaaggacttcttttagggtttttctttttataaatcctttt

SEQ ID NO: 47354 - DNA, 220 bp, Oryza sativa
  Clone ID: PAT_MRT4530_50130C.1
gggccatcaaacgaaaactggaggaagggagcctctaacatgactaaacaccccagaactacatacttattgactgtaaaggacttgacaggggttggtacatgtgagctattgtggacataaaagaactgagaagtccattcgtacttcatgaagcggagagacagcaataaattagtttacaggcgaaatgtacatggatcttcaaggacataactac

SEQ ID NO: 47355 - DNA, 198 bp, Oryza sativa
  Clone ID: PAT_MRT4530_50131C.1
atggcgacggtggccctcggtagcgatggctccgtgcgcagcctcggcgatgtcagtcctcggtgcaagaggggtgctggcaggttccaggtgaaagccagcccatttgggctagaagcggcgacgcctttgggcgccgtaaccctcttgagggcaatgtcgataggcctccctcctctctttgatgagatcctctag

SEQ ID NO: 47356 - DNA, 222 bp, Oryza sativa
  Clone ID: PAT_MRT4530_50132C.1
atggagggtgagagcgtgcttggaagctttgctctgaatggtgtcttcgttgtcgttctcctcagctgggcaggcccctccttttatagagagaggctattcaatattgataacatgtcgtctccattggcgctcgcgcagcgcgcgcgcgtgtacgtcggcagcgtgcacccaggcatgcgacgccaaagactcagggggtacggccccggtctgggctag

SEQ ID NO: 47357 - DNA, 463 bp, Oryza sativa
  Clone ID: PAT_MRT4530_50133C.1
aacttatgtaaactttttcactctattattcagggctattaaatattacaaaatatcatcttcattgattgccaaaacatttttttcaaaaacacccaacctatcattccccatcaaaaaactaaactgagtctattgacaattaaatagctaaaaaggctcttttaaccttataagtccaacacaacaaaaacgccccctccaccaagtgttcaatactctcaaacaatcaaaaagctgtcacataatgaccctcaatgtcataaaagctataatttaagccagctttccccctccatgttggcgatcaaacatactatacacaaatgcatcataatgctttcaatcatcaggaacatactagatatcggtcctcttcaactccatcataaagaccaccaccaaatgacttgcatccacctaacccaacaaagatacagtcaccatacaaactcccaatctc

SEQ ID NO: 47358 - DNA, 2589 bp, Oryza sativa
  Clone ID: PAT_MRT4530_50134C.1
ctaaattttgtctcaaaactctatatgcccttgagtttttattttgatctcttctatccctattccgttagttatggaaacgactccgacatgctcgcgctgctcgagttcaaggatgccatcggcgacgatccggcgggcgtcctgagctcctggaacaaaaccacccctttctgccggtggaatggcgtgaaatgcggccgccgggagcatcgcgtcacggcgctcgagctcgccggccagaacttgaccggtcgactcgccgccgcttctctcgggaatctgagttaccttcacctgcttgacctttctggtaatcgcttctctgggcagatacctcgcctgaacagtctccgaaaattgcaagtcctcaacctgagtaacaatattttggacgggatcattccggacacgcttacaaactgttccagtttgacgcagctagatttgagcataaacttatttcaaggccagattcccctcggcataggactcctctctgagctgtcggatctcgtgctttctcgtaattatctctcggggcacattccttctgagctcgggaagttgtcgaaattgtcgtcgttggacctgagtgtaaatatcatatcaggtgaaattccacgcgccctttataatctctcttctcttcgaatgctattcttggagatgaattttctggggaaatcgttgccgtcaaacattggctatgcccttcctaatctccaatggctcttattgggtgttaacatgtttcaaggtaacataccaggatcccttggcaacatttcacagctacatttgatatatctgtcagagaacaatttctctgggcaaattcctagctctctcggtaagctttcgaacctgtctgtcaaccttcagtacctgcttttggacggaaacaatctatcaggacacataccgtccaacatgggaaatcttcaacaactcacacagctggaccttagttacaataatctaaaaggcaagatgccacccagcttgggaaatcttcagcggctagtgagctttaatctcagtaacaacaatcttcaaggtgatataccatccaagtttggagatcttcaacagctcgtatggctgaacctcggcaacaactacctccatggtgaagtaccatctagcgtggcaaatcttcaacagctcgtcctgttggacctcagtcacaataatctcagtggcaaagtacctcgcagcttgggaaaccttcctaagctcaggcagctggaccttagccacaataattttggtggcaaaataccatccagtctggcaaaccttcgtcaactcagtcgcttggaccttagttataacagtctcaaaggtttctatgcctcctcccttgggaacctcacgtttctcaaggcactcaacttctcttcaaaccatttctccggcaaattgcctccgctgaaccatctccacagactgaaagtcctggatcttaggcataactcactgcgtgatactattccagaggggcttgcaaactgttcgagactaagggtgttggatctctcctcgaattctcttgttggtgaaattcccaccaaattgggccttctaacgaacctctcgagcttatgtctttccaataattcattcacaggaaccatccctcccacccttggcaacattaccggcctaaactatctctctcttcaaataaaccatctcgagggaagcattccccgtgagcttgggaaattgtcagatttgttgtcattgaacatttttatgaacaacatatcaggccgacttccacatgaactgttcaatctgtcttctctacagactttatggttgagtgataacatgctagggaaagaagcactgccacccaacattggcgatgtgctccctaatctccaattcctttccttagcgaggaatatgtttgaaggtcatataccaacttcccttatcaacgcttcggggctatggttgatagacttgacaaacaacaatttctatggccaggttcctagttatctcagtgagcttgcaaatctgtccgatttgtatctagctcgtaatcaaataaaaggagatataccaagctcgattggtaacctatccaccaatctgcaatatctgaatttgggtgtaaaccattttgtaggagtggttccaccgagtatagggaaccttcatggcctaactagtttgtggctaagtaaaaacaatcttattggcacaatcgaagaatgggtaggaaaactgaggaatctagaacttctatatctccaggagaacaatttcaccgggtcaataccatcatccatcggtgatcttactaacttgatacaattttctttgggaaagaatagcttagatggtcaaataccagccaacttaggaaatcttcggcagctagatcgtctcaactttagttacaacaatcttcatggtagtataccgtacaatgtgggaaagcttcgaaacctcgttcaactagaccttagtcacaacaatcttgatggtaacataccatccagttttataaagcttcaaaagctcaagcatttagaccttagtgacaataatttccaaggtatcatacct

SEQ ID NO: 47359 - DNA, 528 bp, Oryza sativa
  Clone ID: PAT_MRT4530_50135C.1
atggtgtctagtaggtgtgcagtgggtgtagaggtggtgacagccctcaagatcactaaagtccttcctgtccggtctagtcccaaccttgccatacccgattttgcattactgcaacatttccatacgggtttggataaggagtctgcactttacctcaacataactgctggaggtcattcatgcacaaaacccccgtcgaaggaaaggaaattctcgatagaatatccaaaaataccttcgggcagtgatttgaaccccctccagaggcatctgtgtcagcaagatgtctctatggctgagcttgtgaccataaacaaagcactgccaggagttaccccggattatcatggcaagtttttttttccaatgaaggcaaggaccagttttagaatagttgagattaagaacgagggtcatacgatgcctaagaatgcaagagctacatcaaccgagcacgttggtgatccttggcgatgcaacacaagagaccccaacatctcacacttggtttttgacgtcttatga

SEQ ID NO: 47360 - DNA, 223 bp, Oryza sativa
  Clone ID: PAT_MRT4530_50136C.1
gatcaatgctggtgacaaagtttagagatggctcacaggaaagcttatttggggagcactttgcagggcacagaagtgacaggcaaagtgctcggaagagtgccttgggatgtggttggaagagaagcctggaaggatttttaacctgagcttaagcccatggtgtggcatgcaagaaaatgaaggttgatggctgcaccatgtggaaaaagactggctggca

SEQ ID NO: 47361 - DNA, 303 bp, Oryza sativa
  Clone ID: PAT_MRT4530_50137C.1
atgccaacaagaaagctattgatccagttagtaacagcttattgtgttgtcatcaagctgaaaaattttcatgtaagaggtttcaggttacaggcttacttccagttggtgaagggcgagaaggcactcgctgaggaacttgacggtgagcgtgatgagaaccgggacggagtccccggcgggtatcatgaggtcgatcatggtgtcggagatgagctcgtcggtgagctcatcgctggtgtctctgaagagaacgtcgatggcgtcccgtggtggccctccttgccctcttgtcccagatga

SEQ ID NO: 47362 - DNA, 1569 bp, Oryza sativa
  Clone ID: PAT_MRT4530_50138C.1
atggagccacaatatatctttcaactatctgctccacggggcaaattttacgagccacctccttcatcggagcctatttaacacctggctatgaaattcgtcccgaattcatcattacggttagggagaaatctttctctagtctagaccaggaaatctcctatcatcacctgcgagagtttgagcatctgtgttcgtgcctcttgatccaaggcatgccacgggagactattaaatggaaattgtttccgttctctcttcaagagagagcaaaacaatggtacatttacaccgttgggagtgtgagtggtagctggaatgaattgcgagacagattttgtgcctcacattctttcctgttagtcgtattactttcctccggatcgaagtcctcagctttcggtagaataataagaaatcaataggtgcagcttgggccagatttgttactctggtacagtctagtcccaaccttgccatacccgattttgcattactgcaacatttccatacgggtttggataaggagtctgcactttacctcaacataactgctggaggtcattcatgcacaaaacccccgtcgaaggaaaggaaattctcgatagaatatccaaaaataccttcgggcagtgatttgaaccccctccagaggcatctgtgtcaggtacggaggaacctgaaccgtcaacatcatcagatctaactgaggaatcctcccgggaactatctccagatattgaagaaattcatgatccgggatgtgctcccaaattcagggacgatcttctcgaatattacggccacctattctctagccaactctcgatccaactgctcaaatcatcttctaaacaagacgctctggattttatccaagaaaaagaagagtcggttgagatctttgaattacattccataaaaccaccatcatgacctccaatcgagccaaaaccttatctctctggccctcaatatgttgttcttgacagttgtcaagaaacaacctcgttcttgcacgatgcatctcttgagaaggagaacctttgggttatggataagcttgagacatcaactctggaggatgagaacggcactttgagcatgaaagcttctctttcaaaattccccaagattcatgctcacataaggaatccccagggtcctattagtttagtatcgctttcttgtgcgaggaccacaaccgccttttggccatcatttctaacatgattagaagtgtggttgtggatgcttatatttatcataactattgcaaatctcgtatgtgtttgtggcactaactttgcagcaagatgtctctatggctgagcttgtgaccataaacaaagcactgccaggagttaccccggattatcatggcaagtttttttttccaatgaaggcaaggaccagttttagaatatacaagcttttcatgacgagttccgtcaaccgaggtgagttctcatgcacgagagtaaataaaaagacaactaaggagcagtgtaaaataactacaacactcataccacgctccttggcgttatagtttatgaaaccagatga

SEQ ID NO: 47363 - DNA, 3041 bp, Oryza sativa
  Clone ID: PAT_MRT4530_50139C.1
atggccggcggcgccatgaccgacaccgatggcgctcacaagaactacccggggaagatgaccatcttcgtcttcctcgcctgcctcgtcgcctcctccggcggcctcatcttcggctacgacatcggcatctccggcggcgtgacgtcgatggactcgttcctgatcaagttcttcccgtcggtgtacgccaaggagaaggagatggtggagacgaaccagtactgcaagttcgacagcgagctgctcaccctcttcacctcgtcgctctacctcgccgcgctcatcgcctcgctcttcgcttccgtcatcacccgcaagttcggccgcaggatcaccatgctcggcggcggcgtcatcttcctcgtcggcgccatcctcaacggagccgccgccgacgtcgccatgctcatcatcggccgcatcctcctcggcatcggcgtcggcttcagcaaccaggctgtgccactgtacctgtcggagatggcgccggcgaggatgcggggcatgctgaacatcagcttccagctcatgatcaccgtcggcatcctcgccgccaacctcatcaactacttcaccgacaagatcgccggagggtgggggtggcgcgtcagcctcggcctcgccgccgtcccggccgtcatcatggccggcggctccctcttcctccccgacacccccaactcgctcctctcccgcggcaaggagaacgaggcgcgcgccatgctccgccgcatccgtggcaccgacgacgtcggcccggagtacgacgacctcgtcgccgccagcgaggcgtccaaggccatcgagaacccgtggcgcacgctcctcgagcgccggtacaggccgcagctggtgatgtcggtgctgatcccgacgctgcagcagctcaccggcatcaacgtcgtcatgttctacgcgccggtcctcttcaagaccatcggattcggcggcacggcctcgctcatgtccgccgtcatcaccggcctcgtcaacatgttcgccaccttcgtctccatcgccaccgtcgaccgcctcggccgccgcaagctcctccttcagggcggcgtccaaatgatctttgcgcagttcattcttgggacgctgatcgccgtcaagttcgggacggcgggcgtggcgaacatctcgcggggttacgccatcgtggtggtgctgtgcatctgcgtgttcgtgtcggcgttcgcgtggtcgtggggacccctcgggtggctggttcccagcgagatcttcccgctggagatcaggtcggcggcgcagagcgtggtggtggtgttcaacatggccttcaccttcatcatcgcgcagatcttcctgatgatgctgtgccacctcaagttcggcctcttctacttcttcggcgccatggagctcatcatgacggggttcgtcttcttcttcctgccggagacgaaggggattcccatcgaggagatggacaggatctggggtaagcactggtactggagacggttcgtcggcgctcgcgccggcggcgaggccatctgcatgacccggttgcggccggcgccgacgaagcggctccagtaccagtgctccccccagatcctgtccatctcctcgatggggatccccttggtctccggcaggaagaccaagacgaaccccgtcatgatcagctccatggcgccgaagaagaagaagagcccgaacttgaggcggcacagcatcatcaggaagatctgcgcgatgaagaaggtgaacgccatgttgaacaccaccaccacgctctgcgccgccgacctgatctccagcgggaagatctcgctgggaaccagccaccccaggggcccccacgaccacgcgaacgccgacacgaacaggcagatgaacagcaccaccacgatggcgtaaccctgcgagatgttcgccacgcccgccgtcccgaacttgacggcgatcagtgtcccaagaataaactgcgctatgatcatttggatgccgccctggatgaagagcacgcggcggccgaatcggtcgacggtggcgatggagacgaaggtggcgaacatgttgacgaggccggtgatgacggcggacatgagcgaggccgtgccgccgaatccgatggtcttgaacagcacgggcgcgtagaacatgacgacgttgatgccggtgagctgctgcagcgtcgggatcagcaccgacatcaccagctgcggcctgtaccggcgctcgaggagcgtgcgccacgggttctcgatggccttggtggcctcgctggcggcgacgaggtcgtcgtactccgggccgatgtcctcggtgccacggatgcggcggagcatggtgcgtgcctcgttctccttgccgcgggacaggagcgagttgggggtgtcggggaggaggatggagccgacggtcatgatgacggccgggacggcggcgaggccgaggctgacgcgccatccccagccgccggcgatcttgtcggtgaagtagttgatgaggttggcgaagaggatgccgacggtgatcatgagctggaagatgatgttcagcatgcccctcatcttcgccggcgccatctccgacaggtacagcggcacagcctggatgctgaagccgacgccgatgccgagcaagatgcggccaatgatgagcatggcgacgttgacggcggctccgttgaggacggcgccgatgaggaagatgaagccgccgccgagcatggtcatcttgcggcctaacttgcgggtgatgacggaggcgaagagggaagcgatgagcgcggcgaggtagagcgacgaggtgaagagcgtgagcggctcgctgtcgaacttgcagtactggttcgtgtccaccacctccttctccttggcgtacaccgacgggaagaaccgcgacaggaacgggtccatcgacgtcacgccaccggagatgccgatgtcgtagccgaagatgaggccgccggaggaggcgacgaggcaggcgatgaagacgaagacggtcatcttgcccgggtagtgcttgggcgcgccatcgccggcgccggcgttctccat

SEQ ID NO: 47364 - DNA, 1350 bp, Oryza sativa
  Clone ID: PAT_MRT4530_5013C.1
atgggagtcccggcgttctaccggtggctggcggaccggtacccgcagacggtgtcggacgcggtggaggaggagcccgtggagctcgagcccggcgccttcgtccccgtcgacctccgccgccccaaccccaacggcctcgagttcgacaacctctacctcgacatgaacggcatcatccacccctgcttccaccccgagggccgcccggctccgaccacctacgacgaggtgttcaagtcgatttttgcctacattgaccacctcttcggcctcgtccgcccgaggaagctcatctacatggccatcgatggcgtcgcgccaagggcgaagatgaatcagcagaggtctagacgtttccgggctgctaaggatgcggctgacgcggcagctgaggaggaaaggttgaggaaggaatttgaggctgaaggcaggactttggttgcgaaggagaagtcggaagcgattgactcaaatgtcataactcctgggacaccattcatgtttgtactctcttcggcgcttcaatactacatacagctgagattgaaccacacacctgggtggcaatctgtcaaggtaatgctttctgattcgaacgtccctggggagggagaacacaagattatgtcatacatccgcctgcagcgcaatctcccaggatttgacccaaatacacgccattgtttatatggccttgatgctgatttgatcatgctttctctggctactcatgaggtccacttctccattttaagagaggtgattaccatgccagggcaacatgaaaaatgctttctctgtggtcaagttggtcacttggctgctgaatgcagaggatctggtcaggctgataagaccgtggagctccctcctatccataagaagaagtatcagtttcttaacatctgggttctgcgtgaatacctggagaaggatttggaaattgttgatccccccttcaagataaactttgagcgtgttgtggatgattttgttttcatgtgtttctttgttgggaatgactttctgcctcacatgccaactttggagatccgcgagggtgccattaatcttctcatgaatatatatagaagggagttcacatcaatgggtggttacctcaccgatgggggtgaggttttgttggatcgagtggagcatttcattcaatctgttgctgtccatgaagagcaaattttccagaagcgtgcacgcattcagaaggctatccagaacaatgaggagaggaatagagtgcagacagagaactctgaggataatcaatatgtggacaagagcatgatctactgtcctactgtcactgtcaagtattacaaaaacgactag

SEQ ID NO: 47365 - DNA, 1029 bp, Oryza sativa
  Clone ID: PAT_MRT4530_50140C.1
atggcgtcgccggcgaacttagcgtgttggggttctcttcctgctgctttggccacctgggaggatgctgacgttgttcgcaccagatttccggacgctgtcccttggggacaagctccaattccagggggggcaactgttatgcctatgccggatgagctactggcaacgaccgaaggaggtgtcttgcagagcaacgagtcctccgcgaaggtcgatgagccggtagctacagagaacagtgacgctgctcctgctgaggcatctgtagatgctgtgaacggcaagattcctcctaccaagttgattccccaacatcctctggaaggtgttacattgacagaaagaactgtacgtattactgggaataagaagcagatagaagcggcaaaagatattattaagcaagctatgagtcaggttttggtagaagcaaatggtgtaacacggacattggttttgaataggccaaagcagttgaatgccctctcctctgcaatgataacgtgttttttgaggtgcttcactgcttatgaggaagatgatggagttaaactattgattgtgaagggaaaaggaagagcattttgtgcaggtggagatgttgctgcagttgtccggtctataaataatgatagctggaaatatggtgctcattttttccgaaatgaatttctgttaaactatatcattgcaacatatagcaaacctcaggtttcgcttctaactggaattgtcatgggtggaggtgctggtgtttctatacatggaaggttccgagttgtcacagatagcacggtttttgctatgccagaaacagcgttgggtctctttccagatattggggcttcatattttctatctcgacttcttgggttctatgggaaaatccaacctcaaatcttgcaaattttggatcactggatgtgcttcacgattcgtgctcttctccaactccagcgaccacctcttcttctccggcgccagcgccggcggaacccaaactccggcagagggccgacgaattag

SEQ ID NO: 47366 - DNA, 1550 bp, Oryza sativa
  Clone ID: PAT_MRT4530_50141C.1
gcaaaactcaactggggtctgagccttggtcctctaactccatcttcagctcagaagcactacacttctgaaaagggggaataatagcaaggctgagtacaaccaccgtactcagcaagccacaccaacgatgcagacgtgcaaagggaacacaaggacggtttcacccccacccctcaaaaggcagtgggcggtcccctcttgcgccgcggtgaatccggcagctggacaaccggacaccccggccgacccaactccatcacgcccaccctcgccaccggtgcctaggaaagggtcgagctatacttcagatcaagcagttacccattcccgcttgtggcaagcgctaaaaggactgccgctgacgtcagcaaagggccggcgccgacaggcgggccccacacgtcagcgagtcaaagggggagggcgctggtacacgggcccactcggcagcggctcaagggggggcacggctggcaagcgggccccacggctccggctccacgagccgatgtaccggccaggcccggcatcaagccggccgggcggccatggcaaggcggcggcgcgggcatgcgaccgccagcgacggcgagcgcgcgaagagggcggcggcgcacggggaaaaaaaaaagaagggaaggaaggggagggagacctcaccggaggggcggcaatggccggcggagaaaaacgagggaggcggcgaagaccggcgatgccgaggtgcggacgagcgacggcgacacctagggaaagagaggagaggaattagggcggaggaaaacccccacggcgaccatccacgccggccggagtcggaggggagagagaactcaccgacgacgcgagggaaatggggtttcggtggtattccggcgacgcagagcagcggccgggaagggtcttgcggcggcgaagctagtggtggcggtggcttagtgcggcggcggctctagcgacggcggcacacggccggagtgcggcgacgggcggcggcgtaagtggcggcggtgcgagctcggtagggggcacgggatggagcggtgagagcggaaaacgagagaggagggcatggggagcattttataggcggagggggaggcggacgtggccgggaggcgctccgatttcgccggcgacgtgggggaggagagagagaaggtgggggggagattcaaaatcgaatcccgcccctctcgtgcgctggcgcggccgggagacgcggggagagggcggcgacgtggcgtgggcgcggcgaaagcggaggaagtgggtgcggcggcggtttcggcgcggcggcgcaccgggatcggcgggaggtgggggaaggacccgacaggtggggcctcgggggaaaggagagaggaggagacggttggggggagacgatgacaggtggggcctcgggtccacctgtcggcgaggggaggagggaggaggctgggggttatgtggacttggaggagggggagctaagaaaatcgagtgagagataagaaaaaatctttcgagtgagatatagcaaaatcgatagcaaaatcgtaata

SEQ ID NO: 47367 - DNA, 1410 bp, Oryza sativa
  Clone ID: PAT_MRT4530_50142C.1
atgactactgctccagttcttgtgcttcctgattttaccaagcccttcactattgaaactgatgcttgttcttcaggcattggtgctgttctctgtcaagagggccatccagtggctttttacagtaaagcattgggagttaataatcagaaattatctatttatgaaaaagagttcttgactatcatgatggctgtggataagtggagaccatatttgttgggggccgttttgttatcaaaactgacatcagtcctgtgtcatttggatgatctgattttgggttctgagttgcaaaggaaggctatgaccaaattgattgtagttcagcctgtgtgggtgcaggaagtggttaactcctatgtggtggattcccaggctcaatccttgctcactgaattagctgttgcctcttctaatgcccagggttattccttgtctcatggtttgatcaggaagaagggcaggatttggctgggcactaattctgctttacacactaagatcatttctgccatccatgactcagctattgggggccattttggcattcaggccacatatcagagagtaaagaaattatttgtttggagggatctgaagcagtcagtggaagaatttgttcagcaatgcactgtttgtcagaaggccaaacatgaacattgctcttatcctaggttattacaacctttaccaattccttcaggggtttggcaggatatctctatggattttattgagagtcttcctgtgtctaaagccatatgctcagcgctggcattcatgtattttgggtcctttgaaatcttgcaggcaattggctcggtggcttacaaactgaagttacctgatgatagtctcattcatccggtgttccatgtgtcccagttaaagcaatttgttcctgacaacaaaccgatgtgctctcagttgcccacggctgctcaactggatattgccgatttcatcccttctgaagttttggatcggcgaatggtgaagaagcgcaatgctgccgtggtccagaacttagcgtgttggggttctcttcctgctgctttggccacctgggaggatgctgacgttgttcgcaccagatttctggacgctgtcccttggggacaagctccaattccagggggcaactgtgtcgcccaggccggcgagtcctccgcgaaggtcgatgagccggtagctacagagaacagtgacgctgctcctgctgaggcatctgtagatgctgtgaacggcaagattcctcctaccaaggttacttcttatgctggaaaggccgatgcctacatcaacttaggcttgatcgtggtcataaatgttcatgtagttgattccccaacatcctctggaaggtgttacattgacagaaagaactgtacgtattactgggaataa

SEQ ID NO: 47368 - DNA, 6027 bp, Oryza sativa
  Clone ID: PAT_MRT4530_50143C.1
atgggttccatctccggcatcgacgacctcgttttccctcccgggcagacgtttcggttcgacagcctcgacttcatcaccaacaacttcggcaagatttctctcctcgactcggaatcagaccggtcgggagagaaccggatttcggtcccgtttggattcccgaacgcggctgaaagctacttcaagaccatcttaaccgagtcggcttcaaaccactcggccgagatcgcatcttcttcaacgacaccagatcaagatgatggggcttacccaccagtcctgatgaagctccccgacgatttagcggccgtcttcaccacgacagcgtcttcatcccgtaggcctaggcggaagtcggcttcaacgccgatttcgcctagcttcagggaagtcggcgtcatcctccaaccactcggcacggtttcgacggatcagctggatgactacaacagctctcccaccgtcgactcacgtcctactgacatcgtggagtacgacgaatttagttctcgctacaacgacttcgacgacttcgacgacttcgacggaagcctagatgacaactacacccctctctactttggcgttttcatggccaataatgagacggaggagcaacgccaagcccgggagaccgaagaacgtcaccgactggaggaagagcatcaaccacaagaacaagaacggctacggcgtgagcagcaggaccgtgagcggaccgcgaaggaggctgaggatcgacgtcagcgagctttggaagctgggcgccgagcgcgtgatctcatcggccaacaggatgtcgaagggacaccggttttccgcacccctcaacagaatgccgttgccgcgatcacccttctcgacaccctcctcaaccaaaacgagctcaatcaatccgaccacgtcgtcaacatcttgaaccagacgaagaccatgattgcggcttcggtcccagttaactccgaaagcgtccacacgccgactggcagccgagtcccccacttccgatctcatgactaccgtcatccaagcctcagcatcaccggcgcaggatccaaccgcaggagcaggggacacgacgagcggtctgttcactcacctcccgaccttcataaggagcgccgagtggaacggcctcgctcaccacctcgtcgccgccccgtcgatcttcgcgacacaatcatacagcgccgagcagctcgaggctatcatcattcgccgaaccgccacgacgacgaccttgacgaagtagcagccttcaccgacgatctgcgtcgagtggattggccagccggcttcaaaccgactggaatagagaagtatgacggcaccactaaccctggatcgtggcttaccgtctacggtctcgcaatccgcgcagcaggaggtgacaacaaggccatggcgaactatttaccagtggctttagcggattccgcccgatcttggctccatggattgccccgtggtacaattggatcttgggccgaactacgcgaccacttcatcgccaacttccaaggcaccttcgagcgtcccggcacacaatatgatctctacaacgtcattcagaagtccggagaatcccttcgagattacatccggcgattttctgaacaacgtaacaagatctccgacatcaccgacgacgttatcatcgccgcgttcaccaaagggattcgccacgaagaactagttggcaagtttgggcgtaagcctcccaggacagtcaagctcatgtttgaaaaagccaacgagtacgccaaagctgaagacgccgtcaccgcatcaaagcagtcgggtcccagttggaagcaaaacaagggtacgccggctacgggaggaggtggaagtaacaatcataaggaccgcaagcgtaagcctgcggaacttgttgcaaccgccagtcactcttctcgacagcgttcgcgcgtcaacacgttcgacaagatcatgaactcccaatgcccgcaccatcctaactccaaccacgtggccaaagattgtttcgtctacaagcaattcgcggatcaatacaccaagactgcacggaagaactctgacgaagaacaaagcacgtcaaggaagaaggacgatggcgacgccccggcaggatttcaagatcaccgcaaggagctcaaccatatcttcggcggccccctggcttatgagtctaaacggaagcagaagttgactgaacgggagatcaatgctgttcagcccgacacgccccagtatcttcgatggtcagagattgcaatcaagtttgaccgctcggatcatcctgaccgagtggtccacccggggcggtaccccctggtactagacccagtggtccgtaatgtcaagcttcgcagaaccctcattgatggtggcagtgcactcaatatcctcttcgccaagaccctggatgatatgcagatccctcgctccgagttaaaaccaagcaatgcgccttttcacggagtgattccaggattatccgcaactccactcggccagatcaccctcccggtcacttttggtactcgggaaaactttcgcacagagaatatcagcttcgaagtcgccgatttcgagacagcataccatgccatactcggacgcccggcgttagccaagttcatggccgtcccgcactacacttacatgatgatgaagatgcctggtccccgaggagtcctatccctacggagtgacatcaagcaagccgtcacatgcgacaaggagagttgcgacatggctcacactcacgagatggcgtctgcccgagaggatatccgactggctgcagccacggcgagcgaaggagaaataccagttaccaagacttcaaaaagtggagaaagcgaagccaagactaagaagattcccctagatccctctgatcctactaaaactgctgaaagcgcgctcatcacctttcttcagaacaataaagatatctttgcgtggaaaccatctgatatgcccggtattcctagagaggtgattgagcactccttacatgtcaaagaagacgccaagcctatcaaacaacgactccgccgatttgcacaagacaggaaagacgcgatcaaggaggaattgaccaagctgttagcagcaggcttcatcaaagaagtccttcatcccgactggctggcaaacccagttctagttcggaagaaaacagggcaatggcgcatgtgtgttgattatactgacctcaacaaatcctgccctaaagatccttttgggttgcctcgcattgaccaggtagtcgactcgaccgccggctgtgagcttctcagttttttggattgctactcggggtatcatcagatccgactgaaggaatccgactgtttgaagacttcattcatcacgccttttggggcatactgctacgtcaccatgccgttcggactaaaaaacgcaggagcaacttatcaacgtatgatccaaagatgcttctcaacgcagatcggccgcaacgttgaagcctatgtggatgatgtagtcgtcaagaccaagcaaaaggatgatttgatctcggatctagaagaaaccttcgtgagcatccgtgctttcaggatgaaattgaaccctgaaaaatgcaccttcggagtaccgtcagggaagctgcttggctttatggtgtctcataggggcatccaagccaacccggagaaagttactgctatcctcaacatgaaaccgccaagtacccagaaagatgttcagaagctgactggatgcatggcggcgctcagccgatttgtttcgcgacttggcgagcgggggatgcccttctttaagctgctgaagaaaacagataacttccagtggggacccgaagcacagaaggccttcgaagatttcaagaaacttctcaccgagccaccagtcttagcctcaccacacccgcaggagccgttgttgctgtacgtatcagccacctcccaggttgtgagcacagtcttggccgtcgagcgcgaggaagaaggccatgtccagaaagtccagcgaccgatttattttgtcagcgaggtcctagccgactccaaaacgaggtaccctcaggttcagaagctgttatatggtcactcggtaacggtggtcacatcatttccactcggtgatatactgcacaaccgcgaagcaaacggacgtattgctaagtgggctttggagttgatgtctttggacatatcattcaagccccgaatttcaatcaagtcccaagcgttagctgattttgtcgccgaatggaccgagtgccaggaggatacccccgcggagaacatggagcactggaccatgcattttgacggatcaaaacgactttcgggcactggagcaggagtggttttgatttccccaactggagaaagattaagctatgtgctttggatacatttttcggcgtcccacaacgtcgccgagtatgaggccctccttcatggactgcggattgcaatttccctagggataaagcgtctaatagttcgaggtgattcacagctggttgtcaaccaagtcatgaaagagtggtcctgccttgacgacaacatgatggcatatcgacaagaggtacgcaaattggaagataagttcgatggactcgagctcagtcatgttcttcgacataataatgaagccgccgatagacttgccaactttggatccaagcgcgaggtggcgccctctgatgttttcgttgaacacctttatacgccgacagtacctcacaaagataccactcaagttgcgggcactcatgacgtcgctgtggttgaaaccgactggcgagaacccctcatacgatttttgacttctcaagaactccctcaagacaaagatgaagccgagcggatttcaaggcggagcaaactttatgttatgcatgaagctgagttatacaagaaaagcccttcaggaattctgcaacgctgcgtatctttagaggaagggagacaattgctgaaagacatacattctgggatatgcggaaaccatgctgctgcacgcaccattgtcggcaaagcttaccggcagggtttcttttggcctactgcagtgtccgacgccgacaaaattgtgcgcacgtgcgaaggttgccaatttttcgccagacaaattcacttaccagctcaagagttgcaaactatcccgctgtcttggccgtttgcggtttgggggctcgacatggttggcccgttcaaaaaggcagtcggcggttacacgcatctctttgtggccattgacaagttttccaagtggattgaagctaaaccggttgtcacaatcacagcagataatgctcgagacttcttcatcaacattgtgcatagatttggagtgcccaatcggatcatcactgataatggcacacaattcactggcggggtttttaaagacttttgtgaggactttggaatcaagatttgctatgcctcagtggcacaccccatgagcaatggacaggtggagcgagctaatggcatgatacttcaagggattaaagcgcgtgtctttgaccgactaaaaccctatgccggcaaatgggtgcaacaactgccatcggtactttggtctttgcgaactacacccagtcgggccacaggccagtcaccttttttcctggtctatggggcagaagcaatgttgccgagtgaagtcgaatttgagtctttgcgctttcgaaatttccgtgaagaacgctacgaagaggaccgagtggatgacttgcaccgattggaagaagcccgcgaagcagctttgattcgatcggctcgatatttacaagggttgcggcgttatcataatcgcaatgttcgatcccgtgcctttttagtcggcgacctggttttacggaaaattcaaactacacgagatcggcacaagttatctcctctatgggaagggccatttattatctctgaagtcacccggccaggttcctatcgactcaagcgcgaagacggtactcttgtcgacaactcttggaacattgaacatcttcgtcgtttctacgcttaa

SEQ ID NO: 47369 - DNA, 213 bp, Oryza sativa
  Clone ID: PAT_MRT4530_50144C.1
aatactgggaagaaaaatcaccgtgtacgatccatgctagaccttggcgagtctactgaagcacgaggaggacttgccatggagatgacatatggcggcatgaaacagatgcctagctttcatggcataatcttctgtactataagaaaaccatcacaatgattctgctctagtgtggccaccgacctgtctcaatcgcttctctaatcaaac

SEQ ID NO: 47370 - DNA, 1318 bp, Oryza sativa
  Clone ID: PAT_MRT4530_50145C.1
ccggccggggcgctctctctctctctctctcctactgtaggccaccaccaccgcgaccgcacgagtcaacctcacggcagccaagcgtttggttggggggatcggagcggcggcggcggcgatgcagtcgctgcaggacaaggcgtcggagtggagcggcgtggcggcgggggatgcgttcgccatcgacgatgggaacgtcttcgaggcgctgggcggcaccacgcagccgttcgtcgacctctccaccaacttctacaccagggtttatgaggacgaggaggagtggttccggcagatcttcgcggggtcgaagaaggaggacgcgatccggaaccagtacgagttcttggtgcagcgcatgggcggcccgcagctcttctcccagaggagaggacatcctgccctgatagcacggcatcgaccattccctgttacccaccaggctgcagagcgatggctgcaccatatgcagcaagctgtggatactactgacagcatagacgctgccacaaaaaccaaaatgatgtattttttcaggcacactgcatacttccttgttgccggaaatgagatgacaaggcaaggccatggaacttcctgcaagtgcaaacatggagaaagcaaaccagcagaataacgatcgattcatgcctctggccagtaaggcatctggataataaacgattcgagcctttagcagcctatcctggtgttatagaaaaaaaaaaccatggacgatggaattcagaccatctattcattcacaaaaacagttgagctaactgttgtaggcttacagccactctcgaacacggagcaacccaaaattgatagaacctgcctctggaggaagttgcaaacttgcaatagttatatcatactctctatattgaacaacggatgtgttattttgcgtctggctataggctatagcatgtgtctacagacaggggggagagagcaaggtcctctgtttgaagagtttctagcaattgaagagaaactttagctccttcaaacagtacatatcattatttagattcttaataattatggaatctagaaaataaactaggaaccaacatctttagatctcagaagcttaaatttctttagagaccaatcagttacttctccgaaccttaaatttcttcaaataaggtctgagaagggaagccttggctgaagtttctcttatataaccgcactatcgttggtcccaccctcttgtagagttgtaggcttgcacattagtgcctgactgcctgtaatagcacttattatgatataggatgtgaacaacaatcattatcac

SEQ ID NO: 47371 - DNA, 343 bp, Oryza sativa
  Clone ID: PAT_MRT4530_50146C.1
ggggaacctttttagggaaatttcaaaattacgggtaggcccaggggaacaaacccttaagcataccgttacaaatggcacttcccacctttttaaaaagggtcatttgaacccacaacttggtggtcccggtcccataagactaaaaagggggccttttttttttttttaaaaattttaaaaaaaaaaacttggcgggttaaaaaaaagcccggaaagccggattgttatttttaaaggacaagcgggggggaatttttaaattacttttgaaaaaaggatctgggactgttttgagcccctggggattaccttaaaagaagggcaagagtcccgcaaaagc

SEQ ID NO: 47372 - DNA, 5736 bp, Oryza sativa
  Clone ID: PAT_MRT4530_50147C.1
atgggttccgtctccggcatcgacgacctcgtcttcccacccgggcagacgtttcggttcggcagcctcgacttcgtcaccaacaacttcggcaagatctctatccttgactcggagtcagaccagtcgggagagaaccggatttcagtcccgtttggactcccaaacgcggctgaaagttacttcaagaccatctcaatcgagttggcttcaaaccactcaggcgagatcgcatcttctccaacaacaccggatcaagatgatggggcttacccaccaatcctgatgaagctccccgacgatttagcggccgtctccatcacgacagcgtctccatcccgtaggcctaggcggaagtcggcttcaacaccgatttcgcctagcttcagggaagtcggcgtcatcctccaaccactcggcacggtttcgacggatcagctggatggctactacagctctcccaccgtcgactcgcgtcccaccgacatcgtggagtacgacgagtttagctctcgctacaacgacccggatctcgacgacttcgacggaagcctagatgacaactacacccctctctacttcggcgtcttcatggccgataacgagacggaggagcaacgccaagcccgggaaaccgaagcacgtcgcgagactgagcgtcgccgactggaggaggagcgtcaagcacaagaacaagaacggctacggcgtgagcagcaggagcgtgagcggaccgcgaaggaggctgaggatcgacggcagcgagccttggaagcagggcgccgagcgcgtgatttcatcggccaacaagatgttgaagggacaccggttttccgcacccctcaacagaatgcggttgccgcgatcaccctcctcgacaccctccttaaggaaaacgagctcaatcgatctgatcacgtcgtcaacatcttgaaccagacgaagaccatgattgcggcttcggtcccagttaactccgaaagcgtctgcacgccgactggcagccgagtccctcacttccgatctcatgactaccgtcatccaagcctcagcatcaccggcgcaggatccaatcgcaggagcaggggacacgacgagcgcttcaagccgactggaatagagaagtatgacggtaccactaacccagaatcgtggcttaccgtctacggtctcgcaatctgcgcagcaggaggagacagcaaggccatggcgaactatttaccagtggctttagcagattccgcccgatcttggctccatggattgccccgtggtacaattggatcttgggccgaattacgcgatcacttcatcgccaacttccaaggcaccttcgagcgtcccggcacacaattcgacctctacaacgttattcagaagtccggagaatcccttcgagattacatccggcgattttctaaacaacgtaacaaaatctccgacatcaccgacgacgttatcatcgccgcattcaccaaagggattcgccacgaacaattggtcggcaagttcgggcgtaagcctcccaggacagtcaagcttatgtttgaaaaagccaacgagtacgccaaagctgaagacgccgtcaccgcatcaaagcagtcgggtcccagttggaagccaaacaagggtacgccggctacgggaggaggtggaagtaacaatcataaggaccgcaagcgtaagcctgaggaacttgttgcaaccgccactcactcttctcgacagcgttcgcgcgtcaacacgttcgacaagatcatgaactcccaatgcccgcaccatcctaactccaaccacgtggccaaagattgtttcgtctacaagcagtttgcggagcaatacaccaagactacacggaagaactccgacgaagaacaaagcacgtcgaggaagaaggacgacggcgacaccccggcaggatttcaagaccaccgcaaggagctcaaccatatcttcggcggccccctggcttatgagtctaaaaggaaacaaaagttgaccgagcgggagatcaatgctgttcagcccgacacgccccagtatcttcgatggtcagagattgcaatcaagtttgaccgctcggatcatcctgaccgagtggtccacccggggcggtaccccctggtactagacccagtggtccgtaatgtcaagcttcgcagaaccctcatcgacggtggcagtgcacttaatatcctcttcgccaagaccttggatgatatgcagattcctcgctccgagctaaaaccaagcaatgcgccttttcacggagtaattccaggattatccgcaactccactcggccagatcaccctcccggtcacttttggcactcgggaaaacttccgcacagagaatatcagctttgaagtcgccgatttcgagacagcataccatgccatactcggacgcccggcgttagccaagtttatggccgtcccgcactacacttacatgatgatgaagatgcctggtccccgaggagtcctatccctacggagcgacatcaagcaagccgtcacatgcgacaaggagagttgcgacatggcccaaacccgcgagatggcgtctgcccgagaggatatccgactggctgcagccacggcgagcgaaggagaagtgcctgctaccaagatttcaaaaagtggagaaagcgaagccaagactaaaaagattcccctagatccttctgattctactaaaactgctgtaataggcgccgagttagattacaggaaggatgcgatcaaggaggaattaaccaagctgttagcggcaggcttcatcaaagaagtccttcatcccgactggctagcaaacccggttctagttcggaagaaaacggggcaatggcgcatgtgtgttgattatactgacctcaacaaatcttgccctaaagatccttttgggttgcctcgcattgaccaggtagtcgactcgaccgccggctgtgagcttctcagttttttggattgctactcggggtatcatcagatccgactgaaggaatccgactgcttgaagacttcattcatcacgccctttggagcttactgctatgtcaccatgccgttcggactaaaaaacgcaggagcaacttatcaacgtatgatccagagatgcttctcaacgcagatcggccgcaacgttgaagcctatgtggatgatgtagtcgtcaagaccaagcaaaaggatgatttgatctcagatctagaagaaaccttcgcgagcatccgcgctttcaggatgaaattaaaccctgaaaagtgcaccttcggagtaccgtcagggaagctgcttggttttatggtgtctcatagaggcatccaagccaacccggagaaagttactgctatcctcaacatgaaaccgccaagtacccagaaagatgttcagaagctgactggatgcatggcggcgctcagccgatttgtttcaagacttggcgagcgggggatgcccttctttaagctactgaagaaaacagatgatttccagtggggacccgaagcacagaaggccttcgaagatttcaagaaactcctcaccgagccaccagtcttagcctcaccacacccgcaggagccgttgttgctatatgtatcagccacctcccaggttgtgagcacagtcttggtcgttgagcgcgaggaagaaggccatgtccagaaagtccagcgaccgatttactttgtcagcgaggtcctagccgactccaaaacgaggtaccctcaggttcagaagctattatatggtattctaattactaccaggaagctatctcactactttcaaggtcactcggtaacggtggtcacatcatttccactcggtgatatactgcacaaccgcgaagcaaacggacggattgccaagtgggctttggagttgatgtctttggacatatcattcaagccccgaatttcaatcaagtcccaagcgttagctgattttgtcgccgaatggaccgagtgccaggaggatacccccgcggagaaaatggagcactggaccatgcatttcgacggatcaaaacgactttcgggcactggagcaggagtggttttaatttccccaactggagaaagattaagctatgtgctttggatacatttttcggcgtcccacaacgtcgccgagtatgaggcgctccttcatggactgcggattgcaatctccctagggataaagcgtctaatagttcgaggcgattcacaactggtcgtcaaccaagttatgaaagagtggtcctgccttgacgacaacatgatggcatatcgacaagaggtacgcaaattggaagacaagttcgatggactcgagctcagtcacgttcttcgacacaacaatgaagccgccgacagacttgccaactttggatccaagcgcgaggtggcgccctccgatgttttcgtcgaacacctttatacgccgacaggacctcacaaagatactactcaagttgcgggcactcatgacgtagctatggttgaagccgactggcgagagcccctcatacgatttttaacttctcaagaactcccccaagacaaagatgaagccgagcggatttcaaggcggagcaaactttatgttatgcatgaagctgagttgtacaagaaaagcccttcagggattctgcaacgctgcgtatctttagaggaagggagacaattgctgaaagacatacattctgggatatgcggaaaccatgctgccgcacgcaccattgtcggcaaagcttaccggcagggttttttttggcctactgcagtgtccgacgccgacaaaattgtgcgcacgtgcgaaggttgccaatttttcgccagacaaattcatctaccagctcaagagttgcagaccatcccactgtcttggccgtttgcggtttgggggctcgacatggttggcccgtttaaaaaggcagtcggcggttacacgcacctctttgtggccattgacaaattctccaagtggattgaagctaaaccggttgtcacaatcacagcagataacgctcgagacttcttcatcaacattgtgcatagatttggagtgcccaatcggatcatcactgataatggcagacaattcactggcggagtttttaaagacttttgtgaagactttggaattaagatttgctatgcctcagtggcgcatcccatgagcaatggacaggtggagcgagccaatggcatgatacttcaagggattaaagcgcgtgtttttgaccggctaaaaccctatgccggcaaatgggtgaaacagctgccatcagtactttggtctttgcgaactacacccagtcgggccacaggccaatcaccttttttccttgtctatggggcagaagcaatgttgccgagtgaagtcgaattcgagtctttgcgctttcgaaatttccgcgaagaacgatacgaagaggaccgagtggatgacttgcaccgattggaagaagtccgcgaagcggctttgattcagtcggctcgatacttacaagggctgcgacgttatcataatcgcaatgttcgatcccgtgcctttctagtcggcgacctggttttaaggaaaattcaaactacacgagatcggcacaagttatctcctttatgggaagggccatttatcatctctgaagtcacccggccaggttcctatcgactcaagcgcgaagacggtacacttgtcgacaattcttggaacatcgaacatcttcgtcgtttctacgcttag

SEQ ID NO: 47373 - DNA, 5154 bp, Oryza sativa
  Clone ID: PAT_MRT4530_50148C.1
atgggttccgtctccggcatcgacgacctcgtcttccctcccgggcagacgtttcggttcggcagcctcgacttcgtcaccaacaacttcggcaagatctctctccttgactcggagtcgaaccagtcgggagagaaccggatctcagtcccgtttggattcccaaacgcggctgaaagttacttcaagaccatctcaatcgagtcggcttcaaaccactcggctgagatcgcatcttctccaacgtcaccagatcaagatgatggggcttacccactgatcctgatgaagctccccgacgatttggcggccgtctccatcacgacagcgtctccttcccgtaggcctaggcggaagtcggcttcaacaccgatttcgcctagcttcagggaagtcggcgtcatcctccaaccactcggcacggtttcgacggatcagctggatggctacaacagctctcccaccgtcgactcgcgtcccaccgacatcatggagtatgacgaatttagctctcgctacaacgacctggatctcgacgacttcgacggaagcctagatgacaactacacccctctctacttcggcgtcttcatggccggtaacgagacggaagagcaacgccaagcccgggaaaccgaagcacgtcgcgagactgagcgtcgccgactggaggaggagcatcaagcacaagaacaagaacggctacggcgtgagcagcaggagcgtgaacggaccgcgaaggaggctgaggatcgacggcagcgagctttggaagcagggcgccgagcgcgtgatctcattggccaacaagatgttgaagggacacctgttttccgcacccctcaacagaatgcggttgccgcgatcaccctcctcgacaccctcctcagggagaacgagctcaatcaatctgaccacgtcgtcaacatcttgaaccagacgaagaccatgattgcggcttcggtcccagttaactccgaaagcgtccacacgccgactggcagccgagtcccccacttccgatctcatgactaccgtcatccaagcctcagcattaccggtgcaggatccaatcgcaggagcaggggccacgatgagcggtctgttcactcacctcccgatcatcatagggagcgccgagtggaacggcctcgctcaccacctcgtcgccgccccgtcgatcttcgcgacacaatcatacagcgccgagcagctcgaggttatcatcattcgccggaccgccacgacgacgaccttgacggagtagcagccttcaccgacgacctgcgtcgagtggattggccagccggcttcaagccgactggaatagagaagtacgacggtaccactaacccagaatcgtggcttaccgtctacggtctcgcaatccgcgcagcaggaggagatagcaaggccatggcgaactatttaccagtggctttagcggattccgcccgatcttggctccatggattgccccgtggtacaattggatcttgggctgaattacgcgaccacttcatcgccaacttccaaggcaccttcgagcgtcccggcacacaatacgacctctacaacgttattcagaagtccggagaatcccttcgagattacatccggacagtcaagctcatgtttgaaaaagccaacgagtacgccaaagctgaagacgccgtcaccgcatcaaagcagtcgggtcccagttggaagccaaaaaaggatacgccggcttcgggaggaggtggaagtaacaatcataaggaccgcaagcgtaagctgcggaacttgttgcaaccgccacaattcgcggatcaatacaccaagactacatggaagaactccgacgaagaacaaagcacgtcgaggaagaaggacgacggcgacgccccggcaggatttcaagaccaccgcaaggagctcaaccatatcttcggcggccccctggcttatgagtctaaaaggaagcaaaagttgaccgaacgggagatcaacgctgttcagcccgacacgccccaatatcttcgatggtcagagatcgcaatcaagtttgaccgctcggatcatcctgaccgagtggtccacccggggcggtaccccctggtactagacccagtggtccgtaatgtcaagcttcgcagaaccctcatcgacggtggcagtgcactcaatatcctcttcgccaagaccttggatgatatgcagatccctcgctccgagctaaaaccaagcaatgcgccttttcacggagtaattccaggattgtccgcaactccactcggccagatcaccctcccggtcacttttggcactcgggaaaactttcgcacagagaatatcagctttgaagtcgccgatttcgagacagcataccatgccatactcgggcgcccggcgttagccaagttcatggccgtcccgcactacacttacatgatgatgaagatgcctggtccccgaggagtcctatccctacggagcgacatcaagcaagccgtcacatgtgacaaggagagttgcgacatggcccaaacccgcgagatggcgtctgcccgagaggatatccgactggctgcagccacggcgagcgaaggagaagtacccgctaccaagacttcaaaaagcggagaaagcgaagccaagactaagaagattcccctagatccctctgatcctactaaaactgctgtaataggcgccgaagaggtgattgagcactccttacatgtcaaagaagatgccaaacctatcaaacaacgactccgccgatttgcacaagacaggaaagacgcgatcaaggaggaattaaccaagctgttagcagcaggcttcatcaaagaagtccttcatcccgactggctggcaaacccggttctagttcggaagaaaacagggcaatggcgcatgtgtgttgattatactgacctcaacaaatcctgccctaaagatccttttgggttgcctcgcattgaccaggtagtcgactcgaccgccggctgtgatcttctcagttttttggattgctactcggggtatcatcagatccgactgaaggaatccgactgcttgaagacttcattcatcacgccctttggagcatattgctatgtcaccatgccgttcggactaaaaaatgcaggagcaacttatcaacgtatgatccagaggtgcttctcaacacagatcggccgcaacgttgaagcgtatgtggatgatgtagttgtcaagaccaagcaaaaggatgatttgatctcggatctagaagaaactttcgcgagcatccgcgctttcaggatgaaattaaaccctgaaaagtgcaccttcggagtaccgtcagggaagctgcttggttttatggtgtctcataggggcatccaagccaacccggagaaagttactgctatcctcaacatgaaaccgccaagtacccagaaagatgttcagaagttgactgggtgtatggcggcgctcagccgatttgtttcaagacttggcgagcgggggatgcccttctttaagctactgaagaaaacagatgatttccagtggggacccgaagcacagaaggccttcgaagatttcaagaaactcctcaccgagccaccggtcttagcctcaccacacccgcaggagccgttgttgctgtatgtagcagccacctcccaggttgtgagcacagtcttggtcgttgagcgcgaggaagaaggccatgtccagaaagtccagcgaccgatttattttgtcagcgaggtcctagccgactccaaaacgaggtaccctcaggttcagaagctgttatatggtattctaattactaccaggaagctatctcactactttcaaggtcactcggtaacggtggtcacatcatttccactcggtgatatactgcacaaccgcgaagcaaacggacggattgctaagtgggctttggagttgatgtctttggacatatcattcaagccccgaatttcaatcaagtcccaagcgttagctgattttgtcgccgaatggaccgagtgccaggaggatacccccgcggagaagatggagcactggaccatgcattttgacgggtcaaaaagactttcgggcactggagcaggagtggttatgaaagagtggtcccgcctcgacgacaatatgatggcatatcgacaagaggtacgcaaattggaagacaagttcgatggactcgagctcagtcacgttcttcgacacaataatgaagctgccgacagacttgccaactttggatccaagcgcgaggtggctccctctgatgttttcgtcgaacacctttatacgccgacagtacctcacaaagttactactcaagttgcgggcactcatgacgtagctatgattgaagccgactggcgagagcccctcatacgattcttgacttctcaagaactcccccaagacaaagatgaggccgagcggatttcaaggcgaagcaaactttatgttatgcatgaagctgagttatacaagagaagcccttcaggaattctgcagcgctgcgtatctttagaggaagggagacaattgctgaaagacatacattctgggatatgcggaaaccatgctgctgcacgcaccattgtcggcaaagcttaccggcagggttttttctggcctactgcagtgtccgacgccgacaaaatcgtgcgcacatgtgaaggttgccaatttttcgccagacaaattcatctacccgctcaagagttgcagaccatcccgctgtcttggccgtttgcggtttgggggctcgacatggttggcccgtttaaaaaggcagccggcggttacacgcatctctttgtggccattgataaattttccaagtggattgaagctaaacctgttgtcacaatcacagcagataatgctcgagacttcttcatcaacattgtgcatagatttggagtgcccaatcggatcatcactgataatggcacacaattcactggcggagtttttaaagacttttgtgaggactttggaattaagatttgctatgcctcagtggcacaccccatgagcaatggacaggtggagcgcgccaatggcatgatacttcaagggattaaagcgcgtgtttttgatcggctaaaaccctacgccggcaaatgggtgcaacagctgccatca

SEQ ID NO: 47374 - DNA, 6513 bp, Oryza sativa
  Clone ID: PAT_MRT4530_50149C.1
atggctaagcttgctgtgctgctcacattgctggctctggtcggttccgtgacatgccaaggctataccggcaatgctagcccacccacacccattacatacccaagcccgccaagcctgagcccgagcatgccgcctacttatcctccacctagctcgactcctccgagtccagcaccggtgagcccgagcccgccaacaacctatcctccaccaagcacaactcctccgaacccggctccaaccagcccaagcccgccggccccggggcttagagttggttattacagttcctcttgcccaaaagctgagcaaattgtgaaggacaccgtcaagaacgctgtgtacgccaaccgcggcatcggcgcagggctcgtccgcctcttctttcatgactgcttcgtcgagtttcgacagttggcgcgccaggtaggggtagcgtcaagcttttcgccgatcagtgcaatgggtcccatctccggcatcgacgacctcgtcttccctcccgggcagacgtttcggttcggcagcctcgacttcatcaccaacaacttcggcaagatttctctccttgactcggaatcggaccagtcgggagagaaccggctttcggtcccgtttggattcccgaacgcggctgaaagctacttccagaccatctcaaccgagtcggcttcaaaccactcggctgagatcgcatcttttccaacgataccagatcaagatgatggggcttacccaccggtcctgatgaagctccccgacgatttagcggccgtcttcaccacgacagcgccttcatcccgtaggcctaggcggaagtcggcttcaacaccgatttcgcctagcttcagggaagtcggcgtcatcctccaaccactcggcacggtttcgacagatcagctggatgactacaacagctctcccaccgtcgactcacgtcctactgacatcgtggagtacgatgagtttagctctcgctaccacgacccggatctcgacgacttcgacggaagcctagatgacaactacacccctctctactttggcgttttcatggccaataacgagacggaggagcaacgccaagcccgggagaccgaagagcgtcgccgactggaggaggagcaccaagcacaagaacaagaacggctacggcgcgagcagcaggaccgtgaacggatcgcgaaggaggctgaagatcgacgtcagcgagctttggaagcagggcgccgagcgcgtgatctcatcggccagcaagatgtcgaagggacaccggttttccgcacccctcaacagaatgcggttgccgcgatcacccttctcgacaccctcctcaaccaaaacgagctcaatcgatccgaccacgtcgtcaacatcctgaaccagacaaagaccatgattgcggcgacggtcccagttaactccgaaagcgtccacacgccgactggcagccgggtcccccacttccgatctcatgactaccgtcatccaagcctcagcatcaccggagcaggatccaatcgcaggagcaggggccacgacgagcggtctgttcactcgcctcccgaacttcatagggagcgccgagtggaacggcctcgctcaccacctcgtcgccgccccatcgatcttcgcgacacaatcacacagcgccgagcagctcgaggctaccatcactcgccggatcgccgcgacgacgaccttgacggagttgcagccttcaccgacgacctgcgtcgagtggattggccagccggcttcaaaccgactggaatagagaagtacgacggtaccactaatccagaatcgtggcttaccgtctacggtctcgcaatccgcgcagcaggaggagataacaaggccatggcgaactatttaccggtggctttagcagattccgcccgatcttggctccatggattgccccgtggtacaattggatcttgggccgaactacgcgaccacttcatcgccaacttccaaggcaccttcgagcgtcccggcacacaatatgatctttacaacgtcattcagaagtccggagaatctcttcgagattacattcagcgattttctgaacaacgtaacaagatctccgacatcaccgacgacgtcatcatcgccgcattcaccaaagggattcgccacgaagaattggtcggcaaattcgggcgcaaacctcccagaacagtcaagctcatgtttgaaaaagccaacgagtacgccaaagccgaagacgccgtcaccgcatcgaagcagtcgggtcccagttggaagccgaaaaatacgccggctacgggaggaggtggaagtaacaatcataaggaccgcaagcgtaagcctgaggaacttgttgcaaccgccgctcactcttctcgacagcgttcgcgcgtcaacaccttcgacaagatcatgaactcccaatgcccgcatcatccaaactccaaccacgtggccaaagagtgcttcatctacaaacagttcgcggagcagtacaccaagtctactcggaagaactccgacgaagaacaaagcacgtcaaggaagcaggatgacggcgacaccccggctggatttcaagaccaccgcaaggagcttaaccatatcttcggcggccccctggcttacgaatctaaacggaagcagaagttgactgaacgggagatcaatgctgttcaacctgacacgccccagtatcttcgatggtcagaaatcgcaatcaagtttgaccgctcggatcatcctgaccgagtggtccacccggggcggtaccccctggtactagacccagtggtccgtaatgtcaagcttcgcagaaccctcattgatggcggcagtgcactcaatatcctcttcgccaagactttggatgatatgcagatccctcgctccgagttaaaaccaagcaatgcgccttttcatggagtaattccaggattatccgcaactccactcggccagattactcttccggtcacttttggcactcgggaaaacttccgcacagagaatatcagctttgaagttgccgatttcgagacagcataccacgccatactcggacgcccggcgttagccaagttcatggccgtcccgcactacacttacatgatgatgaagatgcctagtccccgaggagtcctatccctacggagcgacatcaagcaagccgtcacatgcgacaaggagagttgcgacatggcccaaactcgcgagatggcgctagcccgagaggaaatccgactggctgcaaccacggtgagcgaaggagaagtgcccgctgccaagacttcaaaaagtggggaaaccgaagccgcgactaaaaagattcccttagatccttctgatcctaccaaaactgctgtaataggcgccgagttagattatatctttgcgtggaaaccttcggatatgcccggtattcccagagaggtgattgagcactccttacatgtcaaagaagacgccaagcctattaaacaacgacttcgccgatttgcacaagacaggaaggacgcgatcaaggaggaattgaccaagctgttagcagcaggcttcatcaaagaagtccttcatcccgactggctggcaaacccggttctagttcggaagaaaacagggcaatggcgcatgtgtgttgattacactgacctcaacaagtcttgccctaaagatcccttcgggttgcctcgcattgaccaggtagttgactcaaccgccggctgcgagctcctcagttttctggattgctactcggggtatcatcagatccgactgaaggaatccgactgcttgaagacttcattcatcacgccttttggggcatactgctacgtcaccatgccgtttggattaaaaaacgcaggagcaacctatcaacgcatgatccagagatgcttttcaacacagatcggccgcaacgttgaagcctatgtggatgacgtagtcgtcaagaccaagcaaaaggatgatctgatcttggatctagaagaaaccttcgcgagcatccgcgccttcagaatgaaattgaaccctgaaaagtgcaccttcggagtaccgtcagggaagctgcttggctttatggtgtctcataggggcatccaagccaacccggagaaagttactgctatcctcaacatgaaaccgccaagcacccagaaagatgttcagaagctgactggatgcatggcggcgctcagccgattcgtttcaagacttggcgagcgggggatgcccttcttcaagctactgaagaaaacagataatttccaatggggacctgaagcacagaaggccttcgaagatttcaaacaactcctcaccaagccaccggtcttagcctcaccacatccgcaggagccgttgttgctgtatgtatcagccacctcccaggtcgtgagcacagtcttggttgtcgagcgtgaggaagaaggccatgtccagaaagttcagcgaccaatctacttcgtcagcgaggtcctggccgactccaaaacgaggtaccctcaggttcagaagctgttatatggtattttaattactaccaggaagctgtctcattactttcaaggtcactcggtaacggtggtcacatcattcccactcggcgacgtactacacaaccgcgaagcaaatgggcggattgctaagtgggctttggagttgatgtctttggacatatcattcaagccccgcacttcaatcaagtctcaagcgttagccgattttgtcgccgagtggaccgagtgccaagaggatacccccgtggagaaaatagagcactggaccatgcattttgacgggtcaaaaagactttcaggcactggagctggagtggttttaatttccccgactggagaaagactaagttatgtgctttggatacatttttcggcgtcccacaacgtcgccgagtatgaggcgctccttcatgggctacggattgcaatttccctagggataaagcgtctaatcgttcgaggtgattcacaactggttgtcaaccaagttatgaaagagtggtcttgcattgacgacaacatgatggcatatcgacaagaggtacgcaaactggaggataagttcgatggacttgagctcagccatgttcttcgacacaacaatgaagctgccgatagacttgcgaactttggatccaagcgcgaggcggcgccctctgatgtttttgtcgaacacatttatacgccgacggtacctcacaaagatgccactcaaattacgggcacccatgatgtcgctatggttgaagccgactggcgagagcccttcatacgatttttaacttctcaagagctccctcaagataaagatgaagccgagcggatttcaaggcggagcaaactttatgttatgcatgaatctgagttatacaagaaaagcccttcaggaattctgcaacgctgcgtatctttagaggaagggagacaattgctgaaagacatacattctgggatatgcggaaaccacgctgctgcgcgcaccattgtcggcaaagcttaccggcagggttttttctggcctactgcagtgtccgacgccgacaaaattgtgcgcacatgtgaaggttgccaatttttcgccagacaaattcacttaccagctcaagagttgcaaactatcccgctgtcttggccgtttgcggtttgggggctcgacatggttggcccgtttaaaaaggcagtcggcggttacacgcacctcttcgtggccatcgacaaattttccaagtggatcgaagctaagcctgttgtcacgattacagcagataatgctcgagacttcttcatcaacattgtgcatagatttggggtgcccaatcggataatcactgataatggcacacaattcaccggcggagttttcaaagacttttgtgaagattttggaataaagatttgttatgcctccgtagcgcacccaatgagcaatggacaggtggagagggccaacggcatgatacttcaagggattaaagctcgagtttttgaccggcttaaaccctatgccggcaaatgggtgtcacagttaccatcagtactttggtctttgcgtactacgcccagtcgggccacaggccagtcaccttttttccttgtctacggggcagaagcaatgttgccgagtgaagtcgagttcgaatctttgcgcttccgtaatttccgtgaagaacgctatgaagaagaccgagtggacgacttgcaccgactggaagaagtccgcgaagcagctttgattcagtcagctcggtacttacaagggttgcgacgttatcataatcgcaatgttcgatctcgtgcctttctagtcggcgacctggttctacggaaaattcaaaccacacgagatcggcacaagttatctcctctatgggaagggccatttattatctctgaagttacccgaccaggttcataccgactcaagcgcgaagacggcactctcgtcgacaactcttggaacattgaacatcttcgtcgtttctacgcttaa

SEQ ID NO: 47375 - DNA, 1148 bp, Oryza sativa
  Clone ID: PAT_MRT4530_5014C.1
aaaaggttttataaaaagaaaaatccctaaaagtcttcttttcccccccccctttttccctcttgggccggcccggcccaataccctccctctctctcctctcctccgcggcccgtcggcctcctccccgcgcgcgcgccgctgacaggcgggcccgcccgccaccctcgctgacgggtggggcccacctgtcatcgcctaccttccgccgctcccgccgcccgcccgtgccctagcgctgccgccaccgccaaatccgccgcatcccgccgtccccgcgcgccataaagagggggaaatcactccccgttattccctccctctttccccccacttttctctctctctctccctcggattcgttcggatttgctcccgcgatcttcgtcggcgcatcaatggcgcccgagatcgccgcggccgtttccttcccctccggcccctctctctctctcccggcgctatataaacgttccccgtgcctccctcctccgtttccgccgctcgccgctcgctctttccgtcggattcgtgctcgcgccgttgtactctctctccgccgtcgccgccaagctccggttcgccgccgtcgtcgctccggacctcctcccgtctcggcgtcacctccatcggcttcgccgcgtcatcgtcgacctcgtccgctcctccgtttcgcccgccgaccgccggagcaccgtcgtcctcgccgtcccgaaccgcgccgccgctttcctccgctccggttgtcgtttccgccgtcctcgtcgtcccggggtgagccaaggaccgccgcttcgcttccctcttccctcccctctctcggccgccgctccgccgcgccgttggtcgccggcggcgaccatgggggcgcgggtgcgccgcctcccgtcggctgtgccggcgaggccgccttcgggcgcgccccgcggctgccaggtggggcccggccgtcagccgcccgcgcccgcgggtgcggctgacgcttggtacccacggcgccggccgccgccagccgcgtgcacccggtccaccgtggaccgagaggctgacgcgtgggccccactcccgtggacccggtccgcgcgccctctctcccggcttgttcaccctaggaaaacaaaaccccaactagtgggtactctattcat

SEQ ID NO: 47376 - DNA, 705 bp, Oryza sativa
  Clone ID: PAT_MRT4530_50150C.1
ttttttttttttttttgtttcagaggacaactatgtcttgcaaatattattattgtcaaggagacaaaattgttttaagccgtaattcatcataactaagcatatgggtacttgggtacatctcatcttgataaacgtactaaactcgactagctagttaatgaacttgaattcaatcccgtggcgcgcccacgtatgtgcgcctgctgtgaatagatggctcgccggtgaccttcgcggccgatctccggccacccctcctggccgtggacgccgttgttggagaaccacttgctgagccccctcatgaacccgctcgccggcgccggcgccggcgccggcggtggctgccgctcgaaggccaacgtcggcgtggcgaaggtgctcgccgagctggtcgctgcagcctgcttcttgacgccgtggtggtggccgtcgccggcgtagggcacctggtgcatcagctccctgtcgtcctcggcgatcgtgtcgaggctcctcgccacctgcttcctccgccgcatcaccgacaccagctgcggcggcgccacctccgtcatgatcctcgccgccgcctgcgccttcgccatgacacaactaaaaaaaaactttggtttgtaacctcacactagtggctagtgacactgcgagagcttgtgatttttgtgggcttaagtgcctcgtgccgaattcctgcagcccggg

SEQ ID NO: 47377 - DNA, 162 bp, Oryza sativa
  Clone ID: PAT_MRT4530_50151C.1
atgggaccagaggaggaggagaatccttacctgcagatgagcgggggagctaggatcgggtggacccgcaagagggtggggcgagggccattcctgttcaacttgcacccgatccgccccgttgccatctctatttatgagattgttgtgacatggatgtgc

SEQ ID NO: 47378 - DNA, 2298 bp, Oryza sativa
  Clone ID: PAT_MRT4530_50152C.1
ggtcacatctggcgtagtacgttccagggccccactggtgacgtggacgctgccacgcgctctctccaactgcaggtggggccgggccggattgatggatagagattgagatgccctcgagggatggccccacagggcagcgacgtggcgcgcggatctcctggcgttgaagcggtccacgtggctggctcctccttcgtggtcaccacgatggagaatgagcagaggatgtcggtacgcgggggcaagtggaggatggaggatccgtgggtggtgatcgatgcagctatcctgaaggtggtagcggtgaccgagaaggaaagggccaccatccctgccaattctacgttctaccttaccttcgtcaatccttggtgtgactccctcctcaccatccgtgcgccgccgtcgctccagtcgtcaccgtcgctcggggaggtcgccgtcgtggtcgccgtctcgtcgccgttctcgttcgccccttcgtcgtcgctgtcgaccgccggagcaccgtcgccgtcgtcaagccgaaggttgccgccgcttcttccttgtcgccgacgtcgtccggtcatcgtccgccgtcgctttggtcgccggaccagccaggaacgacagcagcggaaaaaggcgatcctagcggggcttcagctccactccacaggcaaaactcaactggggtctgagccttggtcttctaacttcgtcttcaactcagaagcactacacttctgaaaagggggaacaatagcaaggctaagtacaaccaccgtactcagcaagccataccaatgatgcagacgtgcaaggggatacgaggatgggtttcacctgcactcctcgcaaggcagccggcagtcccctcgtgcgccgcggtgaatccggcagctggacaaccggacaccccggccgacccaactccatgacgcccaccctcgccaccggtgcctaggaaagggtcgagctatactccagatcaagcagttacccactcccgcttgtggtaagcactaaaaggaccgccgctgacgtcagcaagggaagccggtgccgacaggcgggtcccacatgtcagtgacacaagggggagggcgcacggtggacacggtccactgcggccgggacggcaccatggaccgagaccacgggtggtccacgggcggccacagggcagggcgcccagggcacgggcacggctcagagccggcccagccgagacatgacatgcgacggtgcacggccaccggcggtgagcggtggcgcgagagggcgcgcgaagggcgacggaaaggagaggaggaagggggatgctgcgaggcggcgagaggacgggcgagcggcgcacgggcgcgaggcggcgagggaacggcgcgcggcgacgggacggcggcgcggtgacgcgcgacagggcacggggcgtggggcctgggaaagcagcgcgcggcgacgggacgacggcgcggcgacgggacgggcgacggcgcgcggcgcggcagcggcgacaaaacgcgacggcatcggcgcgcggcgcacagggcgcatggcggcgtgacagcgacggcgacggcgcgcggcggcacggggcgcaaagcgacgacacgacgggcggcagcgcgacacgacggcgggcggcacggggctcggggcggccaggcgcatgcggcagaggaggggttagggctagggaacgcgatcgaacacctaggggcgacgctgggggtggccacggcatggctcgggatggctgggagcggcggtaaacggcggccgaggcggcgaaagcggcggcggtctcaggttggcagtgaggagggagttttggtgggggatttggggaaaggagatgggggacgatgtgcggcgcgcgacggcgcagcacggcggcggtgggagtgttggtggcgcgcggctggagtccgcggcggcggcgaagagagctacgggaggggaaatcgtggccgagaggggcagaatcgggcggcaaccggccggcgatgtggggtggcgacgtggagctcgagggaggtcaaaccggcgtaatttttggggaaaagtgggggaaaatgaggaggagtgggtggcaaccacgtccacacggttggacgtgcgtgcgggaggcaggaggcgggaggcggcggttttggcagcggtgtgggcggcatggcagttgcccgcgggcggctggaggtaggaggaggttctgacatgtggagccttggttcccatatgtcagccagggagagagaggagctgggggggaatagcaaaaacatagagcttgctgtcaatctcatttct

SEQ ID NO: 47379 - DNA, 5931 bp, Oryza sativa
  Clone ID: PAT_MRT4530_50153C.1
atgggttccgtctccggcatcgacgacctcgtcttccctcccgggcagacgtttcggttcggcagcctcgacttcatcaccaacaacttcggcaagatttctctccttgactcggaatcagaccagtcgggagagaaccggatttcggtcccgtttggattcccgaacgcggctgaaagctacttcgagaccatctcaaccgagtcggcttcaaaccactcggccgagatcgcatcttctccaacgacaccagatcaagatgatggggcttacccaccagtcctgatgaagctccccgacgatttagcggccgtcttcaccacgacagcgtcttcatcccgtaggcctaggcggaagtcggcttcaacaccgatttcgcctagcttcagggaagtcggcgtcatcctccaaccactcggcacggtttcgacggatcagctggatgactacaacagctctcccaccgtcgactcacgtcctactgacatcgtggagtacgacgaatttggttctcgctacaacgacttcgacgacttcgacggaagcctagatgacaactacacccctctctactttggcgttttcatggccaataatgagacggaggagcaacgccaagcccgggagaccgaagaacgtcgccgactggaggaagagcatcaagcacaagaacaagaacggctacggcgtgagcagcaggaccgtgagcggaccgcgaaggaggctgaggatcgacgtcagcgagctttggaagctgggcgccgagcgcgtgatctcatcggccaacaagatgtcgaagggacaccggttttccgcacccctcaacagaatgccgttgccgcaatcacccttctcgacaccctcctcaaccaaaacgagctcaatcaatccgaccacgtcgtcaacatcttgaaccagacgaagaccatgattgcggcttcggtcccagttaactccgaaagcgtccacacgccgactggcagccgagtcccccacttccgatctcatgactaccgtcatccaagcctcagcatcaccggcgcaggatccaaccgcaggagcaagggacacgacgagcggtctgttcactcacctcccgaccttcatagggagcgccgagtggaacggcctcgctcaccacctcgtcgccgccccgtcgatcttcgcgatacaatcatacagcgccgagcagctcgaggctatcatcattcgccgaaccgccacgacgacgaccttgacggagtagcagccttcaccgacgatctgcgtcgagtggattggccagccggcttcaagccgactggaatagagaagtacgacggtaccactaatccagaatcgtggcttaccgtctacggtctcgcaatccgcgcagcaggaggagacaacaaggccatggcgaactatttaccagtggctttagcagattccgcccgatcttggctccatggattgccccgtggtacaattggatcttgggctgaattacgcgaccacttcatcgccaacttccaaggcaccttcgagcgtcccggcacacaatacgacctctacaacgttattcagaagtccggagaatcccttcgagattacatccggcgattttctgaacaacgcaacaagatctccgacatcaccgacgacgttatcatcgccgcgttcaccaaagggattcgccacgaagaattggtcggcaagttcgggcgtaagccccccaggacagtcaagcttatgtttgaaaaagccaacgagtacgccaaggctgaagacgccgtcaccgcatcaaagcagtcgggtcccagttggaagcaaaacaagggtacgccggctacgggaggaggtggaagtaacaatcataaggaccgcaagcattgtttcgtctacaagcaattcgcggatcaatacaccaagactgcacggaagaactctgacgaagagcaaagcacgtcaaggaagaaggacgacggcgacaccccggcaggctttcaagatcaccgcaaggagctcaaccatatcttcggcggccccctggcttatgagtctaaacggaagaagaagttgactgaacgggagatcaatgctgttcagcccgacacgccccaatatcttcgatggtcagagatcgcaatcaagtttgaccgctcggatcatcctgaccgagtggtccacccggggcggtaccccctggtactagacccagtggtccgtaatgtcaagcttcgcagaaccctcatcgacggtggcagtgcactcaatatcctcttcgccaagaccctggatgatatgcagatccctcgatccgagttaaaaccaagcaatgcgccttttcacggagtgattccaggattatccgcaactccactcggccagatcactctcccagtcacttttggcacccgggaaaacttccgcacagagaacatcagctttgaagtcgccgatttcgagacagcataccatgccatactcggacgcccggcgttagccaagttcatggccgtcccgcactacacttacatgatgatgaagatgcctggtccccgaggagtcctatccctacggagcgacatcaagcaagccgtcacatgcgacaaggagagttgcgacatggcccaaactcgcgagatggcgtctgcccgagaggatatccgactggctgcagccacggcaagcgaaggagaagtgcccgctaccaagatttcaaagagcggagaaagcgaagccaagactaagaagattcccctagatccctctgatcctactaaaactgctaacaataaagatatctttgcgtggaaaccatctgatatgcccggtattcctagagaggtgattgagcactccttacatgtcaaagaagatgccaagcctatcaaacaacgactccgccgattcgcacaagacaggaaggacacgatcaaggaggaattaaccaaactgttagcagcaggcttcatcaaagaagtccttcatcccgactggctggcaaacccggttctagttcggaagaaaacagggcaatggcgcatgtgtgttgattatactgacctcaacaaatcctgccctaaagatccttttgggttgcctcgcattgaccaggtagtcgactcgaccgccggctgtgagcttctcagttttttggattgctactcggggtatcatcagatccgactgaaggaatccgactgcttgaagacttcattcatcacgccctttggggcatactgctacgtcaccatgccgttcggactaaaaaacgcaggagcaacttatcaacgcatgattcagagatgcttttcaacacagatcggccgcaacgttgaagcctatgtggatgacgtagtcgtcaagaccaagcaaaaggatgatttgatctcagatctagaagaaacctttgcgagcatccgtgctttcaggatgaaattgaaccctgaaaagtgcaccttcggagtaccgtcagggaagctgcttggctttatggtgtctcataggggcatccaagccaacccggagaaagttactgctatcctcaacatgaaaccgccaagtacccagaaagatgttcagaagctgactggatgcatggcggcgctcagccgatttgtttcacgacttggcgagcgggggatgcccttctttaagctgctgaagaaaacagataacttccagtggggacccgaagcacagaaggccttcgaagatttcaagaaacttctcaccgagccaccagtcttagcctcaccacacccgcaggagccgttgttgctgtacgtatcagccacctcccaggttgtgagcacagtcttggtcgttgagcgcgaggaagaaggccatgtccaaaaattccagcgaccgatttattttgtcagcgaggtcctagccgactccaaaacgaggtaccctcaggttcagaagctgttatatggtattctaattactaccaggaagctatctcactactttcaaggtcactcggtaacggtggtcacatcaattccactcggtgatatactgcacaaccgcgaagcaaacggacgtattgctaagtgggctttggagttgatgtctttggacatatcattcaagccccgaatttcaatcaagtcccaagcgttagctgattttgtcgccgaatggaccgagtgccaggaggatacccccgcggagaacatggagcactggaccatgcattttgacggatccaaacgactttcgggcactggagcaggagtggttttgatttccccaactggagaaagattgagctacgtgctttggatacatttttcggcgtcccacaacgtcgctgagtatgaggccctccttcatggactgcggattgcaatttccctagggataaagcgtctaatagttcgaggcgattcacagttggttgtcaaccaagttatgaaagagtggtcctgccttgacgacaacatgatagcatatcgacaagaggtacgcaaattggaagataagttcgatggactcgagctcagtcatgttcttcggcataataatgaagccgccgatagacttgccaactttggatccaagcgcgaggtggcgccctctgatgttttcgttgaacacctttatacgccgacagtacctcacaaagataccactcaagttgcgggcactcatgacgtcgctatggttgaaaccgactggcgagaacccctcatacgatttttgacttctcaagaactccctcaagacaaagatgaagccgagcggatttcaaggcggagcaaactttatgttatgcatgaagctgagttatacaagaaaagcccttcaggaattctgcaacgctgcgtatctttagaggaagggagacaattgctgcaggacatacattctgggatatgcggaaaccatgccgctgcacgcaccattgtcggcaaagcttaccggcagggttttttctggcctactgcagtgtccgacgccgacaagattgtgcgcacgtgcgaaggttgccaatttttcgccagacaaattcacttgccagctcaagagttgcaaaccatcccgctgtcttggccgtttgcggtttggggactcgacatggttggcccgtttaaaaaggcagtcggcggttacacacatctctttgtagccattgacaaattctccaagtggattgaagctaaaccggttgtcacaatcacagcagataatgctcgagacttcttcatcaacattgtgcatagatttggagtgcccaatcggataatcactgataatggcacacaattcactggcggagtttttaaagacttttgtgaggactttggaattaagatttgctacgcctcagtggcacaccccatgagcaatggacaggtggagcgagctaatggcatgatacttcaagggattaaagcgcgtgtctttgaccggctaaaaccctatgccggcaaatgggtgcaacaactgccatcggtactttggtctttgcgaactacacccagtcgggccacaggccagtcaccttttttccttgtctatggggcagaagcaatgttgccgagtgaagtcgaatttgagtctttgcgctttcgtaatttccgtgaagaacgctacgaagaagaccgagtggatgacttgcaccgattggaagaagcccgcgaagcagctttgattcggtcggctcgatatttacaagggttgcggcgctatcataatcgcaatgttcgatctcgtgcctttttagtcggtgacctggttttgaggaaaattcaaactacacgagatcggcacaagttatctcctctatgggaagggccatttattatctctgaagtcacccggccaggttcttatcgactcaagcgcgaagacggtactcttgtcgacaactcttggaacatcgaacatcttcgtcgtttctacgcttaagtttatcattgtacttccctatct

SEQ ID NO: 47380 - DNA, 5211 bp, Oryza sativa
  Clone ID: PAT_MRT4530_50154C.1
atgggttccgtctccggcatcgacgacctcgtcttcccacccgggcagacgtttcggttcggcagcctcgacttcgtcaccaacaacttcggcaagatctctctccttgactcggagtcaaaccagtcgggagagaaccggatttcagtcccgtttggactcccaaacgcggctgaaagttacttcaagaccatctcaatcgagtcggcttcaaaccactcgggcaagatcgcatcttctccaacgacaccagatcaagatgatggggcttacccaccaatcctgatgaagctccccgacgatttggcggccatctccatcacgacagcgtctccatcccgtaggcctaggcggaagtcggcttcaacaccgatttcgcctagcttcagggaagtcggcgtcatcctccaaccactcggcacggtttcgacggatcaactggatggctactacagctctcccactgtcgactcgcgccccaccgacatcgtggagtacgatgagtttagctctcgctacaacgacccggatctcgacgacttcgacgaaagcctagatgacaactacacccctctcttcttcggcgtcttcatggccaacaacgagacggaggagcaacgccaagcccgggagaccgaagcacgtcgcgagactgagcgtcgccgactggaggaggagcatcaagcacaagaacaagaacggctacggcgtgagcagcaggagcgtgagcggaccgcgaaggaggctgaagatcgacggcagcgagctttggaagcagggcgccgagcgcgtgatcttatcggccaacaagatgttgaagggacaccggttttccgcacccctcaacagaatgcggttgccgcgatcaccctcctcgacaccctcctcaaggaaaacgagctcaatcaatctgatcacgtcgtcaacatcttgaaccagacgaagaccatgattgcggcttcggtcccagttaactccgaaagcgtccacacgccgactggcagccgagtcccccacttccgatctcatgactaccgttatccaagcctcagcatcaccggcgcaggatccaatcgcaggagcaggggtcacgacgagcggtccgttcactcacctcccgaccatcatagggagcgccgagtggaacggcctcactcaccacctcgtcgccgccccgtcgatcttcgcgacacaatcatacagcgccgagcagctcgaggccatcatcattcgccggaccgccacgacgacgaccttgacagagtagcagccttcaccgacgacctgcgtcgagtggattggccagccggcttcaagccgactggaatagagaagtacgacgcggattccgcccgatcttggctccatggattgccccgtggtacaattggatcttgggccgaattacgcgaccacttcatcgccaccttccgaggcaccttcgagcgtcccggcacacaatacgacctctacaacgttattcagaagtccggagaatcccttcgagattacatccgccgattttctgaacaacgtaacaagatctccgacatcaccgacgacgttatcatcgccgcattcaccaaagggattcgccacgaagaattggtcggcaagttcgggcgtaagcctcccaggacagtcaagcttatgtttgaaaaagccaacgagtacgccaaagctgaagacgtcgtcaccgcatcaaagcagtcgggtcccagttggaagccaaacaagggtacgccggctccgggaggaggtggaagtaacaacaataaggaccgcaagcgtaagcctgcggaacttgttgcaaccgccacccactcttctcgacagcgctcgcgcgtcaacacgttcgacaagatcatgaactcccaatgcccgcaccatcctaactccaaccacgtggccaaagattgtttcgtctacaagcagtttgcggagcaatacaccaagactacacggaagaactctgacgaagaacaaagcacgtcaaggaagaaggacgacggcgacaccccggcaggatttcaagaccaccgcaaggagctcaaccatatcttcggcggccccctggcttatgagtctaaaaggaagcaaaagttgaccgaacgggagatcaatgctgttcagcccgacacgccccaatatcttcgatggtcagagattgcaatcaagtttgaccgctcggatcatcctgaccgagtggtccacccggggcggtaccccctggtactagacccagtggtccgtaatgtcaagcttcgcagaaccctcattgacggtggcagtgcactcaatatcctcttcgccaagaccttggatgatatgcagattcctcgctccgagctaaaaccaagcaatgcgccttttcacggagtaattccaggattatccgcaactccactcggccagatcaccctcccggtcacttttggcactcgggaaaacttccgcaccgagaatatcagctttgaagtcgccgatttcgagacagcataccatgccatactcggacgcccggcgttagccaagttcatggccgtcccgcactacacttacatgatgatgaagatgcctggtccccgaggagtcctatccctacggagcgacatcaagcaagccgtcacatgcgacaaggagagttgcgacatggctcaaacccgcgagatggcgtctgcccgagaggatatccgactggctgcagccacgacgagcgaaggagaagtgcccgctaccaagatctcaaagagtggagaaagcgaagccaagactaaaaagattcccctagatccttctgattctactaaaactgctgtaataggcgccgagttagattgcttcattaaagaagtccttcatcccgactggctggcaaacccggttctagttcgaaagaaaacggggcaatggcgcatgtgtgttgattatactgacctcaacaagtcttgccctaaagatccttttgggttgcctcgcattgaccaggtagtcgactcgaccgccggctgtgagcttctcagttttttggattgctactcggggtatcatcagatccgactgaaggaatccgactgcttgaagacttcattcatcacgccctttggagcatactgctacgtcaccatgccgttcgaactaaaaaacgcaggagcaacttatcaacgtatgattcagagatgcttctcaacacagatcggccgcaacgttgaagcctatgtggatgatgtagtcgtcaagaccaagcaaaaggatgatttgatcttggatctagaagaaaccttcgcgagcatccgcgctttcaggatgaaattaaaccctgaaaagtgcaccttcggagtaccgtcagggaagctgcttggttttatggtgtctcataggggcatacaagccaacccggagaaagttactgctatcctcaacatgaaaccgccaagtacccagaaagatgttcagaagctgactggatgcatggcggcgctcagccgattcgtttcaagacttggcgagcgggggatgcccttctttaagctactgaagaaaacagatgatttccagtggggacccgaagcacagaaggccttcgaagatttcaagaaactcctcaccgagccgccagtcttagcttcaccacatccgcaggagccgttgttgctgtatgtatctgccacctcccaggttgttagcacagtcctggtcgttgagcacgaggaagagggccatgtccagaaagtccagcgaccgatttactttgtcagcgaggtcctagccgactccaaaacgaggtaccctcaggttcagaagctgttatatggtattctaattactaccaggaagctatctcactactttcaaggtcactcggtaacggtggtcacatcatttccactcggtgatatactgcacaaccgcgaagcaaacggacggattgctaagtgggctttggagttgatgtctttggacatatcattcaagccccgaatttcaatcaagtcccaagcgttagctgattttgtcgccgaatggaccgagtgccaggaggatacccccgcggagaagatggagcactggaccatgcattttgacggatcaaaacgactttcgggtactggagcaggagtggttttaatttccctaactggagaaagattaagctatgtgctttggatacatttttcggcatcccacaacgtcgccgagtatgaggcgctccttcatggactgaggattgcgatttccctagggataaagcgtctaatagttcgaggcgattcacagctggtcgtcaaccaagttatgaaagagtggtcctgccttgacgacaatatgatggcatatcgacaagaggtacgcaaattggaagacaagttcgatggactcgagctcagtcatgttcttcgacacaataatgaggccgccgacagacttgccaactttggatccaagcgcgaggcggcaccctctgatgttttcgtcgaacacctttatacgccgacagtacctcacaaagatactactcaagttgcgggcactcatgacatagctatggttgaagccgactggcgagaacccctcatacgatttttgacttctcaagaactcccccaagacaaagatgaagccgagcggatttcaaggcggagcaaactttatgttatgcatgaagctgagttgtacaaaaaaagcccttcagggattctgcaacgctgcgtatctttagaggaagggagacaattgctgaaagacatacattctgggatatgcggaaatcatgctgccgcgcgcaccattgtcggcaaagcttaccggcagggtttcttttggcctactgcagtgtccgacgccgacaaaattaccatcccactgtcttggccgtttgcggtttgggggctcgacatggtcggcccgtttaaaaaggcagtcggcggttacacgcacctctttgtggccattgacaaattctccaagtggattgaagctaaaccggttgtcacgatcacagcagataacgctcgagacttcttcatcaacattgtgcatagattcggagtgcccaatcggatcatcactgataatggcagacaattcactggcggagtttttaaagacttttgtgaagactttggaattaagatttgctatgcctcagtggcaccccatgagcaatggacaggtggagcgagccaatggcatgatactacaagggattaa

SEQ ID NO: 47381 - DNA, 200 bp, Oryza sativa
  unsure (1)..(200): unsure at all n locations
  Clone ID: PAT_MRT4530_50155C.1
atccacacaggccaaagccaaaccctggcccttccttcctanccttcaattcgantttcttcttcttcggccggttggaagcttaaccattnccggcgggggantcccaattcggannnccgnagggcgaacaacccgggtnaccggcnanggccgccttcgcttttaacttcgnatttcgccgcttccacnatccacgc

SEQ ID NO: 47382 - DNA, 5425 bp, Oryza sativa
  Clone ID: PAT_MRT4530_50156C.1
atgggttccgtctccggcatcgacgacctcgtcttcccacccgggcagacgtttcggttcggcagcctcgacttcgtcaccaacaacttcggcaagatctctctccttgactcggagtcagaccagtcgggagagaaccggatttcagtcccgtttggactcccaaacgcggctgaaagttacttcaagaccatctcaatcgagttggcttcaaaccactcgggcgagatcgcatcttctccaatgtcaccagatcaagatgatgaggcttacccaccgatcctgatgaagctccccgacgatttggcggccgtctccatcacgacagcgtctccatcccgtaggcctaggcggaagtcggcttcaacaccgatttcgcctagcttcagggaagtcggcgtcatcctccaaccactcggcacggtttcgacggatcagctggatggctactacagctctcccaccgtcgactcgcgtcccaccgacatcgtagagtacgacgagtttagctctcgctacaacgacccggatctcgacgacttcgacggaagcctagatgacaactacacccctctctacttcggcgtcttcatggccgataacgagacggaggagcaacgccaagcccgggaaaccgaagcacgtcgcgagactgagcgtcgccgactggaggaggagcgtcaagcacaagaacaagaacggctacggcgtgagcagcaggagcgtgagcgaaccgcgaaggaggctgaggaccgacggcagcgagccttggaagcagggcgccgagcgcgtgatttcaacggccaacaagatgttgaagggacaccggttttccgcacccctcaacagaatgcggttgccgcgatcaccctcctcgacaccctcctcaaggaaaacgagctcaatcaatctgatcacgtcgtcaacatcttgaaccagacaaagaccatgattgcggcttcggtcccagttaactccgaaagcgtccgcacgccgactggcagccgactcccccacttccgatctcatgactaccgtcatccaagcctcagcatcactggcgcaggatccaatcgcaggagcaggggtcacgacgagcggtccgttcattcgcctcccgaccatcatagggagcgccgagtggaacggcctcgctcaccacctcgtcgccgccccgtcgatcttcgcgacacaatcatacagcgccgagcagctcgaggccatcatcattcgccggaccgccacgacgacgaccttgatggagtagcagccttcaccgacgacctgcgtcgagtggattggccagccggcttcaagccgactggaatagagaagtacgacggtaccaccaacccagaatcgtggcttaccgtctacggtctcgcgatccgcgcagcaggaggagatagcaaggccatggcgaactatttaccagtggctttagcggattccgcccgatcttggctccatggattgccccgtggtacgattggatcttgggccgaattacgcgaccacttcatcgccaacttccaaggcaccttcgagcgtcccggcacacaattcgacctctacaacgttgttcagaagtccggagaatcccttcgagattacatccggcgattttctgaacaacgtaacaagatctccgacatcaccgacgacgttatcatcgccgcattcaccaaagggattcgccacgaagaattggtcggcaagttcgggcgtaaacctcccaggacagtcaaacttatgtttgaaaaagtcaacgagtacgccaaagccgaagacgccgtcaccgcatcaaagcagtcgggtcccagttggaagccaaaaaaggatacgccggctacgggaggaggtggaagtaacaatcataaggaccgcaagcgtaagcctgaggaacttgttgcaaccgccattcactcttctcgacagcgttcgcgcgtcaacacgttcgacaagatcatgaactcccaatgcccgcaccatcctaactccaaccacgtggccaaagattgtttcgtctacaagcaattcgcggagcaatacaccaagactacacggaagaactccgacgaagaacaaagcacgtcgaggaagaaggacgacggcgacaccccggtaggatttcaagaccaccgcaaggagctcaaccatatcttcggcggccccctggcttatgagtctaaaaggaagcaaaagttgaccgaacgggagatcaatgctgttcagcccgacacgccccaatatcttcgatggtcagagattgcaatcaagtttgaccgctcggatcatcctgaccgagtggtccacccggggcggtaccccctggtactagacccagtggtccgtaatgtcaagcttcgcagaaccctcatcgacggaggcagtgcactcaatatcctcttcgccaagaccttggatgatatgcagattcctcgctccaagctaaaaccaagcaatgcgccttttcacggagtaattccaggattatccgcaactccactcggccagatcaccctcccggtcacttttggcactcgggaaaacttccgcacagagaatatcagctttgaagtcaccgattttgagacagcataccatgccatactcggacgcccggcgttagccaagttcatggccgtcccgcactacacttacatgatgatgaagatgcctggtccccgaggagtcctatccctacggagcgacatcaagcaagccgtcacatgcgacaaggagagttgcgacatggcccaaacccgcgagatggcgtctgcccgagaggatatccgactggctgcagccacggcgagcgaaggagaagtgcccgctaccaagacttcaaaaagtggagaaagcgaagccaagactaagaagattcccctagatccttctaatcctactaaaactgctaacaataaagatatctttgcgtggaaaccatctgatatgcccggtattcctagagaggtgattgagcactccttacatgtcaaagaagatgccaagcctatcaaacaacgactccgccgattcgcacaagacaggaaggacgcgatcaaggaggaattaaccaagctgttagcggcaggcttcatcaaagaagtccatcatcccgactggctggcaaacccggttctagttcggaagaaaacggggcaatggcgcatgtgtgttgattatactgacctcaacaagtcttgccctaaagatccttttgggttgcctcgcattgaccaggtagtcgactcgaccgccggctgtgagcttctcagttttttggattgctactcggggtatcatcagatccgactgaaggaatccgactgcttgaagacttcattcatcacgccctttggagcatactgctatgtcaccatgccgttcggactaaaaaacgcaggagcaacttatcaacgtatgatccagagatgcttctcaacgcagatcggccgcaacgttgaagcctatgtggatgatgtagtcgtcaagaccaaacaaaaggatgatttaatctcggatctagaagaaaccttcgcgagcatccgcgctttcaggatgaaattaaaccctgaaaagtgcaccttcggagtaccgtcagggaagctgcttggttttatggtgtctcacaggggtatccaagccaacccggagaaagttactgctatcctcaacatgaaaccgccaagtacccagaaagatgttcagaagctgactggatgcatggcggcgctcagccgatttgtttcgagacttggcgagcgggggatgcccttctttaagctactgaagaaaacagatgatttccaatggggacccgaagcacagaaggccttcgaagattttaagaaactcctcaccgagccaccggtcttagcctcaccacacccgcaggagccgttgttgctgtatgtatcagccacctcccaggttgtgagcacagtcttggtcgttgagcgtgaggaagaaggccatgtccagaaagtccagcgaccgatttactttgtcagcgaggtcctagccgactccaaaacgaggtaccctcaggttcagaagctgttatatggtattctaattactaccaggaagctatctcactactttcaaggtcactcgaccgagtgccaggaggatacccccgcggagaagatggagcactggaccatgcattttgacggatcaaaaagactttcgggcactggagcaggagtggttctaatttccccaactgggagaaagattaagctatgtgctttggatacatttttcggcgtcccacaacgtcgccgagtatgaggcgctccttcatggactgcgaattgcgatctccctagggataaagcgtctaatagttcgaggcgattcacagctggtcgtcaaccaagttatgaaagagtggtcctgccttgacgacaacatgatggcatatcgacaagaggtacgcaaattggaagacaagttcgatggactcgagctcagtcacgttcttcgacacaataatgaagccgccgacagacttgccaactttggatccaagcgcgaggtggcgccctccgatgttttcgtcgaacacctttatacgccgacagtacctcacaaagatactactcaagttgcgggcactcatgacgtagctatggtttcagccgactggcgagagcccctcatacgattcttgacttctcaagaactcccccaagacaaagatgaagccgagcggatttcaagacgaagcaaactttatgttatgcatgaagctgagttgtacaagaaaagcccttcagggattctgcaacgctgcgtatctttagaggaagggagacaattgctgaaagacatacattctgggatatgcggaaaccatgctgccgcacgcaccattgtcggcaaagcttaccggcagggttttttttggcctactgcagtgtccgacgccgacaaaattgtgcgcacgtgcgaaggttgccagttttttgccagacaaattcatctaccagctcaagagttgcagaccatcccactgtcttggccgtttgcggtttgggggctcgacatggttggcccgtttaaaaaggcagtcggcggttacacgcacctctttgtggccattgacaaattctccaagtggattgaagctaaaccggttgtcacaatcacagcagataacgctcgagacttcttcatcaacattgtgcatagatttggagtgcccaatcggatcatcactgataatgacagacaattcactggcggagtttttaaagacttttgtgaagactttggaattaagatttgctatgcctcagtggcacatcccatgagcaatggacagaacgctacgaggaggaccgacttcgagtctttaagcttatcactgtacttccctatcttgactgtcaacatcaagttttcttcttga

SEQ ID NO: 47383 - DNA, 168 bp, Oryza sativa
  Clone ID: PAT_MRT4530_50157C.1
atggcgcaggaaggatgtggtgctggtggatttgccaaggcagggggcgtggatatcagtggtggaattcgtcatatccttgcttcttgcttgccgtctttggtgaggattattaggattagccgtgagtccggaggttttgttgtaggtgacaaacctggagcctag

SEQ ID NO: 47384 - DNA, 6051 bp, Oryza sativa
  Clone ID: PAT_MRT4530_50158C.1
atgggtctcgtctccggcatcgacgacctcgtcttccctcctgggcagacgtttcggttcggcagcctcgacttcatcaccagcaacttcggcaagatttctctccttgactcggaatcggaccagtcgggagagaaccggatctcaaccccgtttggattcccaaacgcggctgaaacctacttcaagaccatctcaatcgagtcggcttcaaaccactcggctgagatcgcatcttctccaacgacaacagatcaagaggatggggcttacccaccagtcctgatgaagctccccgacgatttagcggccgtctccaccacgacagcgtcttcatcccgtaggcctaggcagaagtcggcttcaacaccgatttcgcctagcttcagggaagtcggcgtcatcctccaaccactcggcacggtttcgacggatcagctggatgactacaacagctctcccaccgtcgactcgcgccccaccgacatcgtggagtacgatgagttcagctctcgctaccacgacttcgacgacttcgacgacttcgacggaagcctagatgataactacacccctctctactttggcgttttcatggccaataatgagacggaggagcaacgccaagcccgggagaccgaagaacgtcgccgactggaggaggagcatcaagcacaagaacaagaacggctacggcatgagcagcaggaccgtgagcggatcgccaaggaggctgaggatcgacgtcagcgagctttagaagcagggcgccgagcgcgtgatctcatcggccaacaagacgtcgaagggacaccggttttccgcacccctcaacagaatgcggttgccgcgatcacccttctcgacaccctcctcaaccaaaacgagctcaatcgttccgaccacgtcgtcaacatcttgaaccagacgaagactatgattgcggcctcggtcccagttaactccgaaagcgtccatacgccgactggcagccgagttccccacttccgatctcacgactaccgtcatccaagcctcagcatcaccggcgcgggatccaaccgcaggagcaggggtcacgacgagcggtctgttcactcacctcccgaccttcatagggagcgccgagtggaacggcctcgctcaccacctcgtcgccgccccatcgatcttcgcgacacaatcatacagcgccgagcagctcgaggctaccatcgctcaccggatcgccgcgacgacgaccttgacggagttgcagccttcaccgacgacctgcgtcgagtggattggccagccggcttcaaaccgactggaatagagaagtatgacggcaccactaaccctgaatcgtggcttaccgtctacggtctcgcaatccgcgcagcaggaggagacaacaaggccatggcgaactatctaccggtggctttagcagattccgcccgatcttggctccatggattgccccgtggtacgatcggatcttgggctgaattacgcgaccacttcatcgccaacttccaaggcaccttcgagcgtcctggcacacaatacgatctttacaacgttatccagaagtccggagaatcccttcgagagtatatccgacgattttctgaacaacgtaacaagatctccgacatcaccgacgacgtcatcatcgccgcattcaccaaagggattcgccacgaagaattggtcggcaaatttgggcgcaaacctcccagaacagtcaagctcatgtttgaaaaagccaacgagtacgccaaagccgaagacgccgtcaccgcatcgaagcagtcgggtcccagttggaagccgaaaaatacgccggctacgggaggaggtggaagtaacaatcataaggaccgcaagcgtaagcctgaggaacttgttgcaaccgccgctcactcttctcgacagcgttcgcgcgtcaacaccttcgacaagatcatgaactcccaatgcccgcatcatccaaactccaaccacgtggccaaagagtgcttcatctacaagcagttcgcggagcaatacaccaagtctactcggaagaactccgacgaggaacaaagcacgtcaaggaagaaggacgacggcgacaccccggctggatttcaagaccaccgcaaggagctcaaccatatcttcggcggccccctggcttatgagtctaaacggaagcagaagttgactgaacgggagatcaatgctgttcagcccgacacgccccagtatcttcgatggtcagagattgcaatcaagtttgaccgctcggatcatcctgaccgagtggtccacccggggcggtaccccctggtactagacccagtggtccgtaatgtcaagcttcgcagaaccctcattgatggtggcagtgcactcaatatcctcttcgccaagaccctggatgatatgcagattcctcgctccgagctaaaaccaagcaatgcgccctttcacggagtaattccaggattatccgcaactccactcggccagatcaccctcccagtcacttttggcactcgggagaatttccgcacagagaacatcagctttgaagtcgccgatttcgagacagcataccatgccatactcggacgcccggcgttagccaagttcatggccgtcccgcactacacttacatgatgatgaagatgcctggtccccgtggagtcctatccctacggagcgacatcaagcaagccgtcacatgcgacaaggagagttgcgacatggcccaaacccgcgagatggcgtctgcccgagaggaaatccgactggctgcaaccacagtgagcgaaggagaagtgcccactgccaagatttcaaaaagtggagaaaccgaagccgagactaaaaagattcccttagatccttctgatcctaccaaaactgctgtaataggcgccgagttagattatatctttgcgtggaaaccttcggatatgcccggtattcccagagaggtgattgagcactccttacatgtcaaagaagacgccaagcctattaaacaacgactccgccgatttgcacaagacaggaaggacgcgatcaaggaggagttaaccaagctgttagcagcaggcttcatcaaagaagtccttcatcccgactggctggcaaacccggttctagttcggaagaaaacagggcaatggcgcatgtgtgttgattataccgacctcaacaagtcttgtcccaaagaccctttcgggttgcctcgcattgaccaggtagttgactcaaccgccggctgcgagcttctcagttttctggattgctactcggggtatcatcagatccgactgaaggaatccgactgcttgaagacttcattcatcacgccttttggggcatactgctacgtcaccatgccgtttggattaaaaaacgcaggagcaacctatcaacgcatgatccagagatgcttttcaacacagatcggccgcaacgttgaagcctatgtggatgacgtagtcgtcaagaccaagcaaaaggatgatctgatcttggatctagaagagaccttcgcgagcatccgcgccttcaggatgaagttaaaccctgaaaaatgcaccttcggagtaccgtcagggaagctgcttggttttatggtgtctcataggggcatccaagccaacccggagaaagttactgctatcctcaacatgaaaccgccaagtacccagaaagatgttcagaagctgactggatgcatggcggcgctcagccgattcgtttcaagacttggcgagcgggggatgcccttcttcaagctactgaagaaaacagataatttccaatggggacccgaagcacagaaggccttcgaagatttcaaacaactcctcaccaagccaccggtcttagcctcaccacatccgcaggagccgttgttgctgtatgtatcagccacctcccaggtcgtgagcacagtcttggtggtcgagcgtgaggaagaaggccatgtccagaaagttcagcgaccaatctacttcgtcagcgaggtcctggccgactccaaaacgaggtaccctcaggttcagaagctgttatatggtattttaattactatcaggaagctgtctcactactttcaaggtcactcggtaacggtggtcacatcatttccacttggcgatgtactgcacaaccgcgaagcaaatgggcggattgctaagtgggccttggagttgatgtctttggacatatcattcaagccccgcacttcaatcaagtctcaagcgttagctgattttgtcgccgagtggaccgagtgccaagaggatacccccgtggagaaaatagagcactggaccatgcattttgacgggtcaaaaagactttcgggcactggagctggagtggttttaatttccccgactggagaaagactaagttatgtgctttggatacatttttcggcgtctcacaacgtcgccgagtatgaagcgctccttcatgggctacggattgcaatttccctagggataaagcgtctaattgttcgaggtgattcacagctggttgtcaaccaagttatgaaagagtggtcctgcattgacgacaacatgatggcatatcgacaagaggtacgcaaactggaggataagttcgatggacttgagctcagtcatgttcttcgacacaacaatgaagccgccgatagacttgcgaacttcggatccaagcgcgaggcagcgccctctgatgtttttgtcgaacacctttatacgccgacggtacctcacaaagatgccactcaagttacgggcacccatgatgtcgctatggttgaagccgactggcgagagcccttcatacgatttttaacttctcaagagctccctcaagataaagatgaagccgagcggatttcaaggcggagcaaactttatgttatgcacgaatctgagttatacaagaaaagcccttcaggaattctgcaacgctgcgtatctttagaggaagggagacaattgctgaaagacatacattctgggatatgcggaaaccatgctgcagcacgcaccattgttggcaaagcttaccggcagggttttttctggcctactgcagtgtccgacgccgacaaaattgtgcgcacatgtgaaggttgccaattttttgccagacaaattcatctaccagctcaagagttgcaaactatcccgctgtcttggccgtttgcggtttgggggctcgacatggttggcccgtttaaaaaggcaatcggcggttacacgcatctctttgtggccattgataaattttccaagtggatcgaagctaagcctgttatcacgattacagcagataacgctcgcgatttcttcatcaacattgtgcacagattcggagtacccaatcggatcatcactgataatggcacacaattcaccggcggagttttcaaggacttttgtgaagactttggaattaagatttgctacgcctcagtagcacaccccatgagcaatggacaggtggagcgagctaatggcatgatacttcaagggattaaagcgcgtgtctttgaccggctaaaaccctatgccggcaaatgggtgcaacaactgccatcggtactttggtccttgcgaactactcccagtcgggccacaggccagtcaccttttttccttgtctatggggcagaggcaatgttgccgagtgaagtcgaatttgagtctttgcgcttccgtaatttccgagaagaacgctacgaagaagaccgagtggacgacttgcaccgactggaagaggtccgcgaagcagctttgattcagtcagctcggtacttacaagggttgcgacgttatcacaatcgcaatgttcgatctcgtgcctttctagtcggcgacctggttttacggaaaattcaaaccacacgagatcggcacaagttatctcctctatgggaaggcccatttattatctctgaagttacccggccgggttcatatcgactcaagcgcgaagacggcactctcgtcgacaattcttggaacattgaacatcttcgtcgtttctacgcttaa

SEQ ID NO: 47385 - DNA, 1722 bp, Oryza sativa
  Clone ID: PAT_MRT4530_50159C.1
atgaagcctgcgttcttcctcttgcgcctcatcagccttcttcacctagcacttgccttgtgttccggcagcggagacttccagttcgcctatcatggcttcaccggcaccaacctcacgctcgacggcaacgccaccgtcatgccagatgggatccttgtgctgaccagccgcaagaccaacctaaaaggccatgcgttcttccccgcgcctctgcagttccgcacatcgcctgatggcacagctcggtccttctcggccgccttcgtgttcgccatcatctccgactacaccgatttctgtgcccacggtatggccttcatcgtgtccccgaccaagaacttcaccaccgcactgccggttgggtacctggccctcctcaacgtccagaacaacggcaacacgaccaaccacctcttcgcggttgagctcgacaccgtccagaacaccgattttcaagacgtcaacgccaaccacgttggcatcaacgtcaacaatcttcactctttgcaatcctccccaactagctactacgatgacggcaacaatggcgtcttcaagaacctaaccctctttagccgagaagcgatgcaggtgtgggtggactatgatggcaacacaggacagattgatgtggctttggcaccaatcaaagtggctaaaccaaggaagccgcttgtttccgctaactttgccatgaatggccctgctccgccgattaacattgccaatcttcctaagctgccgtgtttcggacccaagcctccatccaaggtcttagtaatcgtcctaccaatagctacagcaacagtcatgctcagtcttggtaccattgccaccctactcgtgttaaggcatctgaggtatgctcagttgcttgaagattgggagcttgaatttggcccccatcgattctcatataaggatctatatcatgctactaatggatttaagagcaaacatctcctgggtacaggactttacggccaggaggataagcctttacgggattggagccaaaggtttcatatcattaggggtgttgcgtctggcttgctctatatccatgagaagtgggagaaagttgtcatccaccgtgacataaaagcaagcaatgtgcttcttgaccatcaaatgaatgggtgcttaggtgattttggactctcaaggttgtatgaccatggcaccgatccccaaaccacacatgtggtgggtacaatgggatacttggccccagaactaatatggaccggtaaggcatccaaactaacagatgttttcacatttggtgcgtttcttcttgaaataacttgtgggcaaagaccggtcaacgacgatagtggacgatacaaccaagaaatgttagttgactgggttcttgaccatttcaaaaaaggctctcttaatgagacagtggacctgaggttgcaaggtgactgtaatacagatgaggcatgccgggtgctaaagctaggactgctgtgttcacacccatctgccaacttgagaccgggcatgagacaagtcatgcaataccttgatggtgacactccactcccagacttaacatcaacaaatatgagctttagcacaatggctctaatgcagaatgaagggttcgactcatatccaatgtcatatccatcgtctgcagcaaccattggcaccgtatccttcctcttaggtggaagattttcgcttggcgggtcacatttgtattaa

SEQ ID NO: 47386 - DNA, 1776 bp, Oryza sativa
  Clone ID: PAT_MRT4530_5015C.1
cacgaggccaccaccacctccaccaccgccgcgccgtcgcgttcgccttttttcctccttcccggacctcgtgcgctcccaccaccaccaccccgcggcttcgctcgcgccaccgccactgattcgccggagagttgctgttcccttcgtgatttcgtcggcggtggcggcggcgggggtggtctcctgttgctgtacagaccagcatcgttggggggaatcggatgagatgagatgagatgagatgcgggggtggtggtgatggaggcgctctcccggaccgagcgtgtaggaggaggaggtggagccatggttgaagtggccttcgcttcgtccgccggatcctccgccgcggccccgcgccgccttcgtggggagctcgtcgtcagggacgctattccgtatgccggggtggctcctccgccgcccgcgctgccgctgccgcagccgcagctgcagccgcaggtgcaggctacgacgagtgggggcggcggcggggggaagattagccccgcggtgctgttcatcatcgtgattctcgcggtggtgttcttcatctccggcttgctccacctcctggtgcggctactcatgaagaagcagcatcgccgcggaggaggagggggtgcggcggccggggtgtcgcggtcggccgccggggatgacgcggggggaggaggggacgcggcgctgcagcggcagctgcagcagctgttccaccttcacgactccgggctggaccaggcgttcatcgacgcgctgccggtgttcgcctaccgggagatcgtcgtgggcggcggcggcgacggcgacaaggagcccttcgactgcgcggtgtgcctgtgcgagttcgacgccgaggaccgcctccggctgctgccgctgtgcgggcacgccttccacctgcattgcatcgacacatggctgctgtccaactccacctgcccgctctgtcgcggggtgctctttgtccctgggctcacggagaacaatccgatgtttgatttcgatgaggggttggaagaagggaggctgtctgaagattgcgataacggattcggatatcccgggcacaaggctacggaggggatgcagacgccagggactgagaagagggtgttccctgtgaggcttgggaagttcaagaatgtcgggacccagggcgctgtcgaaggcggtggcatcggcaatgccaatggtgctgtcttgaggagagaggaaggggagagcagcagcagcagcttggatgcaaggagatgcttctcaatggggacttaccagtatgttctagggacctcagagctcagggtgtctctccagccagaccgaattagaaatggcggcggcggtgtgacgagggcaaggccgacagggttaagctctgtcaatgctgagatcatggaggggaagaagatatgcgcacggaacaaaggggagagcttctctgtgtcgaagatttggcagtggtctaatctgaagggcaagctacctactggctcagatgaatgttcggaagcagggagccttccatggatgaagagaggtggcattggggatacatcaaatatgtgactgtagtctgtattatgatagtggctaatcttttctcttgttggtgctgctcacttaatctcttacctatagttatcttgacttttttcagtctgatagctttgtgctgagtttgattggaatgcattaatcccatggagcgataatttctcatagccgtgccactgagtattgcggtagcttaggatggttgatttctggtgc

SEQ ID NO: 47387 - DNA, 3402 bp, Oryza sativa
  Clone ID: PAT_MRT4530_50160C.1
atggcaagagcaacagcattgctctgctcctcactgctgttgctgtcctgtttctacgcccaggtttctccagggagcagcagcagcagcagaagtactgccatggcggatgagcctgcgctcctctcgttcaagtccatgctgctgtctgatggcttcctggcatcatggaacgcttcaagccactactgcagctggccgggagttgtgtgcggcggccggcatcccgagagggttgtggcgttgcaaatgagctcgttcaacctgtctggaaggatctctccgtcattgggcaacctgtccttgctcagggagctggaacttggtgacaaccagttcaccggggacatacctccagagatcgggcaactcaccaggcttaggatgctgaacctaagctcgaactatctccaaggaagcatcccggcttccattggagaatgtgccgagctcatgtcgattgacctaggcaacaaccagctccaaggtgagatcccagccgagctaggtgcgttgaagaatcttgtcaggttgggccttcatgaaaatgctttgtcaggagagatccctcggtctctggcagatttgcaatcgttgggcgccctatctttgttcaagaacaggctgcacggtgagataccgcctggtttgggcaatctcaccaacctctatcatcttcttcttgcacacaacatgctatcaggagccatcccatcatcccttggcatgctctctggattgtcatggcttgagctaggcttcaacaatctaaccgggctgatcccctcttccatctggaatgtttcctctctgacagagcttaatctccagcaaaacatgttgcatgggacgatgcctcctgatgtgttcaactctcttcctcatctgcagcacttgtacattaacgacaaccagtttcatggcaacatccctgtatcaataggtaacgtgtccgctttgtcgcggatacagattggtttcaactctttcggtggaatcattcctccggaggttggaaggttaagaaacctcacttcgctagaagctgagcacacattccttgaagctaaagatcagaaaggatggggattcatatctgcgttaacgaattgctccaagttgcaagctttgttcctgggcaacaataggtttgaaggggtacttcctgtttcaatctcaaacctttcagtttatcttgaatacctctatcttgattttaatgcaatatctggaagcttgcctgaagagattggtaacctcgttaggttagaagctcttctactccataacaactctttcacgggaattcttccgtcatcgttgggcaggcttaaaaatctgcaagttttatatatagacaataataaaataagtggatcaatcccattagccatagggaatcttacagaactaaattatttccgccttgatgtgaatgccttcactggtaggataccaagtgcacttggaaacctgacaaacctagtggaactaggtctttcaagcaataatttcacaggttctattcctgttgaaatatttaagattcacacgttgtcgttaactttggatatatccaataacaacttggaaggatcaataccacaagaaatcgggggcttgaaaaatcttgttcaattctatgcagattccaacaagttatcaggtgaaatccctagcacccttggtgaatgccaacttctccagaatatatctctccaaaataatttcttgagcggtagcgttccatcactcctgagtcaattgaaaggtctacaaattcttgatctttccaataacaacttgtcaggtcaaatacccacattcctgtcaaaccttaccatgctcagttatctcaacctttcattcaatgactttagtggtgaagtaccaacttttggtgtcttttcgaatccttccgcaatttccatccatggaaatggcaaactttgtggtggcataccagatctacatttgcctagatgctcttcacagtcaccacacagaaggcaaaaacttctggtaattcctattgttgtttctcttgctgtaacattactactcctcttattgctctacaagcttctctattggcgtaagaatataaaaacaaacatcccatctaccacatccatggaaggccatcccttgatctctcactcccagctggtaagagcaacagataatttctcagcaaccaatttgttgggatcaggatcatttgggtctgtgtacaaaggagaaataaataatcaagctggtgaaagtaaagatatagctgtgaaagtgctaaaactccaaacccctggcgcactcaaaagtttcatagccgaatgcgaagcactgcgaaacctatggcatcggaaccttgtcaaaataattacagcttgctcaagcattgataacagtggcaatgacttcaaagcaattgtgttcgagttcatgcctaatggcagtttagatggttggctacatcctgacaataatgatcatacagagcaaaggtacttgaatatcctggaaagagtgagcatactccttgatgtggcttatgcattggattatcttcattgccatggccctgcccctgtgatacattgtgatattaagtcaagtaatgttctcttggattctgacatggtggctcgtgttggagactttggacttgcaaggattcttgatgagcaaaactcagttttccaaccctcgacgaactcaatactatttagagggacgattggctatgctgccccaggcgtcgccggcgaacctgatagaccgcaatgctcagaggtttcagcacatccgtgctcgcggcggcgtcaggacactggatcggacgctgaacgatgcatgcggcatgcccgatctgctagctcaggatggtggccggcgactgtccgcacgctctcctgcgggcatgacttccacgaggattgcaacatcgcgaagtggctccgtgacaacaagaaggcctgcccagttcattctgcttgtaatattcagttgtatgaatatggtgctgggaatactgtgtcgacgcaaggtgatatttacagctacggcattcttgtgttggaaactgtaactgggaagaggcccagtgacagcgaatttacacaaggattgagcctctgcgagtctgtaagtctgggtttacatggtaaagtgatggacattgttgacaacaagctgtgtctgggcattgatcagcatgatcctgagacaaccgatgatttttcaagcaagcaaaagatcgattgcctgatttcattacttagactaggactttcttgctcccaggaaatgccatcgagtagattatcaactggagatatcattaaggaactgcatgcaatcaaggaatctctcttgctggaaatagaggatacagaaaaatga

SEQ ID NO: 47388 - DNA, 345 bp, Oryza sativa
  Clone ID: PAT_MRT4530_50161C.1
atggcgttggtgggaacatcaccctatccgcccatctattcctcccatccatctattgcacgtgaaattatatttttgcccttccacctctattctccaagaggcaccgtatcagggacagaattggtacctcacggtaccaaactctaccagatccaatggccgggatttgataccgtaagtgtggccatctcgctcggccaacaagcgacaccgaggccggtctcgcattttcgccttacgagtttgcccgtgtcatcacgcttccatcagtatcacgcgttcgtcctacgatttcgtcatgatttcgcactacccaaccgggacaacggtttatttgtgtaa

SEQ ID NO: 47389 - DNA, 1197 bp, Oryza sativa
  Clone ID: PAT_MRT4530_50162C.1
atggtcccggcgttggtgcaggagctattagccaccgtgcaggagccacccggccggttcgtgcagccggagcagcaccgccccgacgccgctcctcccgcatcgtttcccattgtcgaccttggccgactgtcctcgccatcgccagatgatgacggcggcggcgacgaagccgccaagctccggcgagcgctcgattcttggggactcctccaggttactaaccatgggatcgaagcttctctgatggacgaactgatgagcgcgtcaaaagagttcttcagacaaccactccagatgaagcgagaattcagcaatctgaatgacggcgagcaattccgggccgaagggtacgggaatgataaggtgaggagcaaggaccagatcctggactggtctgattggatctacctcaaagtggagcctgaagacgagaggaatctcgcactctggccaaaacatcccagttctttcagggatgccctgcatgagttcgtggtgagatgcaggagggtgaaacgcgacgtccttagagcgatggcgaggatcgcggggctggacgacgacgatcagcacttcgtcgatcagctcggcggcagggcgaccgtgcatgcccgattcaactactacccgccgtgcccaaggcccgatctcgtgatgggcataaagcctcactccgacggcacggtcatcaccgttctcctggttgcccgcggcgccgacgggcttcaggttctcaggtatggggtctggtacagcgtgccatcatcgagcactcacgccttgctgatcaatgtaggggaatccacggagccgtgcgccgccgccgttccggtcgtcgtcgtcgctcggggaggttgccatcgtggtcgccaagtcaccgccgtcctcgtccgccccttcgccgccgctgtagatcgccggagcaccgccgtcgtcatcaagccgaagaccgccgccgcttcttcctcgtcgccgtcgccgtccgttgatcttccgccgacgttttggtcatcgcggagtcgacgggagaaggggcggtggctgctgggcagagtcggcggcggccagatgggggcggcggccgccgccgggctggggaggcaacggcggcccgcgacaggaggaggtagtggcccgcggcaggtggcaggctgcgagcgggaggcggcggcctgcggcatgcggaggacttga

SEQ ID NO: 47390 - DNA, 1398 bp, Oryza sativa
  Clone ID: PAT_MRT4530_50163C.1
tcaagtcctccgcatgccgcaggccgccgcctcccgctcgcagcctgccacctgccgcgggccactacctcctcctgtcgcgggccgccgttgcctccccagcccggcggcggccgccgcccccatctggccgccgccgactctgcccagcagccaccgccccttctcccgtcgactccgctcaataccaccacggtacctcagaaaggagctgtgacagtacccctcgcacaacacaatccaccgcagcgcaccattccctgatgacgtcagcggtgacgtcaccaccggcggcggctcgggcttgcacactcgccggcgaacgacgcttcggcacgaacggagggcaccaggacgtagagcgcgacgcggcgaactcaccgatgaccaaaacgtcggcggaagatcaacggacggcgacggcgacgaggaagaagcggcggcggtcttcggcttgatgacgacggcggtgctccggcgatctacagcggcggcgaaggggcggacgaggacggcggtgacttggcgaccacgatggcaacctccccgagcgacgacgacgaccggaacggcggcggcgcacggctccgtggattcccctacattgatcagcaaggcgtgagtgctcgatgatggcacgctgtaccagaccccatacctgagaacctgaagcccgtcggcgccgcgggcaaccaggagaacggtgatgaccgtgccgtcggagtgaggctttatgcccatcacgagatcgggccttgggcacggcgggtagtagttgaatcgggcatgcacggtcgccctgccgccgagctgatcgacgaagtgctgatcgtcgtcgtccagccccgcgatcctcgccatcgctctaaggacgtcgcgtttcaccctcctgcatctcaccacgaactcatgcagggcatccctgaaagaactgggatgttttggccagagtgcgagattcctctcgtcttcaggctccactttgaggtagatccaatcagaccagtccaggatctggtccttgctcctcaccttatcattcccgtacccttcggcccggaattgctcgccgtcattcagattgctgaattctcgcttcatctggagtggttgtctgaagaactcttttgacgcgctcatcagttcgtccatcagagaagcttcgatcccatggttagtaacctggaggagtccccaagaatcgagcgctcgccggagcttggcggcttcgtcgccgccgccgtcatcatctggcgatggcgaggacagtcggccaaggtcgacaatgggaaacgatgcgggaggagcggcgtcggggcggtgctgctccggctgcacgaaccggccgggtggctcctgcacggtggctaatagctcctgcaccaacgccgggaccat

SEQ ID NO: 47391 - DNA, 239 bp, Oryza sativa
  Clone ID: PAT_MRT4530_50164C.1
agcagttgtcatagctgcaggtgagctagagctcaaacaagacgacgaagaagaaggcgtcggtggcgaccaccataactgcgatggccatgcttaagccgtccaagatcgtggcgcggtcatcgccggcgccgacagggagcggcagggcgcctagcatctccctgaagagcctgggcacgaagggcatgtctgtgtccacgacgtatgcggccgcggcgcccgaggcggcggcggct

SEQ ID NO: 47392 - DNA, 564 bp, Oryza sativa
  Clone ID: PAT_MRT4530_50165C.1
ttacgcctctccacgcgcaatcctatcctcctcctcgctcctctccgcgtgtactggcgccgcaggccgcagccttgctccagcgctactctcgctggagccgaggttgtccccttccgccgcccacgctgacttcttttccaacagccgccggatcctacttcttcgccatccgccgtggccggagccaaggtcggtcccttccgccgccaccaccaccgccaccgcgcactccaccgctgccgtggtcttccccatcggccacgcccggagtcgacgtcgtccccatccgccgtcgccgccgccgacggagtggtcgtccccagccgccgcggatttgtaaattattgtctttttgacagtattccgttcgactctcgcgtcgctgcccccatcgctgcatcccgagaagagcctacctctggtggtgtcgttgtcgccagccgccatggccagatgtggaccgggatcgtacgtcttcaccgccgccgaagtatctgccagacggccaccaccatcgcgggcgtcaccagcagaagaggcaatgacatctctactcaccat

SEQ ID NO: 47393 - DNA, 145 bp, Oryza sativa
  Clone ID: PAT_MRT4530_50166C.1
cacgaggcaacaaagatcctggcatctctccagtaatcctcctcctgctgctcagctgcgtgttctgtaatcccctcctttcctatgcttatctatgagaaggaagatggctgggtgtcagaggcttcttcaatgttctcctcct

SEQ ID NO: 47394 - DNA, 536 bp, Oryza sativa
  Clone ID: PAT_MRT4530_50167C.1
cggcgtcccgcccaacgcgtccgaaagatccccaatgtggatttctgatttcgtctgcttcacgtaccggagtatcaaaagtgatcttcgacacaaggaacatgaatgcacgatggagctatctctgctggcacaataagactgtcattatgggaactatttttggatcccacagggctactccagtagatgtttgtggtaaccactggattcgctggaacaccctggaggtctcttgtacgccatgggaattgtcttctgggagaaaacttgctgtgtacacaatgttgttaacagtggacgattctcgtgcgtgtgctgttgatgctataatcaggtgtagtaccacgtggccgacgatggtatgccacgctggtactgttacagtccataatataggtgctgtaccatgccaaggccagaagggaacatgttcaggataaagtacccgtttggacacttgtagttggaaagtaaggttggtgactgtatgcatatggcttgcaatttacagtggattgtacataaaatttttg

SEQ ID NO: 47395 - DNA, 467 bp, Oryza sativa
  Clone ID: PAT_MRT4530_50168C.1
tttttgtttttttttttttttttttttttttttttttttttttttttttttttttttttttttccaccaaatttccgatttgtcctcccgaaaatcctccaattttccatactgtccctaacaagcagggtaaaggaaaaatgatttcctcccccatggtttttttccccccgggctcttttttttttcccaattttttgagaattcctccaaactttttttaagaaaaatcaaaaaatgggcaaaaaatcgggccgggttaaaattttggccattgattggcctaccggggttttactaaaggggcccttcctggtgggggcaatcagtttcaattttagccaggaagactgttaggggcaattgcccctttgccctccccgggagatttaaaacattttccccccttttccgggcccgggaaagaggttatcttttctgcatcttcctgggaatagcctcctttg

SEQ ID NO: 47396 - DNA, 149 bp, Oryza sativa
  Clone ID: PAT_MRT4530_50169C.1
aacccaagaccggtttagaacatgtacccgtcacactaaacgcgctgcgcaagtggagagaaaccctgaaaatccgagacacctctcgcaagatagcgcgcgtccatcagaggaagcagtcgatcgccgcgctcaaccttgtctcatag

SEQ ID NO: 47397 - DNA, 136 bp, Oryza sativa
  Clone ID: PAT_MRT4530_5016C.1
gttttctcccatacaaaggacgcagaggctgatcagtcaagcgcagacgcaaaccgcagcatatggcctgctagagtccgacaactggattcatgtccatgactacatgaactacgccactgtctactagtcagat

SEQ ID NO: 47398 - DNA, 726 bp, Oryza sativa
  Clone ID: PAT_MRT4530_50170C.1
atggctctcctcgtcgacaacaacctgttgctccgcgtgctcgacccggcgtccggcgccgctcccctcgtccccgactacgaggtccaccccatcaactactcgttcacgctcgtgcggaccgcgtcgacgggggactacaaggtgcttcgcatcacccacgacgtagcgctgcagccgcgcgagcggcagtacgtggccgtcgtcgacggagtcgcctacttcgtgctgcgcgacgaattcttgctcagcgagactggcggcggcgactggatcacggcgttcgacgtggaggcggagcaatggcgacccgaactcgtcggcggcccgccggagaccttccacaaccgcctccgcgtctccctggccgcactgaggggctccttggtggtggcccaagacgaccaccaagctggcaccctggacctgtggttcctcctcgccggcgacggcggcaaggtggggccgcagcattggtcgaagctgtacacggtgaccatgccataccacggacggccattccggttggacggagaacgcgcggagccggtggtggtgctcgacgacgggaggatcgtcttctgggtgtgggagcgccgtgtcagttcacgcggcggcgtgatgcgggtgtacgatccgaacaccggcggtcaaacggacgtggcggcggaggccaattgcgtccatgttggcgtgtacacggggagcttgcttcgtcctcggtga

SEQ ID NO: 47399 - DNA, 2231 bp, Oryza sativa
  Clone ID: PAT_MRT4530_50171C.1
ttcttcttcctggcttcctgctcagtcgacttggtgggaattccattcccctgcagttgcaatgcttgggtgaatccagctccgtcgtcgccatccccacccccacccgcaccggagaatgagcagctcatccaatgcacttgtgcagcactactactcttgcaagcccccaccgccccccagattagtactagtaccattcttcttctccggctccggctccggcaccaacaacaccgcctcctcccctgctgctgcatcctccacgcacactcacactcacactgcagatgccaacgcccagctggacgcacacctcctttccctcctccgcgacggccacaccgacgccgcctaccacctcttcgcctccaacccctccctccccctctcccctgtctccgcctcccgcctcctcgcccagctctcctattcttccttctcccgcgcctccgccctcctccaccgcctccgcgcccgccaagccctccacctcctcgacgccaactccctctccctcgcctcctccgcctccgcccgctccaacaacccccacctcgcctattccctcctcctctccatgctccgacgcggcctcctccccgaccgccgcgcctacaccgccgccctcgcgcgcctccccccttcccgcgccctccgcctcttcgacgccctcctccaccacctccgccaccaccacaataaaactaattccctccccgacaccgccgccttcaacgccgcgctcagcgcctgcgccaacgccggagactgcatccgcttccgccacctcttcgaccagatgcccgcctggaacgcgccgcctgacgcgctcacctacaacgtcctcatcaagatccacgaccagcagagctgtgtgctggaggacatcgtcaagccgtgggaacaagaggaggtgccgctgctccccaaggcttacccgcccaactccagagtgtacaccacgctcatgaaggggtacatgaacgccgggcgcgtgcaggacgtggtggccatgctgcgcgcgatgcggcgagagggagagacgtcgccagcgagccgccccgaccacgtcacctacaccacggtcatctccacgctggtggcggccggggacatggagcgagcgcgcgccgtgctggaggagatggggcaagcaggggtggcagccagccgcgtgacatacaacgtcctcatcaagggctactgccagcagctgcaggccggaaaggccaaggagctcctcgccgtagacatggctgaggcgggcatccagcccgacgtggtgacgtacaacacgctcatcgacgggtgcgtgctgacggacgacagcgcgggcgcggtggcgctgttcaacgagatgcgcgagcggggcatcgcgccgtcggcggtgagctacacgacgctgatgaaggcgttcgcggcgtcggggcagccgaagctggcgcacaaggtgttcgatgagatggagaaggacccgcgggtggcagtggaccgggcggcgtggaacatgctggtggaggcgtactgcaggctggggctgctggagtcggcgaagaaggtggtggagaggatgaaggcgcggggagtgcagccggacgtggcgacgtacgggagcctggcgaaggggatcgcggtggcgaggcggccgggggaggcgctgctgctgtgggaggagataaaggagaaggaggtggacggggaggtggtggaggcgctggcggacgtgtgcgtgcgggcggcgctgttcaggaaggcgctggagatggtggcgaggatggaggagatgggggtggagcccaacaaggccaagtacaagaggatgtacgtggacctgcactcgcggatgttcaccagcaagcacgcgtcgcaggcgaggcaggatcggaggcgggagaggaagcgcgccgcggaggcattcaagttctggctcggcctccccaactcctactacgccaccgactggcgcctccaagacgacggcctcaactaacaccctactatatactactaatgataatgttaaatcttaacacatgttttatgtactactcctacagtccatgaagctacttgcttcccttgctcattatgtacaacttcatagtaatttattttccagcaaaaaaaaaacatagcgacatatatactgatagtgataggggtagcaacgctgttaccgaggagccgggacgaaatggaacaagagattttcctttattgatttgtta

SEQ ID NO: 47400 - DNA, 5814 bp, Oryza sativa
  Clone ID: PAT_MRT4530_50172C.1
atgggtcctgtctccggcatcgacgacctcgtcttcccacccgggcagacgtttcggttcggcagcctcgacttcgtcaccaacaacttcggcaagatctctctccttgactcggagtcggaccagtcgggagagaaccagatttcggccccgtttggactcccaaacgcggctgaaagttacttcaagaccatctcaatcgagtcggcttcaaaccactcgggcgagatcgcatcttcaccaacctcaccagatcaagacgagggggcttacccaccgatcctgatgaagctccccgacgatttggcggccgtctccatcacgacagcatctccatcccgtaggcctaggcggaagtcggcttcaacaccgatttcgcctagcttcagggaagtcggcgtcatcctccaaccactcggcacggtttcgacggatcagctggacggccactacagctctcccaccgtccactcgcgccccaccgacatcgtggagtacgacgagtttacctctcgctacaacgacccggatctcgacgacttcgacggaagcctagatgacaactacactcctctctacttcggcgtcttcatggccaataacgagacggaggagcaacgccaagcccgggagaacgaagcgcgtcacgagactgagcgtcgccgactggaggaggagcatcaagcacaagaacaagaacggctacggcgtgagcagcaggagcgtgagcggaccgcgaaggaggctgaggatcgacggcagcgagctttagaagcagggcgccgagcgcgtgatctcatcggccaacaagatgttgaagggacaccggttttccgcaccccccaacagaatgcggttgccgcgatcaccctcctcgacaccctcctcagggaaaacgagctcaatcaatctgatcacgttgtcaacatcttgaaccagacgaagaccatgattgcggcttcgcgccgagcagctcgaggctatcatcactcgccggaccgccacgacgacgaccttgacggagtagcagccttcaccgacgacctgcgtcgagtggattggccagccggcttcaagccgactggaatagagaagtacgacggtaccactaacccagaatcgtggcttaccgtctacggtctcgcaatccgcgcagcaggaggagacagcaaggccatggcgaactatttaccagtggctttagcggattccgcccgatcttggctccatggattgccccgtggtacaattggatcttgggctgaattacgcgaccacttcatcgccaacttccaaggcaccttcgagcgtcccggcacacaatacgacctctacaacgttattcagaagtccggagaatcccttcgagattacatccggcgattttctgaactacgtaacaagatctccgatatcaccgacgacgttatcatcgccgcattcaccaaagggattcgccacgaagaattggtcggcaagttcgggcgtaagccacccaggacagtcaagcttatgtttgaaaaagccaacgagtacgctaaagctgaagacgccgtcaccgcatcaaaacagtcgggtcccagttggaagccaaaaaaggatacgccggcttcgggaggaggtggaagtaacaatcataaagaccgcaagcgtaagcctgcggaacttgttgcaaccgccagtcactcttctcgacagcgttcgcgcgtcaacacgttcgacaagatcatgaactcccaacgcccgcaccatcctaactccaaccacgtggccaaagattgtttcgtctacaagcaattcgcggatcaatacactaagactacgcggaagaaccccgacgaagaacaaagcacgtcgaggaagaaggacgacggcgacaccccggcaggatttcaagaccaccgcaaggagcttaaccatatcttcggtggccccctggcttatgagtctaaaaggaagcaaaagttgaccgaacgggagatcaatgctgttcagcccgacacgccccaatatcttcgatggtcagagattgcaatcaagtttgaccgctcggatcatcctgaccgagtggtccacccggggcggtaccccctggtactagatccagtggtccgtaatgtcaagcttcgcagaaccctcatcgatggtggcagtgcactcaatatcctcttcgccaagaccttggatgatatgcagattcctcgctccgagctaaaaccaagcaatgcgccttttcacggagtaatcccaggactatccgcaactccactcggccagatcaccctcccggtcacttttggcactcgggaaaacttccgcacagagaatatcagctttgaagtcgccgatttcgagactgcataccatgccatactcggacgcccggcgttagccaagttcatggccgtcccgcactacacttacatgatgatgaagatgcctggtccccgaggagttctatccctacggagcgacatcaagcaagccgtcacatgcgacaaggagagttgcgacatggcccaaacccgcgagatggcgtctgcccgagaggatatccgactggctgcagccacggcgagcgaaggagaagtgccagctaccaagacttcaaaaagtgcagaaagcgaggccaagactaagaagattcccctagatccttctgatcctactaaaactgctaacaataaagatatatttgcttggaaaccatctgatatgcccggtattcctagagaggtgattgagcactccttacatgtcaaagaagatgccaagcctatcaaacaacgactccgccgattcgcacaagacaggaaggacgcgatcaaggaggaattaaccaagctgttagcagcaggcttcatcaaagaagtccttcatcccgactggctggcaaacccggttctagttcggaagaaaacggggcaatggcgcatgtgtgttgattatactgacctcaacaaatcttgccctaaggatccttttgggttgcctcgcattgaccaggtagtcgactcgaccgccggctgtgagcttctcagttttttggactgctattcggggtatcatcagatccgactgaaggaatccgactgtttgaaaacttcattcatcacgccctttggagcatactgctacgtcaccatgccgttcggactaaaaaaggcaggagcaacttatcaacgtatgatccagagatgcttctcaacgcagatcggtcgcaacgttgaagcctatgtggatgacgtagtcgtcaagaccaagcaaaaggatgatttgatctcggatctagaagaaaccttcgcgagcatccgcgctttcaggatgaaattaaaccctgaaaagtgcacctttggagtaccgtcagggaagctgcttggttttatggtgtctcataggggcatccaagccaacccggagaaagttaccgctatcctcaacatgaaaccgccaagtacccagaaagatgttcagaagctgactggatgcatggcggcgctcagccgatttgtttcaagacttggcgagcgggggatgcccttctttaagctactgaagaaaacagatgatttccagtggggacccgaagcacagaaggccttcgaagatttcaagaaactcctcaccgaaccaccagtcctagcttcaccacatccgcaggagccgttgttgctgtatgtatcagccacctcccaggttgtgagctcagtcttggtcgttgagcgcgaggaagaaggccatgtccagaaagtccagcgaccgatttactttgtcagcgaagtcctagccgactccaaaacgaggtaccctcaggttcagaagctgttatatggtattctaatcactaccaggaagctatctcactactttcaaggtcactcggtaacggtggtcacatcatttccactcggtgatatactgcacaaccgcgaagcaaacggacggattgcaaaatgggctttggagttgatgtctttggacatatcattcaagccccgaatttcaatcaagtcccaagcgttagctgattttgtcgccgaatggaccgagtgccaggaggatacccccgcggagaagatggagcactggaccatgcattttgacaggtcaaaaagactttcgggcactggagcaggagtggttttgatttccccaactggagaaagattaagttatgtgctttggatacatttttcggcatcccacaacgtcgccgagtatgaggccctccttcacggactgcggattgcaatttccctagggataaagcgtctaatagttcgaggtgattcacagttggttgtcaaccaggttatgaaagagtggtcctgccttgacgacaatatgatggcatatcgacaagaggtacgcaaattggaagacaagttcgatggactcgagctcagtcacgttcttcgacacaacaatgaagccgctgacagacttgccaactttggatccaagcgcgaggtggcgccctctgatgttttcgtcgaacacctttatacgccgacagtacctcccaaagatactactcaagtcgcgggcactcatgacgtagctatggttgaagccgactggcgagagcccctcatacgatttttgacttctcaagaactcccccaagacaaagatgaagccgagcggatttcaaggcggagcaaactttatgttatgcatgaagctgagttatacaagaaaagcccttcaggaattctgcaacgctgcgtatctttagaggaagggagacaattgctgaaagacatacattctgggatatgcggaaaccatgctgctgcacgcaccattgtcggcaaagcttaccggcagggttttttctggcctactgcagtgtccgacgccgacaaaattgtgcgcacatgcgaaggttgccaatttttcgccagacaaattcatctaccagctcaagagttgcagaccatcccgctgtcttggccgtttgcggtttgggggctcgacatggtttgctcgtttaaaaaggcagtcggcggttacacgcatctctttgtggccattgataaattttccaagtggattgaagctaaaccggttgccacaataacagcaaataacgctcgagacttcttcatcaacattgtacatagatttggagtgcccaatcggatcatcactgataatggcacacaattcactggcggagtttttaaagacttttgtgaggactttggaattaagatttgctatgcctcagtggcacaccccatgagcaatggacaggtggagcgagccaatggcatgatacttcaagggattaaagcgcgtgtttttgaccggctaaaaccctatgccggcaaatgggtgacacagctgccatcagtactttggtctttgcgaactacacccagtcgggccacaggccagtcacctttcttccttgtctatggggcagaagcaatgttgccgagtgaagttgaattcgagtctttgcgctttcgaaatttccgtgaagaacgctacgaagaagaccgagtggatgatttgcaccgattggaagaagtccgcgaggcagctttaattcggtcggctcgatacttacaagggttgcggcattatcataatcgcaatgttcgatcccgtgcttttttagtcggtgacctggttttgaggaaaattcaaactacacgagatcggcacaagttatctcctctatgggaagggccatttatcatctctgaagtcacccgaccaggttcttatcgactcaagcgcgaagacggtactatcgtcgacaattcttggaacattgaacatcttcgtcgtttctacgcttaa

SEQ ID NO: 47401 - DNA, 174 bp, Oryza sativa
  Clone ID: PAT_MRT4530_50173C.1
atgtggcggccgcgctcctgccggagacggtgccgctgccgcgttctcgccacgccggccacgctatgcacggcggaggagcactcccagggtatccgcttcgtgcgtgccgttaacctcgacctccgactctccgactcatcgatttccgaatttgatcctagcagcctatag

SEQ ID NO: 47402 - DNA, 113 bp, Oryza sativa
  Clone ID: PAT_MRT4530_50174C.1
atgcctgccggcttcaccatcaccatgctcctcgagatcagcatttacacactcactcaagcaaagataataatgagctataaacttactgtaaggttatgtggagctgagag

SEQ ID NO: 47403 - DNA, 5670 bp, Oryza sativa
  Clone ID: PAT_MRT4530_50175C.1
atgggttctgtctccggcatcgacgacctcgtcttcccacccgggcagacgtttcggttcggcagcctcgacttcgtcaccaacaacttcggcaagatctctctccttgactcggagtcagaccagtcgggagagaaccggatttcagtcccgtttggactcccaaacgcggctgaaagttacttcaagaccgtctcaatcgagttggcttcaaaccactcgggcgggatcgcatcttctccaatgtcaccagatcaagatgatgaggcttacccaccgatcctgatgaagctccccgacgatttggcggccgtctccatcacgacagcgtctccatcccgtaggcctagacggaagtcggcttcaacaccgatttcgcctagcttcagggaagtcggcgttatcctccaaccactcggcacggtttcgacggatcagctggatggctactacagctctcccaccgtcgactcgcgtcccaccgacatcgtagagtacgacgagtttagttctcgctacaacgacgcggatctcgacgacttcgacggaagcctagatgacaaccacacccctctctacttcggcgtcttcatggccgataacgagacggaggagcaacgccaagcccgggaaaccgaagcacgtcgcgagactgagcgtcgccgactggaggaggagcgtcaagcacaagaacaagaacggctacggcgtgagcagcaggagcgtgagcgaaccgcgaaggaggctgaggaccgacggcagcgagccttggaagcaggccgccgagcacgtgatttcatcggccaacaagatgttgaagggacaccgattttccgcacccctcaacagaacgcggttgccgcgatcaccctcctcgacaccctcctcaaggaaaacgagctcaatcaatctgatcacgtcgtcaacaacttgaaccagacaaagaccatgattgcggcttcggtcccagttaactccgaaagcgtccgcacgccgactggcagccgactcccccacttccgatctcatgactaccgttatccaagcctcagcatcactggcgcaggatccaatcgcaggagcaggggtcacgacgagcggtccgttcactcgcctcccgaccatcatagggagcgccgagtggaacggcctcgctcaccacctcgtcgccgccccgtcgatcttcgcgacacaatcatacagcgccgagcagctcgaggccatcatcattcgtcggaccgccacgacgacgaccttgatggagtagcagccttcaccgacgacctgcgtcgagtggattggccagccggcttcaagccgactggaatagagaagtacgacggcaccaccaacccagaatcatggcttaccgtctacggtctcgcgatccgcgcagcaggaggagatagcaaggccatggcgaactatttaccagtaactttagcggattccacccgatcttggctccatggattgctccgtggtacgattggatcttgggccgaattacgcgaccacttcatcgccaacttacaaggcaccttcgagcgtcccggcacacaattcgacctctacaacgttgttcagaagtccggagaatcccttcgagattacatccggcgattttctgaacaacgtaacaagatctccgacatcaccgacgacgttatcatcgccgcattcaccaaagggattcgccacgaagaattggtcggcaagttcgggcgtaaacctcccaggacagtcaaacttatgtttgaaaaagccaacgagtacgccaaagccgaagacgccgtcaccgtatcaaagcagtcgggtcccagttggaagccaaaaaaggatacgccggctacgggaggaggtggaagtaacaatcataaggaccgcaagcgtaagcctgaggaacttgttgcaaccgccattcactcttctcgacagcgttcgcgcgtcaacacgttcgacaagatcatgaattcccaatgcccgcaccatcctaactccaaccacgtggccaaagattgtttcgtctacaagcaattcgcggagcaatacaccaagactacacggaagaactccgacgatgaacaaagcacgtcgaggaagaaggacgacggcgacaccccggtaggatttcaagaccaccgcaaagagctcaaccatatcttcggcggccccctagcttatgagtctaaaaggaagcaaaagttgaccgaacgggagatcaatgctgttcagcccgacacgccccaatatcttcgatggtcagagattgcaatcaagtttgaccgctcggatcatcctgaccgagtggtccacccggggcggtaccccctggtactagacccagtggtccgtaatgtcaagcttcgcagaaccctcatcgacggtggcagtgcactcaatatcctcttcgccaagaccttggatgatatgcagattcctcgctccgagctaaaaccaagcaatgcgccttttcacggagtaattccgggattatccgcaactccactcggccagatcaccctcccggtcacttttggcactcgggaaaacttccgcacagagaatatcagctttgaagtcgccgatttcgagacagcataccatgccatactcggacgcccggcgttagccaagttcatggccgtcccgcactacacttacatgatgatgaagatgcctggtccccgaggagtcctatccctacggagcgacatcaagcaagccgtcacatgcgacaaggagagttgcgacatggcccaaacccgcgagacggcgtctgcccgggaggatatccgactggctgcagccacggcaagcgaaggagaagtgcccgctaccaagacttcaaaaagtggagaaagcgaagccaagactaataagattcccctagatccttctaatcctactaaaactgctaacaataaagatatctttgcgtggaaaccatctgatatgcccggtattcctagagaggtgattgagcactccttgcatgtcaaagaagatgccaagcctatcaaacaacgactccgccgattcgcacaagacaggaaggacgcgatcaaggaggaattaaccaagctgttagcggcaggcttcatcaaagaagtccatcatcccgactggctggcaaacccggttctagttcggaagaaaacggggcaatggcgcatgtgtgttgattatattgacctcaacaagtcttgccctaaagatccttttgggttgcctcgcattgaccagatcggccgcaacgttgaagcctatgtggatgatgtagtcgtcaagaccaaacaaaaggatgatttaatctcggatctagaagaaaccttcgcgagcatccgcgctttcagcatgaaattaaaccctgaaaagtgcaccttcggagtaccgtcagggaagctgcttggttttatggtgtctcataggggtatccaagccaacccggagaaagttactgctatcctcaacatgaaaccgccaagtacccagaaagatgttcagaagctgactggatgcatggcggcgctcagccgatttgtttcaagacttggcgagcgggggatgcccttctttaagctactgaagaaaacagatgatttccaatggggacccgaagcacagaaggccttcgaagattttaagaaactcctcaccgagccaccggtcttagcctcatcacacccgcaggagccgttgttgctgaagctatctcactactttcaaggtcactcggtaacggtggtcacatcatttccactcggtgatatactgcacaaccgcgaagcaaacggacggattgctaagtgggctttggagttgatgtctttggacatatcattcaagccccgaatttcaatcaagtcccaagcgttagctgattttgtcgccgaatggaccgagtgccaggaggatacccctgcggagaagatggagcactggaccatgcatttcgacggatcaaaaagactttcgggcactggagcaggagtggttctaatttccccaactggagaaagattaagctatgtgctttggatacatttttcggcgtcccacaacgtcgccgagtatgaggcgctccttcatggactgcgaattgcgatctccctagggataaagcgtctaatagttcgaggcgattcacagctggtcgtcaaccaagttatgaaggagtggtcctgccttgacgacaacatgatggcatatcgacaagaggtacgcaaattggaagacaagttcgatggactcgagctcagtcacgttcttcgacacaataatgaagccgccgacagacttgccaactttggatccaagcgcgaggtggcgccctccgatgttttcgtcgaacacctttatacgccgacagtacctcacaaagatactactcaagttgcgggcactcatgacgtagctatggttgaagtcgactggcgagagcccctcatacgattcttgacttctcaagaactcccccaagacaaagatgaagccgagcggatttcaagacgaagcaaactttatattatgcatgaagctgagctgtacaagaaaagcctttcagggattctgcaacgctgcgtatctttagaggaagggagacaattgctgaaagacatacattctgggatatgcggaaaccatgctgccgcacgcaccattgtcggcaaagcttaccggcagggttttttttggcctactgcagtgtccgacgccgacaaaattgtgcgcacgtgcgaaggttgccagttttttgccagacaaattcatctaccagctcaagagttgcagaccatcccactgtcttggccgtttgcggtttgggggctcgacatggttggcccgtttaaaaaggcagtcggcggttacacgcacctctttgtggccattgacaaattctccaagtggattgaagctaaaccggttgtcacaatcacagcagataacgctcgagacttcttcatcaacattgtgcatagatttggagtgcccaatcggatcatcactgataatggcagacaattcactggcggagtttttaaagacttttgtgaagactttggaattaagatttgctatgcctcagtggcacatcccatgagcaatggacaggtggagcgagccaatggcataatacttcaagggattaaagcgcgagtttttgaccggctaaaaccctatgccggcaaatgggtggaacagctaccatcagtactttggtctttgcgtactacacccagtcgggccacaggccagtcaccttttttccttgtctatggggcagaagcaatgttgccgagtgaagtcgaattcgagtctttgcgctttcgtaatttccgcgaagaacgctacgaggaggaccgagtggatgacttgcaccgactggaagaagtccgcgaagcagctttgattcagtcggctcgatacttacaagggttgcgacgttatcataatcgcaatgttcgatcccgtgcctttctagtcggcgacctcgttttgaggaaaattcaaactacacgagatcggcacaagttatctcctctatgggaagggccatttatcatctctgcagtcacccggccaggttcctatcgactcaagcgcgaagacggtacactcgtcgacaactcttggaacatcgaacatcttcgtcgtttctacgcttaa

SEQ ID NO: 47404 - DNA, 3588 bp, Oryza sativa
  Clone ID: PAT_MRT4530_50176C.1
atggcgaactatttaccagtggctttagcagattccgcccggtcctggatccatgtattgccccgtggtacaatcggatcttgggccgaactacgcgaccacttcatcgccaacttccaaggcactttcgagcgccccggcacacaattcgatctctacaacgttattcagaagtccgaagaatctcttcgagattacatccggcgattttctgaacaacgcaacaagatctctgacatcaccgacgatgttatcatcgccgcattcaccaaaggaattcgtcacgaagaattggtcgacaagttcgggcgtaagcctcccaaaacacgttcacgcgtcaacacattcgacaagatcatgaactcccaatgcccgcatcatcctaactccaaccacgtggccaaagattgtttcgtctacaaacagttcgcggaacaatacaccaagactacacggaagaactccgacgaagaacaaagcacgtcgaagaagaaggacgatggcgaccccccggcaggttttcaagaccaccgcaaggagcttaaccacatcttcggtggccccttggcttatgaatctaaaagaaagcaaaagttgaccgaacgggagattaacgctgttcagcccgacacaccccaatatcttcgatggtcagagacagcaatcaagtttgaccgctcggatcatcccgaccgagtggtccacccggggcggtaccccctggtactagacccagtggtccgtaatgtcaagcttcgcagaaccttcatcgacggtggcagtgcactaaatatcctcttcgccaaaaccttggatgacatgcagattcctcgctccgagttaaaaccaagcaatgcgccttttcacggagtcattccagggttatctgcaactccactcggccagatcacccttccggttacctttggcactcgggaaaacttccgcacggagaatatctgcttcgaagtcgccgatttcgagacagcgtaccacgccatactcagacgcccggcgttagccaagttcatggccgtcccacactacacttacatgatgatgaagatgcctggtccccgaggagtcctatccctacggagcgacatcaagcaagccgtcacatgcgacaaggaaagttgcgagatggcccagactcgcgagatggcgtctgcccgagaagatatccgactggctgcaaccacggcaagcgaaggagaagtgcccgcgaccaaggaaagcgcgctcgtcacctttcttcaaaataataaagatatctttgcgtggaaaccatctgatatgcctggtattcctagagaggtgattgagcactccttacatgtcaaagaagacgctaaacctattaaacaacgactccgccgcttcgcacaagacaggaaggacgcgatcaaggaggaattaaccaagctgttagcagcaggcttcatcaaagaagtccttcatcccgacaggctggctaacccggttctagttcggaagaaagctgggcaatggcgcatgtgtgtcgattataccgacctcaacaagtcttgccctaaagatccttttgggttgcctcgcattgaccaggtagtcaactcgaccgccggctgtgagctactcagttttttggattgctactcggggtatcatcagatccgactaaaggaatccgactgcttgaagacttcattcatcacgccctttggggcctattgctacatcaccatgccattcggactaaaaaatgcaggagcaacttatcaacggaagctgcttggttttatggtgtctcgtagaggcatacaagccaacccggagaaagttactgctatcctcaacatgaaaccgccaagctcccagaaagacgtccagaagctgactggatgcatggcggcgctcagccgattcgtttcacgacttggcgagcgggggatgcccttcttcaaattaaagaaaacagacaatttccagtggggacccgaagctcagaaggccttcgaagatttcaagaaactcctcaccgagccaccagtcttagcctcgccacacccgcaggagccattgttactttatgtatcagccacctcccaggttgtgagcacagtcttggtcgttgagcgtgaggaagaaggccacgtccagaaagtccagcgaccgatctactttgtcagcgaggtcctagctaactccaaaacgagatatcctcaggttcagaagctgttatatggtattctgattactaccaggaaattatctcactacttccaaggtcactcggtaacggtggtcacatcgtttccgctcgtcgatatactgcacaaccgcgaagcaaacggacggattgctaaatgggctttggagttgatgtctttggacatatccttcaagccccgaacttcaatcaagctagccgacttcgtcgccgaatggaccgagtgccaggaggatacccccgcagaaaagatggagcactggaccatgcattttgacggatcaaaaaggctttcgggcactagagcgggagtggttttaatttccccaactggagaaagattaagttatgtgctttggatacatttttccgcatcccacaacgtcgcagagtatgaggcgctcctccatggactacggatcgcgatctccctagggatcaagcgtctaatagttcaaggcgattcacagctagtcgtcaaccaagttatgaaagagtggtcctgccttgacgacaacatgacggcatatcgacaaaaggcacgcaaattggaagacaacttcgatgggcttgagcttagtcacgttctccgacacaacaatgaagccaccgatagacctgccaactttggatccaagcgcgaggtggcgccctccgatgtattcgtcgaacacctttatgagccgaccgtacctcagaaagaaacaactcaagttgcggacactcatgacatagccatgattgaagccgactggagagagcccctcatacgatttttgacttctcaagaactcctccaagataaagatgaagccgagcggatttcaaggcgaagcaggctttatgttattcatgaagccgagttatacaagaaaagcccttcaggaattctgcaacgctgcgtatctctagaggaagggaggcaattgttgaaagacatacattctggaatatgcggaaaccatgccgccgcacgcaccattgtcggcaaagcttaccggcaggtcggcggttacacgcatctctttgtggccattgacaaattctccaagtggattgaggctaaaccggttgtcacaattacagcagataaagctcgagatttcttcatcaacattgtgcataggtttggagtgcctaatcggattatcaccgataatggcacacaattcactggcggagtttttaaagacttttgcgaagacttcggaattaagatttgctatgcctcagtagcgcatcccatgagcaatggacaggtcgaacgagccaacggcatgatacttcaagggataaaagcgcgagtttttgaccggctaaaaccctatgctggaaaatgggtggaacagctgccatcagtactttggtctttgtga

SEQ ID NO: 47405 - DNA, 894 bp, Oryza sativa
  Clone ID: PAT_MRT4530_50177C.1
atggggtgccggtcctgcgacaagccgaagatgaactacaggaaggggctgtggtctcctgaggaggaccagaggctgagggactacattgtcaagcatggccttggctgctggagtgctgtccctgcaaaggctggtttgcagagaaatggcaagagctgccggctgcgttggatcaactaccttcggccaggattgaagcgtggaatgttctctcaggaggaggaggacattgtcatcaatcttcaggccaagctgggcaacaagtggtcacagattgcgatgcatctgcctgggaggacggacaacgaggtgaagaactactggaattcctacctcaagaagagggtgatgcaggcacagggctccatccctaacaatctagcagcagcagcagctgaggtcacctccatgagcaccaccgagccaccatcattgcatcaccatcatcatcaccctcaccatcatcagatcaagaacagcagcggcagcacgaccacctcccatgaccaagacgccaacctgagcagcggcggcagccatggcggcatctctgctcctgcacctgtcgctgagccatttgatcagcagcccaagagcttcgtcttcaccggcgactggatgccgatgtctgcggcggcggcggggcaggagagctactccatctcggcgcagcactggccggcgtccacggcgagctccggcaacgtgacgccgtcgcacggcggcgcgttcggggaccagatgagcggcagctacggcgcattgcagcagcagcatcagagctcagctgctgctgctccaatggcaggaggcggcggctactttgacctgctaaacatgggagacatctatggcggatttgctgccactagtgacgatctgctcttctga

SEQ ID NO: 47406 - DNA, 4313 bp, Oryza sativa
  Clone ID: PAT_MRT4530_50178C.1
gatgtattttagagtcgatttgggacgcgacaatcaccgacgacgttatcatcgccgcattcaccaaagggattcgccacgaagaattggtcggcaagttcgggcgtaaacctcccacgacagtcaaacttatgtttgaaaaagccaacgagtacgccaaagccgaagacgccgtcaccgcatcaaagcagtcgggtcccagttggaagccaaaaaaggatacgccggctacgggaggaggtggaagtaacaatcataaggaccgcaagcgtaagcctgaggaacttgttgcaaccgccattcactcttctcgacagcgttcgcgcgtcaacacgttcgacaagatcatgaactcccaatgcccgcaccatcctaactccaaccacgtggccaaagattatttcgtctacaagcaattcgcggagcaatacaccaagactacacggaagaactccgacgaagaacaaagcacgtcgaggaagaaggacgacggcgacaccccggtaggatttcaagaccaccgcaaggagctcaaccatatcttcggcggccccctggcttatgagtctaaaaggaagcaaaagttgaccaaacgggagatcaatgctgttcagcccgacacgccccaatatcttcgatggtcagagattgcaatcaagtttgaccgctcggatcatcctgaccgagtggtccacccggggcggtaccccctggtactagacccagtggtccgtaatgtcaagcttcgcagaaccctcatcgacggtggcagtgcactcaatatcctcttcgccaagaccttggatgatatgcagattcctcgctccgagctaaaaccaagcaatgcgccttttcacggagtaattccaggattatccgcaactccactcggccagatcaccctcccggtcacttttggcactcgggaaaacttccgcacagagaatatcagctttgaagtcgccgatttcgagacagcataccatgccatactcggatgcccggcgttagccaagttcatggccgtcccgcactacacttacatgatgatgaagatgcctggtccccgaggagtcctatccctacggagcgacatcaagcaagccgtcacatgcgacaaggagagttgcgacatggcccaaacccgcgagatggcgtctgcccgagaggatatccgactggctgcagccacggcgagcgaagaagaagtgcccgctaccaagacttcaaaaagtggagaaagcgaagccaagactaagaagattcccctagatccttctaatcctactaaaactgctaacaataaagatatctttgcgtggaaatcatctgatatgcccggtattcctagagaggtgattgagcactccttacatgtcaaagaagatgccaagcctatcaaacaacgactccgccgattcgcacaagacaggaaggacgcgatcaaggaggaattaaccaagctgttagcggcaggcttcatcaaagaagtccatcatcccgactggctggcaaacccggttctagttcggaagaaaacggggcaatggcgcatgtgtgttgattatactgacctcaacaagtcttgccctaaagatccttttgggttgcctcgcattgaccaggtagtcgactcgaccgccggctatgagcttctcagttttttggattgctactcggggtatcatcagatccgactgaaggaatccgactgcttgaagacttcattcatcacgccctttggagcatactgctatgtcaccatgccgttcggactaaaaaacgcaggagcaacttatcaacgtatgatccagagatgcttctcaacgcagatcggccgcaacgttgaagcctatgtggatgatgtagtcgtcaagaccaaacaaaaggatgatttaatctcggatctagaagaaaccttcgcgagcatccgcgctttcaggatgaaattaaaccctgaaaagtgcaccttcggagtaccgtcagggaagctgcttggttttatggtgtctcataggggtatccaagccaacccggagaaagttactgctatcctcaacatgaaaccgccaagtacccagaaagatgttcagaagctgactggatgcatggcggcgctcagtcgatttgtttcaagacttggcgagcgggggatgcccttctttaagctactgaagaaaacagatgatttccaatggggacccgaagcacagaaggccttcgaagattttaagaaactcctcaccgagccaccggtcttagcctcaccacacccgcaggagccgttgttgctgtatgtatcagccacctcccaggttgtgagcacagtcttggtcgttgagcgtgaggaagaaggccatgtccagaaagtccagcgaccgatttactttgtcagcgaggtcctagccgactccaaaacgaggtaccctcaggttcagaagctgttatatggtattctaattactaccaggaagctatctcactactttcaagcccggaattcaatcaagtcccaagcgttagctgattttgtcgccgaatggaccgagtgccaggaggatacccccgcggagaagatggagcactggaccatgcatttcgacggatcaaaaagactttcgggcactggagcaggagtggttctaatttccccaactggagaaagattaagctatgtgctttggatacatttttcggcgtcccacaacgtcgccgagtatgaggcgctccttcatggactgcgaattgcgatctccctagggataaagcgtctaatagttcgaggcgattcacagctggtcgtcaaccaagttatgaaagagtggtcctgccttgacgacaacatgatggcatatcgacaagaggtacgcaaattggaagacaagttcgatggactcgagctcagtcacgttcttcgacacaataatgaagccgccgacagacttgccaactttggatccaagcgcgaggtggcgccctccgatgttttcgtcgaacacctttatacgccgacagtacctcacaaagatactactcaagttgcgggcactcatgacgtagctatggttgcagccgactggcgagagcccctcatacgattcttgacttctcaagaactcccccaagacaaagatgaagctgagcggatttcaagacgaagcaaactttatgttatgcatgaagctgagttgtacaagaaaagcccttcagggattctgcaacgctgcgtatctttagaggaagggagacaattgctgaaagacatacattctgggatatgcggaaaccatgctgccgcacgcaccattgtcggcaaagcttaccggcagggttttttttggcctactgcagtgtccgacgccgacaaaattgtgcgcacgtgcgaaggttgccagttttttgccagacaaattcatctaccagctcaagagttgcagaccatcccactgtcttggccgtttgtggtttgggggctcgacatggttggcccgtttaaaaaggcagtcggcggttacacgcacctctttgtggccattgacaaattctccaagtggattgaagctaaaccggttgtcacaatcacagcagataacgctcgagacttcttcatcaacattgtgcatagatttggagtgcccaatcggatcatcactgataatggcagacaattcactggcggagtttttaaagacttttgtgaagactttggaattaagatttgctatgcctcagtggcacatcccatgagcaatggacaggtggagcgagccaatggcatgatacttcaagggattaaagcgcgagtttttgaccggctaaaaccctatgccggcaaatgggtggaacagctaccatcagtactttggtctttgcgtactacacccagtcgggccacaggccagtcaccttttttccttgtctatggggcagaagcaatgttgccgagtgaagttgaattcgagtctttgcgctttcgtaatttccgcgaagaacgctacgaggaggaccgagtggatgacttgcaccgactggaagaagtccgcgaagcagctttgattcagtcggctcgatacttacaagggttgcgacgttatcataatcgcaatgttcgatcccgtgcctttctagtcggcgacctcgttttgaggaaaattcaaactacacgagatcggcacaagttatctcctctatgggaagggccatttatcatctctgcagtcacccggccaggttcctatcgactcaagcgcgaagacggtacactcgtcgacaactcttggaacatcgaacatcttcatcgtttctacgcttaa

SEQ ID NO: 47407 - DNA, 624 bp, Oryza sativa
  Clone ID: PAT_MRT4530_50179C.1
gttttggttgggcatgaggatgagggagagcaacgaggaggagaagaagagcgtgtgcgtgatggacgcgtccggcccgctcggccacgccctcgtcgcccgtctcctccgccgaggctacaccgtccacgccgccacctacccccaccaccaccaccatccagaagaagagtaccagcagcacccccgcctgaagctgttccgcgccgaccccttggactaccacgccatcgccgacgccgtccatggctgctccggcctcttcgccatcttcaacaccccttcctcctcgcaatcgcaatcgcactcctgcttcctagatgaggaggagggtatggtggaggcggaggtgcgagcggcgcacaacattctggaggcgtgcgcgcagacggacaccatggagagggtggtcttcaactcctccgtcaccgccgtcgtgtggaggcctcagccggaggaggacgatgacgctgccttgcaattggacgagaacacctggagcgacctcaccttctgcagaagattcaagctgtggcacgctctggccaagacgctatcggagaggacggcgtgggccctggcaatggacagaggagtagacatggtggccatcaacgccggcct

SEQ ID NO: 47408 - DNA, 198 bp, Oryza sativa
  Clone ID: PAT_MRT4530_5017C.1
tcatcgagcactggaccaccagtcgacgaggtcgtcttggtccattggcgcagcaagagtgagcctcgcgatggccaacaccttatcgaggcagtgcccaagcccgccaaagctctttccagcaggggaacggatggtcagtgcaccttggattatgtccctcgtccactgcctatggaggatggcctccgccaccat

SEQ ID NO: 47409 - DNA, 412 bp, Oryza sativa
  Clone ID: PAT_MRT4530_50180C.1
atctggtcgatcgcccataaccgcgggtatggctattcgaatagttttactctagccagaggtgcacaactgtacccacaaaacacaatccaccggcatgtcaccgtgtcatcatgtgcccatgatgaacacatcaccacatcgagtgattgtgacaagatccttcatataactctcccctaaccatccacaccacgctaaggtttcacccccactcctcgcaaggcaacgggtagtcccctcatgcgccgcggtgaattcggcagctggacaaccggacaccccggccgacccaactccatcacgcccaccctcgccaccggtgcctaggaaagggtcgagctatacttcagatcaagtagttacccactcccgcttgtggtaagcactgttagtcttccagggtttccca

SEQ ID NO: 47410 - DNA, 1350 bp, Oryza sativa
  Clone ID: PAT_MRT4530_50181C.1
cacaaaatggctttgcatagagagttaacacagctgcaaatatattttcctagtgtttgatcacctagggattttgtttgttggtatataagtaatcattgaaatgatcttaccctctgtaagaatggaatacatgtggcagcttggccatgtacaacatgtacatttgaccaaaccaaatttccctccctttagaggagaaagaataaaagaaatagaagaagatacaagaggagtagtacatgtctagttgcacgtgtgatatataaaataaaggaaggcaaatcccctagtttaatttaatttatgtccccgtatacgccactggtgaagtccagcatgagtttgttgagcttctttgtgtggatcctctgtgggatcaccttgagctcatcactcggcggcgcagggggtcgcggcgcggcggcggaggagatgagcatctgggcgagcttggcggcgtcctccgggcggcagatggcgttgttgaagcagaggtagcgtccgtaggcggtggggcactcgtaggcggcgatgtgggcgtcggcgaggaagtcgacgtcgacggtgacgaggacgccgtggtcgtacatgtcgggtgcacccttgaggtaagggtggccggcggtgaggccggggccggtgagcaggccggcgttgatggccaccatgtctactcctctgtccattgccagggcccacgccgtcctctccgatagcgtcttggccagagcgtgccacagtgtgcaattcttcttcttcctaacacaattcatcaataagctataatccgctacttggatgggtgccttgaatcttctgcagaaggtgaggtcgctccaggtgttctcgtccaattgcaaggcagcgtcatcgtcctcctccggctgaggcctccacacgacggcggtgacggaggagttgaagaccaccctctccatggtgtccgtctgcgcgcacgcctccagaatgttgtgcgccgctcgcacctccgcctccaccataccctcctcctcatctaggaagcaggagtgcgattgcgattgcgaggaggaaggggtgttgaagatggcgaagaggccggagcagccatggacggcgtcggcgatggcgtggtagtccaaggggtcggcgcggaacagcttcaggcgggggtgctgctggtactcttcttctggatggtggtggtggtgggggtaggtggcggcgtggacggtgtagcctcggcggaggagacgggcgacgagggcgtggccgagcgggccggacgcgtccatcacgcacacgctcttcttctcctcctcgttgctctccctcatcctcatgcccaaccaaaacttgtcaaacacc

SEQ ID NO: 47411 - DNA, 1592 bp, Oryza sativa
  Clone ID: PAT_MRT4530_50182C.1
ggccgaaccagtcgtcgaacccctgcacgcacccgatgaagcggccgtcctccttgtgggacacgatggaggcgccgcggtggtgcacccgggcggggtaccggcggccgtaccccaccatgtagctcagccgcagcgggttccgccccaggatgtagtccgcctgcgacctcgccagcgacaccatctccgccgccgccgccgcgccgccggggcagcggagggccgcggaggcggaggcggaggaggaggagaggtagtgggagtaggcggtgaggaggaaggcggcgctggaggcgtactggaggttgttccattggcggacgtagagcatcccgccggggctccggtcgacgttgtcggcgccgttgatgttgcggccgaggcacgcgcacaggtagtgctccgccttctccctgtacttctccagcacgccgcggtgcgccgccgcctgcgggtcgccgtccagcagcagcttggcggcaaggatctggacgccggcgtacttgacgtcccagctgaacttggtgatggcccagcgggtgccgccaaactcgtcagcgttgtcgacgatgtagtcgaggtaggcggcggcggcggcaaaggcgtcgcgatgtgcgtgggcgtggcgggagccgtcgcgacgccttgaggacgacgagccgtagctccgccccgagggcgcctcgtcgccgctccgtctcgaggcagcgtccgccctcccgttggctgtcgccgctacggccctcgaacacccgccgccgccgcaccggcggctgtcggcctccgcgcacgtgccggccggcaccgctcgccggtccttcccgttttgacgtcttcccgagctcgcatccaacgacgtgggcacgatcccctccacgtcctccaccattttccccgctcgtcccacaaaaaccggcgccggccgagccaccaccaccccccgtcggcgccccacttccccgccggttgccgcccctctcggccccgtttccgccgctccgagccagccgcgctctctctctccctccccacgccgctcccgcgcaccgccgctttccggcaagctccggccgcccgccaccgctgctccacccaccgccgcgccaatccgccaccaccgtcggcttcgcggcgccgtgccgcagcccggcctctactccatttcccctctctgcctccggaacaccgccgcctcgtgcaccaccgccggccgcctttttccgcctccggtcgccgttcgccttcaccccggctgctgccgcgacgcatcgcccgtatcgccggcttcgccgcgtcccgctcttccccacccgccgcccggtcgccgccttccgctgccgggagcccctcctcattgtcgacctgtggagcgccgccgcctccctccgccggctgctctcgccgtcgccgtgcccctcggtgagctccgccacctccctctccctcactgcctccgtttcctctcgccgcttcccgcgctgcgcgccgttgctccctgtgccgcccgccgcccgccgtcgccagtgactgcgcgccgccgccctctgtggtcggtcgggccagccccgactgtgcccgtgcccggccat

SEQ ID NO: 47412 - DNA, 145 bp, Oryza sativa
  unsure (1)..(145): unsure at all n locations
  Clone ID: PAT_MRT4530_50183C.1
aggaactatctgccccagactatccttttttnagctcttttncctgatgttatgatgatcaatncgcganctatgtttnctnctagctataatncnactgtttaccttatttaannnnccattttaagaacctccanaaaaaaaa

SEQ ID NO: 47413 - DNA, 6006 bp, Oryza sativa
  Clone ID: PAT_MRT4530_50184C.1
atgggttccgtctccggcatcgacgacctcgtcttcccacccgggcagacgtttcggttcggcagcctcgacttcgtcaccaacaacttcggcaagatctctctccttgactcagagtcagaccagtcgggagagaaccggatttcagtcccgtttggactcccaaacgcggctgaaagttacttcaagaccatctcaatcgagttggcttcaaaccactcgggcgagatcgcatcttctccaatgtcaccagatcaagatgatgaggcttacccaccgatcctgatgaagctccccgacgatttagcggccgtctccatcacgacagcgtctccatcccgtaggcctaggcggaagtcggcttcaacaccgatttcgcctagcttcagggaagtcggcgtcatcctccaaccactcggcacggtttcgacggatcagctggatggctactacagctctcccactgtcgactcgcgtcccaccgacatcgtagagtacgacgagtttagctctcgctacaacgacccggatctcgacgacttcgacggaagcctagatgacaactacacccctctctacttcggcgtcttcatggccgataacgagacggaggagcaacgccaagcccgggaaaccgaagcacgtcgcgagactgagcgtcgccgactggaggaggagcgtcaagcacaagaacaagaacggctacggcgtgagcagcaggagcgtgagcgaaccgcgaaggaggctgaggaccgacagcagcgagccttggaagcagggcgccgagcgcgtgatttcatcggccaacaagatgttgaagggacaccggttttccgcacccctcaacagaatgcggttgccgcgatcaccctcctcgacaccctcctcaaggaaaacgagctcaatcaatctgatcacgtcgtcaacatcttgaaccagacaaagaccatgattgcggcttcggtcccagttaactccgaaagcgtccgcacgccgactggcagccgactcccccacttccgatctcatgactaccgtcatccaagcctcagcatcactggcgcaggatccaatcgcaggagcaggggtcacgacgagcggtccgttcactcgcctcccgaccatcatagggagcgccgagtggaacggcctcgctcaccacctcgtcgccgccccgtcgatcttcgcgacacaatcatacagcgccgagcagctcgaggccatcatcattcgccggaccgccacgacgacgaccttgatggagtagcagccttcaccgacgacctgcgtcgagtggattggccagccggcttcaagccgactggaatagagaagtacgacggtaccaccaacccagaatcgtggcttaccgtctacggtctcgcgatccgcgcagcaggaggagatagcaaggccatggtgaactatttaccagtggctttagcggattccgcccgatcttggctccatggattgccccgtggtacgattggatcttgggccgaattacgcgaccacttcatcgccaacttccaaggtaccttcgagcgtcccggcacacaattcgacctctacaacgttgttcagaagtccggagaatcccttcgagattacatccggcgattttctgaacaacgtaacaagatctccgacatcaccgacgacgttatcatcgccgcattcaccaaagggattcgccacgaagaattggtcggcaagttcgggcgtaaacctcccaggacagtcaaacttatgtttgaaaaagccaacgagtacgccaaagccgaagacgccgtcaccgcatcaaagcagtcgggtcccagttggaagccaaaaaaggatacgccggctacgggaggaggtggaagtaacaatcataaggaccgcaagcgtaagcctgaggaacttgttgcaaccgccattcactcttctcgacagcgttcgcgcgtcaacacgttcgacaagatcatgaactcccaatgcccgcactatcctaactccaaccacgtggccaaagattgtttcgtctacaagcaattcgcggagcaatacgccaagactacacggaagaactccgacgaagaacaaagcacgtcgaggaagaaggacgacggcgacaccccggtagaatttcaagaccaccgcaaggagctcaaccatatcttcggcggccccctggcttatgagtctaaaaggaagcaaaagttgaccgaacgggagatcaatgctgttcagcccgacacgccccaatatcttcgatggtcagagattgcaatcaagtttgaccgctcggatcatcctgaccgagtggtccacccggggcggtaccccctggtactagacccagtggtccgtaacgtcaagcttcgcagaaccctcatcgacggaggcagtgcactcaatatcctcttcgccaagaccttggatgatatgcagattcctcgctccgagctaaaaccaagcaatgcgccttttcacggagtaattccaggattatccgcaactccactcggccagatcaccctcccggtcacttttggcactcgggaaaacttccgcacagagaatatcagctttgaagtcgccgatttcgagacagcataccatgccatactcggacgcccggcgttagccaagttcatggccgtcccgcactacacttacatgatgatgaagatgcctggtccccgaggagtcctatccctacggagcgacatcaagcaagccgtcacatgcgacaaggagagttgcgacatggcccaaacccgcgagatggcgtctgcccgagaggatatccgactggctgcagccacggcgagcgaaggagaagtgcccgctaccaagacttcaaaaagtggagaaagcgaagccaagactaagaagattcccctagatccttctaatcctactaaaactgctaacaataaagatatctttgcgtggaaaccatctgatatgcccggtattcctagagaggtgattgagcactccttacatgtcaaagaagatgccaagcctatcaaacaacgactccgccgattcgcacaagacaggaaggacgcgatcaaggaggaattaaccaagctgttagcggcaggcttcatcaaagaagtccatcatcccgactggctggcaaacccggttctagttcggaagaaaacggggcaatggcgcatgtgtgttgattatactgacctcaacaagtcttgccctaaagatccttttgggttgcctcgcattgaccaggtagtcgactcgaccgccggctgtgagcttctcagttttttggattgctactcggggtatcatcagatccgactgaaggaatccgactgcttgaagacttcattcatcacgccctttggagcatactgctatgtcaccatgccgtttggactaaaaaacgcaggagcaacttatcaacgtatgatccagagatgcttctcaacgcagatcggccgcaacgttgaagcctatgtggatgatgtagtcgtcaagaccaaacaaaaggatgatttaatctcggatctagaagaaaccttcgcgagcatccgcgctttcaggatgaaattaaaccctgaaaaatacaccttcggagtaccgtcagggaagctgcttggttttatggtgtctcataggggtatccaagccaacccggagaaagttactgctatcctcaacatgaaaccgccaagtacccagaaagatgttcagaagctgactggatgcatggcggcgctcagccgatttgtttcaagacttggcgagcgggggatgcccttctttaagctactgaagaaaacagatgatttccaatggggacccgaagcacagaaggccttcgaagattttaagaaactcctcaccgagccaccggtcttagcctcaccacacccgcaggagccgttgttgctgtatgtatcagccacctcccaggttgtgagcacagtcttagtcgttgagcgtgaggaagaaggccatgtccagaaagtccagcgaccgatttactttgtcagcgaggtcctagccgactccaaaacgaggtaccctcaggttcagaagctgctatatggtattctaattactaccaggaagctatctcactactttcaaggtcactcggtaacggtggtcacatcatttccactcggtgatatactgcacaaccgcgaagcaaacggacggattgctaagtgggctttggagttgatgtctttggacatatcattcaagccccgaatttcaatcaagtcccaagcgttagctgattttatcgccgaatggaccgagtgccaggaggatacccccgcggagaagatggagcactggaccatgcatttcgacggatcaaaaagactttcgggcactggagcaggagtggttctaatttccccagctggagaaagattaagctatgtgctttggatacatttttcggcgtcccacaacgtcgccgagtatgaggcgctccttcatggactgcgaattgcgatctccctagggataaagcgtctaatagttcgaggcgattcacagctggtcgtcaaccaagttatgaaagagtggtcctgccttgacgacaacatgatggcatatcgacaagaggtacgcaaattggaagacaagttcgatggactcgagctcagtcacgttcttcgacacaataatgaagccgccgacagacttgccaactttggatccaagcgcgaggtggcgccctccgatgttttcgtcgaacacctttatacgccgacagtacctcacaaagatactactcaagttgcgggcactcatgacgtagctatggttgaagccgactggcgagagcccctcatacgattcttgacttctcaagaactcccccaagacaaagatgaagccgagcggatttcaagacgaagcaaactttatgttatgcatgaagctgagttaggaagggagacaattgctgaaagacatacattctgggatatgcggaaaccatgctgccgcacgcaccattgtcggcaaagcttaccggcagggttttttttgcctactgcagtgtccgacgccgacaaaattgtgcgcacgtgcgaaggttgccagttttttgccagacaaattcatctaccagctcaagagttgcagaccatcccactgtcttggccgtttgcggtttgggggctcgacatggttggcccgtttaaaaaggcagtcggcggttacacgcacctctttgtggccattgacaaattctccaagtggattgaagctaaaccggttgtcacaatcacagcagataacgctcgagacttcttcatcaacagtgtgcatagatttggagtgcccaatcggatcatcactgataatggcagacaattcactggcggagtttttcaagacttttgtgaagactttggaattaagatttgctatgcctcagtggcacatcccatgagcaatggacaggtggagcgagccaatggcatgatacttcaagggattaaagcgcgagtttttgaccggctaaaaccctatgccggtaaatgggtggaacagctaccatcagtactttggtctttgcgtactacacccagtcgggccacaggccagtcaccttttttccttgtctatggggcagaagcaatgttgccgagtgaagtcgaattcgagtctttgcgctttcgtaatttccgcgaagaacgctacgaggaggaccgagtggatgacttgcaccgactggaagaagtccgcgaagcagctttgattcagtcggctcgatacttacaagggttgcgacgttatcataatcgcaatgttcgatcccgtgcctttctagtcggcgacctcgttttgaggaaaattcaaactacacgagatcggcacaagttatctcctctatgggaagggccatttatcatctctgcagtcacccggccaggttcctatcgactcaagcgcgaagacggtacactcgtcgacaactcttggaacatcgaacatcttcgtcgtttctacgcttaa

SEQ ID NO: 47414 - DNA, 409 bp, Oryza sativa
  Clone ID: PAT_MRT4530_50185C.1
gatacgtttgagagggaacaaggaaaacatctgggggaaatctatagatatgagctatcaagctaaccacagacgtgaaagacggtgacgaagatagttaggagcctagaatattttagacgttttgtctctcaattaatcttagtgttactttgtttagtcttcttctattttttttttaatcttatttgtttttcttttattttttattttatttcttttttttttttatttctctattacattattttcacttatatttcataattcctattttttttttcttttctttactacttataaatattattctctttatttaactcttcttttttttattctcattattatttctaaatatttttattttttattatatttttattatattatatatttattcttatat

SEQ ID NO: 47415 - DNA, 676 bp, Oryza sativa
  Clone ID: PAT_MRT4530_50186C.1
tcaagccggccggccatggcgaggcgacgacggcgcacgaccgccggcggtgaccggcggcgcggggagacggcggcagccggcgcgaaggcggcggcggcagccgaagacgacggcggacgcgcggagggcggcggcgctcacgggggagaggaaaggaaggaggaaaggggattcctcaccgaggcgatggcggcgaccggcgtgggaagagacgagcggcgatgaccggcgacgcggaggcacggacgggcggcggcgacacccggctcgcgaggggagaggtgctccggtgggattccggcgacgcgaggcggcggccgggaaagctcttgcagcggcgaagctaacggcggcggcggtttggcgcggcggcgactctagcggcggcggctcgcggccgaaggcggcggcaagcggcggagctcggggcgtgacaggcgtggagaagagaggcggtggagggagccaccgctgcaggttccgcccgcggtggccgccaccgccgacggattcacccgcggacgaagccgacgctgtcgtcgctatcgacgccgccgttgagagggtgtcgtcgccgtcgaggccgacggggagagggagagggggagggacaaccgtcgccgctgtctctgccgcaccccgccgtcgctacgccgtgccggcgagacggtaa

SEQ ID NO: 47416 - DNA, 372 bp, Oryza sativa
  unsure (1)..(372): unsure at all n locations
  Clone ID: PAT_MRT4530_50187C.1
cactgttatcaacttcatcagattttatcctttggggggtaaggatggacaggaacatctgctacaaaacttacttccctacaaaatctccannccgatgaaccaagtatagagttgtaacccggttgctcaggagctggaaatccatcctaacccaaaaaactttgcttgcagcgcccgaaaaataacaaatgggtctggaagggggaccttaatcaaccgtccccgaactttgacaaggtgtaaaagaactcgagctagatatactcgagcgccaaacaagaggtatgcttgagcatggactgggggtgggtgacgaccctctctttggggccaacacaggaccccttgataagagaggatgattcccac

SEQ ID NO: 47417 - DNA, 4302 bp, Oryza sativa
  Clone ID: PAT_MRT4530_50188C.1
atgggttccgtctccggcatcgacgacctcgtcttcccacccgggcagacgtttcggttcggcagcctcgacttcgtcaccaacaacttcggcaagatctctctccttgactcggtgtcagtccagtcgggagagaaccagatttcagtcccgtttggactcccaaacgcggctgaaagttacttcaagaccatctcaatcgagtcggcttcaaaccactcggctgagatcgcatcttctccaacgacaccagatcgagatgatggggcttacccaccggcggaagtcggcttctacaccgatttcgcatgcttcagggaagtcggcgtcatcctccaaccactcggcacggtttcgacggatcagctggatggctactacagctctcccaccgtcgactcgcgccccaccgacatcgtggagtacgacgagtttagctctcgctacaacgacccggatctcgacgacttcgatgaaagcctagatgacaactacacccctctcttcttcggcgtcttcatggccaataatgagacggaggagcaacgccaagcccgggagaccgaagtgcgtcgcgagactgagcgtcgccgactggaggaggagcatcaagcacaagaacaagaacggctacggcgtgagcagcaggagcgtgagcggactgcgaaggaggctgaggatcgacggcagcgagctttggaagcaggacgccgagcgcgtgatctcatcggtcagcaagatgttgaagggacaccggtttttcgcacccctcaacagaatgcggttgccgcgatcaccctcctcgacaccctcctcaaggaaaacgagctcaatcaatctgatcacgtcgtcaacatcctgaaccagacgaagaccatgattgcagcttcggtcccagttaactccgaaagcgtccacacgccgactggcagccgagtcccccacttccgatctcatgactaccgtcatccaagcctcagcatcactggcgcaggatccaatcgcaggagcaggggtcacgacgagcggtccattcactcacctcccgaccatcatagggagcgccgagtggaacggcctcgctcaccacctcgtcgtcgccccgtcgatcttcgcgacacaatcatacagcgccgagcagctcgaggctatcatcattcgccggaccgccacgacgacgaccttgacggagtagcagccttcaccgacgacctgcgtcgagtggattggccagccggcttcaaaccgactggaatagagaagtacgacggtaccactaacccagaatcgtggcttaccgtctacggtctcgcaatccgcgcagcaggaggagacagcaaggccatggcgaactatttaccagtggctctagcggattccgcccgatcttggctccatggattgccccgtggtacaattggatcttgggctgaattacgcgaccacttcatcgccaacttccaaggcaccttcgagcgtcccggcacacaatacgacctttacaacgttattcagaagtccggggaatcccttcgagattacatccggcgattttctgaacaacgtaacaagatctccgacatcaccgacgacgttatcatcgccgcattcaccaaagggattcgccacgaagaattggtcggcaagttcgggcgtaagcctcccaggacagtcaagcttatgtttgaaaaagccaacgagtacgccaaagctgaagacgccgtcaccgcatcaaagcagtcgggtcccagttggaagccaaacaagggtacgccggccacgggaggaggtggaagtaacaacaataaggaccgcaagcgtaagcctgtggaacttgttgcaaccgccacccattcttctcgacagcgttcgcgcgttaacacgttcgacaagatcatgaactcccaatgcccgcaccatcctaactccaaccacgtggccaaagattgtttcgtctacaagcagtttgcggagcaatacaccaagactacaaggaagaattctgacgaagaacaaagcacgtcgaggaagaaggacgacggtgacaccccggcaggatttcaagaccaccgcaaggagctcaaccatatcttcggcggccccctggcttatgagtccaaacggaagcagaagttgactgaacgggagatcaatactgttcagcccgacacgccccagtatcttcgatggtcagagattgcaatcaagtttgaccgctcggatcaccctgaccgagtggtccacccggggcggtaccccctggtactagacccagtggtccgtaatgtcaagcttcgcagaaccctcattgacggtggcagattatccgcaactccactcggccagatcaccctcccggtcacctttggcactcgggaaaacttccgcacagagaatatcagctttgaagtcgccgatttcgagacagcataccatgccatactcggacgcccggcgttagccaagttcatggccgtcccgcactacacttacatgatgatgaagatgcctggtccccgaggagtcctagccctacgaagcgacatcaagcaagccgtcacatgcgacaaggagagttgcgacatggcccaaacccgcgagatggcgtctgcccgagaggatatccgactggctgcagccacggcgagcgaaggagaagtgcccgctaccaagatttcaaagagtggagaaagcgaagccaagactaaaaagattcccctagatccttctgattctactaaaactgttgtaataggcgccgaagaggtgattgagcactccttacatgtcaaagaagatgccaagcctatcaaacaacgactccgccgattcgcacaagacaggaaggacgcgatcaaggaggaattaaccaagctgttagcagcatgcttcattaaagaagtccttcatcccgactggctggcaaacccggttctagttcggaagaaaacagggcaatggcgcatgtgtgctgattatactgacctcaacaaatcttgccctaaggatccttttgggttgcctcgcattgaccaggtagtcgactcgaccgccggctgtgagcttctcagttttttggactgctactcggggtatcatcagatccgactaaaggaatccgactgcttgaagacttcattcatcacgccctttggggcatactgctacgtcaccatgccgttcggactgaaaaacgcaggagcaacttatcaacgtatgatccagagatgcttctcaacgcagatcggtcgcaacgttgaagcctatgtggatgatgtagtcgtcaagaccaagcaaaaggatgatttgatcttggatctagaagaaaccttcgcgagcatccgcgctttcaggatgaaattaaaccctgaaaagtgcaccttcggagtaccgtcagggaagctgcttggttttatggtgtctcataggggcatccaagccaacccggagaaagttaccgctatcctcaacatgaaaccgccaagtacccagaaagatgttcagaagctgactggatgcatggcggcgctcagccgatttgtttcaagacttggcgagcgggggatgcccttctttaagctactaaagaaaacagacaacttccagtggggacccgaagcacagaaggccttcgaagatttcaagaaactcctcaccgagccaccggtcttagcctcaccacacccgcaggagccgttgttgctgtatgtagcagccacctcccaggttgtgagcacagtcttggtcgttgagcgcgaggaagaaggccatgtccagaaagtccagcgaccgatttactttgtcagcgaggtcctatccgactccaaaacgaggtaccctcaggttcagaagctgttatatggtattctaattactaccaggaagctatctcactactttcaaggtcactcggtaacggtggtcacatcattcccactcggtgatatactgcacaaccgcgaagcaaacggacggattgctaagtgggctttggagttgatgtctttggacatatcattcaagccccgaatttcaatcaagtcccaagcgttagctgattttgtcgccgagtggaccgagtgccaggaggatacccccgcggagaagatggagcactggaccatgcattttgacggatcaaaacgactttcaggcactggagcaggactttccttgacagccgatgatttccttgacagggagaacgccgtgcgccaccatctccttcagggattggggaaaatggcgagagttccggcggggaagacgaagcgtcgcttcaatctcgggatttcttgttaa

SEQ ID NO: 47418 - DNA, 5916 bp, Oryza sativa
  Clone ID: PAT_MRT4530_50189C.1
atgggtcccgtcaccggcatcgacgacctcgtcttcccacccgggcaggcgtttcggttcggcagcctcgacttcatcaccagcaacttcggcaagatttctctccttgactcggaatcgaaccagtcgggagagaaccggatctcagtcccgtttggattcccaaacgcggctgaaacctacttcaagaccatctcactcgagtcggcttcaaaccactcggccgagatcgcatcttctccaacgacaccagatcaagatgatggggcttacccaccagtcctgatgaagctccccgacgatttagcggccgtcttcaccacaacagcgtcttcatcccgtaggcctaggcggaagtcagcttcaacaccgatttcgcctagcttcagggaagtcggcgtcatcctccaaccactcggcacggtttcgacggatcagctagatgactacaacagctctcccaccgtcgactcgcgccccaccgacatcgtggagtacgatgagtttagctctcgctaccacgacccagatctcgacgacttcgacggaagcctagatgacaactacacccctctctactttggcgttttcatggccaataacgagacggaggagcaacgccaagcccgggagactgaagaacgtcgccgactggaggaggagcgtcaagcacaagaacaagaacggctacggcgtgagcagcaggaccgtgagcggatcgccaaggaagctgaagatcgacgtcagcgagctttggaagcagggcgccgagcgcgtgatctcatcggccaacaagacgtcgaagggacgccggttttccgcacccctcagcagaatgcggttgccgcgatcaccctactcgacaccctcctcaaccaaaacgagctcaatcgatccgaccacgtcgtcaacatcttgaaccagaccaagaccatgattgcggcctcggttccagttaactctgaaagcgtccacacgccgactggtagccgagttccacacttccggtctcaagactaccgtcatccaagcctcagcatcaccggcgcaggatccaatcgcaggagcaggggtcacgacgagcggtctgttcactcacctcccgaccttcatagggagcgccgagtggaacggcctcgctcaccacctcgtcgccgccccatcgatcttcgcgatacaatcatacagcgccgagcagctcgaggctaccatcactcgctggaccgccacgacgacgaccttgacggagtagcagccttcaccgacgacctgcgtcgagtggattggccagccggcttcaaaccgactggaatcgagaagtacgacggtaccactaacccagaatcgtggcttaccgtctacggtctcgcaatccgcgcagcaggaggtgacaataaggccatggcgaactatttaccagtggctttagcggattccgcccgatcttggctccatggactgccccgtggtacgatcggatcttgggccgaattacgcgaccacttcatcgccaacttccaaggcaccttcgagcgtcccggcacacaatatgatctctacaacgtcattcagaaatccggagaatcccttcgggagtatatccgacgattttctgaacaacgtaacaagatctccgacatctccgacgacgtcatcatcgccgcattcaccaaagggattcgccacgaagaattggtcggcaaatttgggcgcaaacctcccagaacagtcaagctcatgttcgaaaaagccaacgagtacgccaaagccgaagacgccgttaccgcatcgaagcagtcgggtcccagttggaagccgaaaaatacgccggctacgggaggaggtggaagtaacaatcataaggaccgcaagcgtaagcctgaggaacttgttgcaaccgccgctcattcttctcgacagcgttcgcgcgtcaacaccttcgacaagatcatgaactcccaatgcccgcatcatccaaactccaaccacgtggccaaagagtgcttcatctacaagcagttcgcggagcagtacaccaagtctactcggaagaactccgacgaggaacaaagcacgtcaaggaagaaggacgacggcgacaccccggctggatttcaagaccaccgcaaggagctcaaccatattttcggcggccccatggcttatgagtctaaacggaagcaaaagttgactgaacgggagatcaacgctgttcaacccgacacgccccagtatcttcgatggtcagagattgcaatcaagtttgaccgctcggatcatcctgaccgagtggtccacccggggcggtaccccctggtactagacccagtggtccgtaacgtcaagcttcgcagaaccctcattgatggcggcagtgcactcaatatcctcttcgccaaaaccttggatgatatgcagatccctcgctccgagctgaaaccaagcaatgcgccttttcacggagtaatcccaggattatctgcaactccactcggccagatcactcttccggtcacttttggcactcgggaaaacttccgcacagagaatatcagctttgaagttgccgatttcgagacagcataccacgccatactcggacgcccggcgttagccaagttcatggccgtcccgcactacacgtacatgatgatgaagatgcctggtccccgaggagtcctatccctacggagcgacattaagcaagccgtcacatgcgacaaggagagttgcgacatggcccaaactcgcgagatggcgtctgcccgagaggaaatccgactggctgcaaccacggaaagcgcgctcatcacctttcttcaaaataataaagatatctttgcgtggaaaccttcggatatgcccggtattcccagagaggtgattgagcactccttacatgtcaaagaagacgccaagcctattaaacaacgactccgtcgatttgcacaagacaggaaggacgcgatcaaggaggaattaaccaagctgttagcagcaggcttcatcaaagaagtccttcatcccgactggctggcaaacccggttctagttcggaagaaaacagggcaatggcgcatgtgtgttgattacactgatctcaacaaatcatgccctaaagatccttgcgggttgcctcgcattgaccagatccgactgaaggaatccgactgcttgaaaacttcattcatcacgccttttggggcatactgctacgtcaccatgccgtttggattaaaaaatgcaggagcaacttatcaacgtatgattcagagatgcttctcaacacaaatcggccgcaacgttgaagcctatgtggatgatgtagtcgtcaagaccaagcaaaaggatgatctgatctcggatctagaagaaacctttgcgagcatccgtgctttcaggatgaaattaaaccctgaaaagtgcaccttcggagtaccgtcagggaagctgcttggctttatggtgtctcataggggcatccaagccaacccggagaaagttactgctatcctcaacatgaaaccgccaagcacccagaaagatgttcagaagctgactggatgcatggcggcgctcagccgattcgtttcaagacttggcgagcgggggatgcccttcttcaagctactgaagaaaacagataatttccaatggggacccgaagcacagaaggccttcgaagatttcaaacaactcctcaccaagccaccggtcttagcttcaccacacccgcaggagccgttgttgctgtatgtatcagccacctcccaggtcgtgagcacagtcttggttgtcgagcgtgaggaagaaggccatgtccagaaagttcagcgaccaatctacttcgtcagcgaggtcctcgccgactccaaaacaaggtatcctcaggttcagaagctgttatatggtattttaattactaccaggaagctgtctcattattttcaaggtcactcggtaacggtggtcacatcatttccactcggcgatgtactgcacaaccgcgaagcaaatgggcggattgctaagtgggctttggagttgatgtctttggacatatcattcaagccccgcacttcaatcaagtctcaagcgctagctgattttgtcgccgagtggaccgagtgccaagaggatacccccgcggagaaaatagagcactggaccatgcatttcgacgggtcaaaaaggctttcgggcactggagctggagtggttttaatttccccgactggagaaagactaagttatgtgctttggatacatttttcggcgtcccacaacgtcgccgagtatgaagccctccttcatgggctacggattgcaatttccctagggataaagcgtttaatagttcgaggcgattcacagctggttgttaaccaagttatgaaagagtggtcctgcattgacgacaacatgatggcatatcgacaagaggtacgcaaactggaggataagttcgatggactcgagctcagtcatgttcttcgacacaacaatgaagccgccgacagacttgccaattttggatccaaacgtgaggcggcgccctcagacgttttcgtcgaacacctttatacaccgaccgtgcctcataaagatactactcaagatgcggacactcatgacatagccatggttgaagccgactggcgagagcccttcatacgatttttaacttctcaagagctccctcaagataaagatgaagccgagcggatttcaaggcggagcaaactttatgttatgcacgaatctgagttatacaagaaaagcccttcaggaattctgcaacgctgcgtatctttagaggaagggagacaattgctgaaagacatacattctgggatatgcggaaaccacgctgctgcgcgcaccattgtcggcaaagcttaccggcagggttttttctggcctactgcagtatccgacgctgacaaaattgtgcgcacatgtgaaggttgccaatttttcgccagacaaattcatctaccagctcaagagttgcaaactatcccgctgtcttggccgtttgcggtttgggggctcgatatggtcggcccgtttaaaaaggcagtcggcggttacacgcatctctttgtggccattgataaattttccaagtggattgaagctaagcctgttgtcacgattacagcagataatgctcgtgatttcttcatcaacattgtgcacagattcggagtacccaatcgcatcatcaccgataatggcacacaattcaccggcggagttttcaaagacttttgtgaagactttggaatcaagatttgctacgcctcagtggcacaccccatgagcaatggacaggtggagcgagccaatggcatgatacttcaagggattaaagcacgtgtttttgaccggctaaaaccctatgccggcaaatgggtgcaacaattgccatcagtactttggtctttgcgaactacacccagtcgggccacaggccagtcaccttttttccttgtctatggggcagaagcaatgttgccgagtgaggttgaatttgagtctttgtgctttcgaaatttccgtgaagaacgctacgaagaggaccgagtggatgacttgcaccgattggaagaagcccgcgaagcagctttaattcagtcagctcggtacttacaagggttgcgacgttatcataatcgcaatgttcgatctcgtgcctttctagtcggcgacctggttttacggaaaatccaagccacacgagatcggcacaagttatctcctctatgggaagggccattcattatctctgaagttacccggccaggttcatatcgactcaagcgcgaagacggcactctcgttgacaactcttggaacattgaacatcttcgtcgtttctacgcttaacttcatcattgtatttccctattt

SEQ ID NO: 47419 - DNA, 166 bp, Oryza sativa
  Clone ID: PAT_MRT4530_5018C.1
atgacggttgctgccggccaaatccagtcgatgaagaaaacccaagtcgatcggatccaagctagatctgaacgaccaatggagagacgacaacaacatgcatgtggagatggaacaaatgaagctcgcaactcgcaggcctggcttaggagcgctttttgcacaa

SEQ ID NO: 47420 - DNA, 198 bp, Oryza sativa
  Clone ID: PAT_MRT4530_50190C.1
gatatcagaaagacttttttttccctttcatcagaaaaaggcgctgtggcctacagggcaccatgtgcacacaataaacagcgtttttggtatcctgccaagttgattaatgaaacaagaaaccgataaaaacattttgtgacagggagcaaacaggcccaaggagaaggcagaattgtaattcatgcgtaactcatt

SEQ ID NO: 47421 - DNA, 371 bp, Oryza sativa
  Clone ID: PAT_MRT4530_50191C.1
ggtgtaaaaaacagcaggggggcgaaattgcattaccactacataggcagaaatgaccaaagtctgtattatgactatagccatcgcatcatctactgatgaaatcctgaccgcagaaggatacataaaaccaggtgagctgggattaagcatctcaacatgactgggacagactacccactgatcagaacacccgcaaaaatgaataacttttggacaaactataattgtgcaaactcaccccgtatggcctcagcttttggtctttctaacatccttcaaaattgccgtgggtaaattcattggccctgtgaaaagacccccccatggccttacgcagggggcagcctcatctgttgtgggccctggag

SEQ ID NO: 47422 - DNA, 2430 bp, Oryza sativa
  Clone ID: PAT_MRT4530_50192C.1
atggcagcagcaagggcgtgcttggtggtggcgctcctcctcctggtggctctcttctcgccatcggaagctacttcgtctacttctttgcggcggcggcaggtgcggagcctcctcaagcgcctcaacaagcctcccctcgcaacctttcagagcctagatggagatatcatagattgtgtgcacatctccaatcaacctgcattcgaccatcctcttctcaaggaccatacaatccagatgcgaccttctatccagccaagtggcctatatggagaagcaacacgtccattcacccaaacatggaatcagaatggcgaaaagtgccctgacaatactataccgatccgaaggaccaaggaggaggatgtcatgagggccacctctgttacaacgtttggcaagaagacgcacggcgggagccctcaccctcactctcacttgggtggtgtcacggacggccaccactatggtgtagcatatgcgactggggattccaactactacggaaccaaagtgaccatcaatgtgtggcaaccaacgattgcaacattcggtgatttcagcttgtcccagctatggatcacagcgggctcctatgaaaacaaggaccttaataccattgaagcaggatggcagacaaacccgcagttcgtcatcggtggcagcttatcccctgtctccatctatggcagcacacaatatgagtatgattatttagtttggaaggacccagcggggggcaactggtggttgcaactgcaaggcaattatgtgggctactggccatcatccatctttaccctcctgcagacaggcgttgccgatactgtggaatggggtggggaggtgtattctcctcaaattaccgcacccatgggcagtggacatttccctgaggaagggtttggcaaggccacctacagtagagcaatccaagttgttgattcctccaaccatctcaaaccaccaaatgtcgtgctaagaaactccaacaagaggtttacatatgaggctactccattgggtcagatggaggacatggagggttacacgaagaacaccaaaactattgttcaagatgaggagagttacacacgcaagactcggggttacactttaagagcctcaaattcaagcgcaagtctgtaccaatctatcatgttccagggcgcgcagcacgcgagcggagaggaagacgagccgtcgcggacgaacagggagcagtcgcgcgaagcgcttcccaaaaaccttattgccgccttctccctattcaggacatcgaaggcagaggtttcggagacctgctctcccgatcgccgcgaggacgtggaggcgcggtggagcgtgcttggtggtggtggcgctcctgatcctcctggtggctatcgtctcgccatcggaagctacttcgtctacttctttggggcggcgacagacagcctgcattcgatcatcctctcctcaagaaccatacaatccagaccttctatcctgccaagtggcatgtatgatgaagcagcacatccattcacccaaacatggaatcagaatggcgaaaagtgtcctgacaacaccataccaatacgaaggaccaaggaggaggatgtcatgagggccacctccgttacaacatttggcaagaagacgcacaacgggagccctcactctcacttggctggtgtcacagatggccaccactacggtgtagcatatgcaactgggaatgccaagtactacggaaccaaagtgaccatcaatgtgtggaaaccaaagattgcgacatccagggatttcagcatggcccagctatggatcacagcgggctcctatgctaacaaggaccttaataccattgaagcgggatggcaggtgtacccagctatgtatggggatgacaaaactagactcttcatctactggactcgtgatgcatataacagaacaggatgttacaatctagcgtgctcagggttcatccagacaaacccgcagttcgtcatcggtggtagcatatcccctgtctccatctatggtggcacacaatatgacccagcaaggggtaattggtggttgcaagtgcaaggcaaatatgtgggctactggccatcgtccatcttcacccgcttgcggacaggcgttgctgacaccgtggaatggggcggggaggtgtattcgcctcgaattacgacacccatgggcagtggacatttccctgaggaagggttcggcagggccacctacagcagagcaatccaagttgttgattcctccaaccatctcaaaccaccaaaaggtgtgggcttgatagctccgctgcccaattgctataacgttatcgctggttcgtccagtaccactaactggggcacttacatctactatggtggacctgaatgtcctcgaaactctcaaattgaagtgatgtag

SEQ ID NO: 47423 - DNA, 1455 bp, Oryza sativa
  Clone ID: PAT_MRT4530_50193C.1
aaactgtaacaatacatttatttgctagcttggttcaaacctcttacatatacatgcaaatgtatacatacacgtacgtactagcaaccagagcatgaaatgagacatgtactattagctagtatagaccctagctaataatactttattattgggcgcatgtagtactagatgtaaattattaaggagatgtaggtagtttgatggcgagcacgatcgatctctctacatcacttcaatttgagagttttgagggcacccaggcccgccatagtagatgtaagtgccccaactggtggtactggaggaaccagtcatgacgttatagcaactgggcaacggagctatcaagcccacaccatttggtggtttgagattgttggaggaatcaacaacttggattgctctgctgtaggtggccttgccgaacccttcctcaggaaaatgtccactacccatgggtgtggtaatttgaggcgaattcacctccccaccccattccacactgtcggcaacgcctgtctgcaggagggtgaagatggatgatggccagtagcccacattattgccttgcacttgcaaccaccaattgccccccgctgggtccttccaaactaaataatcgtactcatattgtgtgtcaccataggtggagacaggggatatgctgccaccgatgacgaactgcgggtttgtctggatgaatcctgagcatgctaggttgtaacatcccgtttcgttatatgcatcacgagtccagtagatgaagagtctagttttgtcatccccgtacatagctgggtacacctgccatcctgtttcaatggtattaaggtccttgttatcataggagcccgctgagatccatagttgggacaggctgaaatcaccagatgttgcaatcgttggttgccacacattgatggtcactttggttccgtagtagttggcatctccggttgcatatgctacaccatagtagtggccgcttgtgacaccagccaagtgagagtgagggtgagagctcatgtcgtgcgtcttcttgccaaacgttgtaagagaggtggccctcatgacatcctcctccttggtccttcggattggtatagtgttgtcagggcacttttcgccgttctgattccatgtttgggtgaatggacgtgttgcttctccatataggccacttggctggctggaaggctgcatctggattgtatggtccttgaggagaggatgatcgaatgcaggctgtctggagatgtgcacacagtctatgatatctccatctgggctctgaatggttgcgagaggaggcttgttgaggcgcttgaggacctgccgccgcctcaaataagtagaagtagcatccgatggcgacaataagcttgggaagatcatagccagcaggaggagcgccaccaagcctcgcctactccacgtcctcgctgctgccat

SEQ ID NO: 47424 - DNA, 2432 bp, Oryza sativa
  Clone ID: PAT_MRT4530_50194C.1
ccaaaattgtacctccggtcaaaaaatagtacatgacacctcgcagcagaatagtccacaaaccaaccttgaaaccaagaaaacaaaacagccacaccagattaaatattcagtaattaaggaggaaatttaaagaataataattcagccacaaaaccaatattttggaaaaaacttgtgtttgctgattacaaattaagtttcaggttaattaaccaagttttgtttcagtggaactcttcgtcaggcaacgtgccggccttggcgccgacgttgaagaactcgatgatgacctcgagcgggaggcccttggtctcgggcaccttgagcgccacgaacacgagcgcgacgcagcacacggcggcgtagaaggagaacacgccggcgagccccacggagctgagcatgacggggaggctgtacgtgacggcgatgtcgccgagccagaacgtcagcgagcagatggcaatgcagagtcccctcaccctcgtcgggaagatctcggcgcagaggatgttggggatggggccgaaccccatgacgaagcagcagaagtagacgatgacgctccccgtcgacagcgccgcgtgcgcggtcgccgccatgggcacgacgttcgccaccacgagcacggcgagggacgcgacgaggacgggcagcgtccagaggaggagggcgcggcggcccgaggcgtccatgaggcgcatggcgacgccgatggacgggagcatgaggagcgtggtgaggccgctgatgaggatggaggtggagtcgccggagaggccgaggctggcgaggaggacgctgacgccggcctggtcgaggatctgcggggtgtagtagagcacgccgttgatgccggagaattgctggaggatctggatggtgacgccgcagaagagggcgtggcggacgcccggctcgagcagctcgcgccacgccgggcccgtcgacgccgccgccgccaccgcctccggcgggttcgcgaacgccggctcggtggggctctgcccgatcaggacgtccttggtgtacagcatcgaccggctcaccagcgccgccgcgtggacgtacgccgtggactgcgcgtcgccggcggcgcccgagtcaccgccgggcgcggcctcggactcctcgtgcaggtacatgcgcttcaccgcgccgcgcttgacgccgtcggggcccacgttctccgtccacttccacgccagctgccacccgccgccgatgcccatggtgctcgccgtctcgacgccgccgccgccgccgatgctgctgtgccgctgcatcgccacctggccggaggcgggctcgttcttggtctccacgtcggtgctctgccgcgacagcagcggtgcctgcaggccgccgccgtcgtcgtcgtccttgccgtcgtcggagaggtactcctcctcctcctcgtcgaggtcgtcgtcgccaggctgcacgttctcctcgtcccagctgctgccgccgggcctatcgttgacgctaagcatgctcccgaggttggggaacagcgtgctccccctcatgctgcggtggcgccgccgccggactccggcagccgctcgtggacgctcccgagaagcgccaccacggggtccttcatctgctcgtacatgctgccatggcgcgacgcctgcagccccagcgagctccccagcatgctgccgcggccgccggcgaccggctgcgccacccacgaaagcccgggccgacgacgtagtcctcgatctcggtgtcgccgccggtgccgaggccctcgacgagcagcgccatctcgccggagacgtctcgcggccgcgcagcatctcgagcacaaccctggcctccttcatgcgccccttgctgacgagccaccgcggcgactccgggaggtagaagacggtgacgaacaggtagagcagcgaggggacgaagaggacgccgagcatgatgcgccagttgggcgagggcgagagcgtcatggcgaagatcatgcagtaggacatgaacatgccgccggagccggtgaactgcggcagcgtgttgaggcggccgcggatctccggcggggaggtctcggagatgtagacggggacgagggtgacggcgaggccgacgccgaagccgtcgacgaggcgggcgaggaggaggacgtagacgttgggggaccagagcatgatgaggccgccggcgaagtagaggagggaggaggcgatgagcatggggcggcggccgacgaggtcggagacggggccggagaaggtggtgatgatggtggcgccgatgagggacatggcgacgacgaggccctccacggcgggctgggtctcgagggcgaactcccgcttgatgtacagcacggcgccggcgatggtggcgttgtcccatccctgcaggtagttgccgatggcggccgccacggccaccaacacggcgcctctcat

SEQ ID NO: 47425 - DNA, 378 bp, Oryza sativa
  Clone ID: PAT_MRT4530_50195C.1
atgccaaacccccggtacagaaaaatcgtctcggagacgatttttttcttcccgagcatacacggcgctcatcttcctcgactcctcacggcgctaggtttggaggcggcgcgaggtccgggagcagcatatctccagccaccactggtctccttcccgccctcggtcaccgccggtctccatcccgctacagccgccgccgctcgccatctctccttcctcgcttcggattcaccggttgcgggagagggcaaggtcgagggcaacagcccggacatcaagaagcagaggtgcagagcacagcttcttgtcctgctgcttgcaaagatcaattttttcgttggctttgttccaacattgaaggttcacctgatatga

SEQ ID NO: 47426 - DNA, 349 bp, Oryza sativa
  Clone ID: PAT_MRT4530_50196C.1
tttttgttttatcattttgcggggaggaattgttttcaagaattttaataaggcaaatccacacaagagagaggacctgaatccaagacttagttattcttaagtacagcagattttctattcctccatgatcctatgagcttctacacctaaaccacacaaatgaccatgcacgggatctatttctccactggcaaataaactgggggttgcgtggtcaatgctccatgttgagatcagtagctcattcctgttaagcacgctacaagggtgtcggagattagctcacggtcggatgctacgggtcaaattaaccccgtcgggaggagcttgacggtgagctcgacgt

SEQ ID NO: 47427 - DNA, 130 bp, Oryza sativa
  Clone ID: PAT_MRT4530_50197C.1
gcaccacaccaaacgcatctccgccgtcgatctccacccgtggggcccacccgcggagacacccccgggcccaccttgtctgcgcctaacccgcgagacggggttaaccgcggccgaccacgtcttttga

SEQ ID NO: 47428 - DNA, 1176 bp, Oryza sativa
  Clone ID: PAT_MRT4530_50198C.1
attcacagatttctgggcaacagcgcgcccgcacgcacgcacgccggcgacaccacggagccgagcggcatcgcgctcgaaactggccgctactgccacgcaccgcgccgcgcgcgcgcacgcacgctccccttgccatccacggcccgtgcggcgcacgccaacaaccacggcaacgcaacggccgcgccacgccacgccacgcgacgcgacccacaccgcgccgagccacccaacccaagttgcctggcgaaaccgcgaaacgccgcggatgccatcggcttcaacacttcgcaccgcaaacaccgccgaaacatggaaaaactccccaagaaaacccagtagggcctttcttaaatctcgcgcacgtcctccaccgccgctgcggcctttgccgctcccgtttaaaagcgagccaccgccccgcctcctgcctccccccaccaacaccactacccctccacatctcccactaataacaccgacctgacgagcaccaccgtcccgaacaccagcagctgcgcacatgaaggtcctacggctgctcgcggcgcggcggttccggcgccgcgcggtgtccacgatcacggcgacggcgccggccacgccatgcggtggcggcggctggtatggcgaggacgagggcccgttctttgacctcgacctgtcgtgctgctcggcctcggcgcccgcgtcgagcgccgagtcggggtccgagtcggaggagaggagcgggtcttctacgttggcggcggtagtgggtgggcgcgcgcggcggcggcggcgcccgcgcacctcaagttctgcgcgtccgagccgagcgacgccgcctcgcggtacggctccggcaggcgcggcaagctgcgcacgctcagcttcgggtccgccaaggccgcgttctacggcggccgcgccagcttctccaggagctccaacagcgcgcgctcggccaggctcttcgccgcgttcggctacggctcgccggaccagggggacgaggccaacaggaggacgccctcgcgggacgtgatcaggcggtacctcagcaagatctcgaggcaactgcgccgggtagcccccagcgccggcgcggacctccggggcggcgtgccagtcgccgccgcctcgccgcgacgactcgctcctcgagcagcaggacggcatcgcgagcgccat

SEQ ID NO: 47429 - DNA, 846 bp, Oryza sativa
  Clone ID: PAT_MRT4530_50199C.1
atgaaggtcctacggctgctcgcggcgcggcggttccggcgccgcgcggtgtccacgatcacggcgacggcgccggccacgccatgcggtggcggcggctggtatggcgaggacgagggcccgttctttgacctcgacctgtcgtgctgctcggcctcggcgcccgcgtcgagcgccgagtcggggtccgagtcggaggactactcgtcgtgcgccggcgagtcagacttcgtcatctcgctgcagcggagccgctccgcgtcgccgtcgtacgaggagcgggtcttctacgttggcggcggtagtgggtgggcgcgcgcggcggcggcggcgcccgcgcacctcaagttctgcgcgtccgagccgagcgacgccgcctcgcggtacggctccggcaggcgcggcaagctgcgcacgctcagcttcgggtccgccaaggccgcgttctacggcggccgcgccagcttctccaggagctccaacagcgcgcgctcggccaggctcttcgccgcgttcggctacggctcgccggaccagggggacgaggccaacaggaggacgccctcgcgggacgtgatcaggcggtacctcagcaagatctcgaggcaactgcgccgggtagcccccagcgccggcgcggacctccggctacggaagagccggtcggcgtccgcggcgcagacggcggcgtgccagtcgccgccgcctcgccgcgacgactcgctcctcgagcagcaggacggcatcgcgagcgccatcgcgcactgcaaggagtcgctccaccgtgcgtccatgtcagagttcgactcgccattgctgcggtcacggagcgatccacgaagctag

SEQ ID NO: 47430 - DNA, 461 bp, Oryza sativa
  Clone ID: PAT_MRT4530_5019C.1
tgatttttctcctggctagttattcaaaatagagtatgaacggcggacagattgtaaaaagaaggatggcaaaaccaaaaggtttgcccgttatgcggtacggttgatgtcaacagttcatctgctagctaaatgctaaatgtagggttacaaagatagtgtggtcagagatttagagatggactagcaaggaccttcagacagccaaatagaaagattgttactcagtcaagcactggtggaaccttgtgctggaatcccccgacaaccttcgcaaacccctcaaaaccctggtgatcctagtttcctaagaaatttggtgtgagcgaatgcaagaacttttcgccacgaatgcagcaacgccggcctcaatactagccaagatcaaggaagaagtggcagcatgggtgaaagcaggagccgttaggctccgggagttcgaaattttgggagatattgcc

SEQ ID NO: 47431 - DNA, 2115 bp, Oryza sativa
  Clone ID: PAT_MRT4530_501C.1
atgcagacgcttgaacacctacttcgcatcattgacgggttcacaaggggcgaagaggattccaagcgatggcaagcaatacaagttgagtacgataaggcttccgtcaccactgctcaagcccaacaacaagttcaagttgccgaaccacctcctctcgttgttcgccagccccagccggcgatccaagcacaaccgccaaggcaagaagatgccgaaggagtaacgttcccgcatcaagatcctctggtgatctcagccgagatagctggtttcgaggtccggcgaatcctggtcgacggaggaagttcgaccgatgtcatctttgccgaagcatatgccaagatggggttgactacccaagcccttaccccagcaccgacatcgctccgaggatttggcggagaagcagttcaagttcttggccaagcacagttgatagtagccttcggcacgggggaaaacagacgcgaagagcaagtattatttgacgttgtcgacatcccatacaactacaacgccatcttcggccgtgcaaccttgaacaagttcgaagtcatttcccatcacaattatctcaagctcaagatgtccggcccagcaggagtgatcgtgatcaaggggcttcatccttcggctgcttcaaaaggcgatttggccataatcaacaaagcagtgcacaatgttgaggccgaaccgcatgaccgagcgaagcacgtgccaaagcccgcccctcacggcaagataatcaagatgcagattgatgatgccgaccccataaaactcgtatcactgggagggggcgacatgggcgaagaagaagctaagaacatcctagaggtactaaaaaagaatattgatatcttcgcctggggccctgatgaagtgggaggtgtttcggcagatctcatcatgcatcacctggcagtcaagccggatgcaaagccaaggaaacagaagctatgcaagatgtccgctgatcgtcaggaggcagcaaaagccgaagtccaaaaattgctcaaggcaggggtcattcaagagatcgatcatcctgagtggctggcgaattcagtgctggtgcggaagtcaaatggcaaatggcgcatgtgtgtcgatttcacagacttaaacaaagcatgtccgaaggacgatttccccttgccacggatcgaccggctcgtggattcgacagccggctgcgaactcatgagcttcctagatgcatattccggctatcatcagattcgcatgaacccagccgacatccccaagacagccttcatcacaccgtttggcaccttttgccacctcaggatgcctttcggtctgaggaatgccggagcaacctttgctaggctggtgtacaaggtcctttacaagcagttggggcaaaacgtggaagcttatgtcgacgacatcgtcgtaaaaagccgcaaggctttcgaccacgcgtccgacctacaggagaccttcgacaacttgcacgcagcggcagagctatccccctttgacttacattttgttgcccgcactgctgtcaagtcccaagtgctagccgactttgtggccaaatggacaccggcattcgcccctgaacccgagctcgtcaaacagccctgggtgatgtactccaacggttcgtggtcgcacaagggggcgggcggtgcggcagtagtcacttcgccaaatggtgtgccaattcggtatgctgcaaggctacagttcgacacaactaataatgcggcagaatacgaagccattcttttgggcctaagaaaggcgaaagcattggggattcggcgcctgctaatccgaaccgactccaagctggtggcgggctatgtcgacaagtcttttgaggcaaaagaagaagggatgaaaaggtatttagatgccgttcggtctatggaaaagtgcttcaccggcataacggttgaacatttacctagaggccagaacgagaaagcagacaccctggcgaaatctgccgcttgtggtggcctacattcgcctggcatcctttttgaggtcctgtatgcaccaagcgtgcccatggacagcttggaggtcttggcaatcgaccacgtcaaattgagcaaagacccatacgactag

SEQ ID NO: 47432 - DNA, 421 bp, Oryza sativa
  Clone ID: PAT_MRT4530_50200C.1
aggtcggcgcgcaagggcgggtggtaggcgctggcggcgggtcgacatggacgtgtctctctttgtcctcgacgcaggtcgagcggcggtggacggtcggcgcgcacggcattgcgcggggcggggtggtgggtggcggcgcgaaacgtggaccgcgggccatgggcaccggtgaggagggcgctagaggccgccggcgggtctgtggcgtcgcggactcacggagagggtgcgggaagcggcgggcagcggcgaggagggcgatccctcgtcggtgcatccttcatccacatccacccccctccccaccccttcccggcggcacctggatgctatccgcctcctccgcccatgcttctctttggaggccgccaatcaagatccacctcctcctccttgctcggctcttccgacggcgcca

SEQ ID NO: 47433 - DNA, 257 bp, Oryza sativa
  Clone ID: PAT_MRT4530_50201C.1
tcgatttgggacgcgacacaacccaagaaagttactcaggttcgcagctttttgggtttggcaggatactaccgaagattcatcgagaacttctccaaaatcgctcgacccatgacgcagttgctgaaaaaggtagaaaaatttgtgtgaaggcccccaagggaaaaggcggtcccaactttccaaagaaaagctagtctcttggccagtgttgttcttaccggatactcacaaggacttcctggtgtactgtgacg

SEQ ID NO: 47434 - DNA, 327 bp, Oryza sativa
  unsure (1)..(327): unsure at all n locations
  Clone ID: PAT_MRT4530_50202C.1
gttcttcttgtctggctgtagccggccgatcagctcccgggccggcgggcaagcacaatacagcgtcccacacggcctcggcgtgctgttatacttcttgttagtgcatgtaaatatggatgggggggggggggggggtggggtataaggcaaatgggcagcagctgtgcctaggtcaaagccacggnggtggcaggcccttgtctagcacttgttgcccgggttttgctatgtactactgctgttgagaagaggatcttcaagtgtaaaaaccacttcttttttctttttaaaatgagaggggcatagaatctacctccaattttc

SEQ ID NO: 47435 - DNA, 252 bp, Oryza sativa
  Clone ID: PAT_MRT4530_50203C.1
atggggaggaggcgcggcggcgcacagactggagagactgagagagcgaaagtgagggccgaggggtgcgtggagactgaagacgaagcgctcgaagagagggtatacgagaaggatttggaacctcgttacgacatgggtagggtttcaccagctggaaccccgacgttcggggtgacgcaatcggtaaaagactggtgggaaatgctggtctctgtgtctggtgtcccaagaagagactctgcaccctga

SEQ ID NO: 47436 - DNA, 529 bp, Oryza sativa
  Clone ID: PAT_MRT4530_50204C.1
cccacgcgtccgaaggaagggatggctcctccgggccaactgctccccttggcccgctcgctcctgcccctttccgctcctcccttcgtctccggccgccgccgccgcctccctactctggtcctcggcagggcgctacctccgcctacatggctgccgcacggccgcctctcgccggcgcatccacttccctttgcgcctccccggcgtctgtccaggccgcctcctcccgctacgtcgcttcctggggcttcgcccggcggcggagccgaggcccaggcggtgttggcggagttcgtgacgtccgagagggtgaaggtggcggcgatgctggggctggctctcgcgctctgcaacgccgaccgcgtcgtcatgtccgtcgccatcgtgccgctgtcgcaggcgtacggatggaccccgtccttcgccggcgtcgtgcagtcatccttcctttggggttatctggtgtcaccaataattggtggagcactggtcgactactattgcggaaagcgagttatgggttatg

SEQ ID NO: 47437 - DNA, 127 bp, Oryza sativa
  Clone ID: PAT_MRT4530_50205C.1
tgtcgtgacattatcaggctctaaggaaggacatggcgatctgcgagagcagcattgatattatcaaggtaacagcggccagtgtagtgccggttcatcttgtatgaatacagtctttatatatgca

SEQ ID NO: 47438 - DNA, 426 bp, Oryza sativa
  Clone ID: PAT_MRT4530_50206C.1
atgtggttgctcgccgccgttggagaagctggatccgatggccaagccctcaaggccgtcgcatcttatggcggcaagttcatggccggccaatccggtggtttgacggatgatggaggggatggtggtgatggagcagtggggcgaaatccttgcccatgccaccagcatcccttcgccacgtccctctatcttctgctcttgcgatacacgagccgctgccgtcgtcgagcattgcctccctccccaacatcttccggggcgttcgaggtgaatcgggtcgccccagtgacgcccttgtctggtgctgcatgcctcctcatcctctccctcacgcgactgcaagatttgaatcactccgccctggcagcaatagagcaagctcatgtcaccatagtcccatgctcttggggaaggagatactag

SEQ ID NO: 47439 - DNA, 666 bp, Oryza sativa
  Clone ID: PAT_MRT4530_50207C.1
attcttatccacaaaaaaaagggggggggggccattcttgtcttttcaattaggaggaaacccgaagaggacccccaacaggttttttggcgggcgccccccttatgcagggcctctttttggggggcgttctttattttaaaatttgttttttaaaaaatttttaagaaaattaaaaatgccccctttggtctgaattttatttttttttttttaaggttttttttatccccattcgcaaattaaaagggttccccgcaattttaaaaggttttgggagttttttttttggggggggggttttcacccaaatttttgtcccgtggggggacccccggaattttggggggggtccggggggggtacatattttttttttattggaggtttttaaagtttgggataataaaggctaatagtttttttttttgtaaaataatttttttccaaaaatattaccaaaaataaaaaggggggggaataattatatttaaaaatctcccgggtttttttataaggggcgttttattcaaattttgttatgggggggccatctctccccttttttataaaaaaaaaaaatgtgtggtggtggtttttattttttaatttcccccacccggtggggagagggtgttttttttttgttcccccaatttttttttt

SEQ ID NO: 47440 - DNA, 1167 bp, Oryza sativa
  Clone ID: PAT_MRT4530_50208C.1
ctacactttccccacgtttcccccaaaaatcgggccgggatcgagctccacttcgcccatgatgccgcccacgccgccggcagttgccgccccaatccgccactccccggcttcgccgtcgctccctcggtctataaaaagcatccacgggctcccttctctcttttccccaattcccccgagctctcccgtgccacaaatcgcgcccgcaccacgagcccgtgcgccgccgctttccggcgaggtccggccgtcgctcctctccgccctagccaccgccgctagcatcgccacgccttgctctaccccggcctccactccgttctcccgttccgccaccagaaccacctccccaccgtgaccccgagccacttttgccattgtcaccttcagccgctcgcggcgggcaatggacgccacgtcgggccggctcgtctccaccttcagcttcgcaaggccgtgaggatgcccggccgccactccgccctcgccatccgctgccgagactccgttctccccgcgcgaggtgagcttccgcccccccccttgtcgcctccgaccacctctcctcgctattcccagccaccccgcgctcgcctaacccacccatcaccttcctcaggtcacggcgccccttggccgcccctctgttggcaccgcccgtcgccggagcgccgccgcctctctccgcccgagcttcgccggcgccggtgccgtcgccggtggtcgtcgtccggccgtgtgccgccgccgccttgtcgggtcggctggcgagccggcttcttgccttcctgtgtcgccgcccgtggaccacccgtggtctcggtccacggtgccgcctcatccacggtggacttggtccaccgtgtgccctccccttgaacccgctgacgtgtggggcccacgtgtcggcgccggcctccccttttgctgacgtcagcgattgcttttccaggacctcaaagagaaattctggtgggccagcatgagaagagaaatagccgaattcgtcgcactctgcgatgtttgtcaacgagtcaaagcagaacatcagcgacccgctggactgctctagccccttcagatcccggaatggaaatgggaagaaatcggaatggatttcgaggaagctttgcatttaaatttaatatttgaattctcaacaat

SEQ ID NO: 47441 - DNA, 2114 bp, Oryza sativa
  Clone ID: PAT_MRT4530_50209C.1
atccccgggctgcaggaatcggcacgaggcccgctttcttcttcttcttgtgctgctgcctgctggtgctggggtgggggactggattggggctaagataaatttggtgggtttcgattcgattcgagagctctcctccttcccggctcccggggttcaggagggttggttggttggttcacaaggcaaggcagatgagatgaggaggaggaggagaggaattgatcgatgatgatgatggattcaagtgcaagtgcaaggcgctgggtttggatctgagctcccatcgttacctcttgtctgccgccatggccaacaaatcgaaatcggcagcggcgtccccttcttcttcctcctcaccgtcagtcgcccttggccttgacgccaccacacccaccacctccccactaccactagcacctgcagctgcagcctcttcctccaaccccaatgccacgccggccgacaccactcccacttccccgccgcccgcctccccacctctaccgtccgcaacgccaccgcttgctgcctcgccaccgccaccaccaccaccaccgccacccagaaattcaccatcgcctcctaaaccgccaagccaagcagcgcaatcgcctctgcccccgacaacaaccacgactacgcctccgactgctccagtaccagcagcagcgcctcctcctactgctccctccccttattctgctccgtctcccactcccactcccacccacacccagccccgcccatctccgccgctgctgcctacacctgccactgctgctgaccctgccaaccccaacaaggccaggcaccccagctccaacaaatcctccagccctgctgctcctcgacgcactaactcctcctcctcaccgcccaaccttgccattgctgtcggtgcagtgctcgccatccttgtgcttagcttattaggagctgctatatggtacactaccaagaaaaagaagaagcagcgtaggagggataatggctaccgtgctggattcatgtcacccacttctcccttgtcttctcaccacccatcatcaggatcaggtgcctccgcaaatgtaggatcatcgttggacccttctttcaaaacaaactatagcgccggaagtcccaaactgaaagcatgcatgtctgatattagcatgggcaattcccgcttcttcacataccaagaactgtaccagattactgatgctttctcagctcacaacctgctgggggaaggagggtttgggtctgtatacaagggccacttgccagatggaaaacaagtggctgttaagcaattaaaagatggtggtggacaaggggaacgtgaattccaggctgaagtcgagataattagtcgtgtgcatcaccgtcatctggtatctcttgtgggatattgcatttccaataaccaaaggttacttgtctacgactttgtgcctaataacacccttcattatcatcttcacggccatccaaggataatccaccgagacatcaagtcctcaaacattttgttggataataacttcgaggcacatgtggctgattttggtcttgcgaggttggctttggacgctgtaactcatgtaactacccgtgtaatggggacatttgggtacatggctccagagtatgcatcaagtgggaaattgactgagagatctgatgtgttctcttttggtgttgttctcttagagcttatcactggtagaaaacctgttgatgcatcaaggccattgggtgatgagagccttgttgagtgggctagaccattgcttactcaagctattgagacaggtaatttggaagagttggtcgaccccaggcttgagaggaacttcaatgaagctgaaatgttccgtatgattgaagctgcagcagcctgtgttcgatactccgcatcaaggaggcccagaatgagccaggtggtgcgagctcttgatagcttagccgatattgatcttacaaatggcgttcagccagggcagagcgagcttttcaatgtggcgaacacagcagaggttaggatgttccagcggatggtgctgggcaaccacgatgacagctccgacatgagccaatacggttggagcagcagtcgccagtag

SEQ ID NO: 47442 - DNA, 1415 bp, Oryza sativa
  Clone ID: PAT_MRT4530_5020C.1
atgaggaggatcacgtggctcgcgacggcggctgcggcgctgtgctgcctcgtcgcggcggcgagtgcgacggcgcagtgcaggttcccggccgtcttcaacttcggcgactccaactccgacaccggcggcttctgggccgccttcccggcgcagcaggcgccgttcgtgcaagcgacggggcttccgctgctgagcccttacctgcagtccgtcggctccggctaccgccacggcgccaacttcgcgacgctggcgtccacggcgctgcagcccaacacctcgctgttcgtcaccggcatcagccccttcttcctcgctgtccagctcaaccagaggaaggagctgaggaccaaggtgctcacctccaatggcaacaacgaccaacttcctgcacctgatgttctgcacaatgctctgtacacaattgacattggtcaaaatgatctcacctccaacctgggatcacagagcattgagacggtcaagcaaagtctcccttcagttgttagcaagatctcctctactgtgcaggaattgtacaacattggcgctcgcaacattatggtgtttaacatggcgcctatcggatgctacccggcattcctcacgaaactcccgcataccagcaatgacatggatggatatggttgcatgaaaacctacaacagtgcagtgacctactacaatgaactgctgaacaatagcttggccgaggttaggaagaagctgcaggatgcatctattgtgtatcttgacaaacacgctgtgacgctcgagctgtttcgccatcctaaagctcatgggctgaagtatgggactaaggcttgctgcggatatggtgatggggcttacaatttcaacccagatgtgtactgtggaagcagcaaattgctgaatggccaaacggtaaccgcaaaagcttgtgctgatccacagaactacgtgagctgggatggaatccatgcgacagaagctgcaaacaagatcatagcatcttccttgatgagcggctcatattcatatccaccttttgatctttccaaactttgccacctacagcccatagcataatgcgacagaagctgcaaacatgatcatagcatcttccttgatgagcggctcatattcatatccaccttttgatctttccaaactttgccacctacagcccatagcataatcacagcaccaatctagtcatacttagttgctgaaaccagaatatgacaggaaagcacatcttctggaaaagagatgttgtaaatagtatgaaagtctcagtagtcagtagtacataaagaggtttgatattcaaaccttcaactaagaataaaatcatgtttattgtatatcctactaatacacagtactacggtaccgagacttgaattgcaaaaaaaaaaaaaaaaaaa

SEQ ID NO: 47443 - DNA, 1017 bp, Oryza sativa
  Clone ID: PAT_MRT4530_50210C.1
attcttcagttggatctggttgatcctacagttaacgtatctcactctttgggtattctttccatgcctattccgcagacaaacgctcactttccaatcatccaatatgctgatgatactctgataatcatgaaaactgatcaaaaagaactgttttgtctcaaagccttgttgaacacatacactctctgcactggtttaaaaataaatttccacaaatcttgtatgatccctaccaacacttatagccaaaagttgaaaatcctggctggaacctttggatgcaccataggggccctacctttcacatacctgggccgcccaatggttactaccaaacaaaaaaaatcattgactttgccccactcattgacaaaattgaaaggagactcccatcaaccacagctttttttgaaccatggtcaaagattaacaatggttaactcagtcttatcatcgtttccaacatactacatgtgcatcctacatcttccaaagaaagtgatctagcacattgacagagcaagaagacattatctatggagaaaaagcaatactctagaaactaaaactcattgcttggctacataggatctggtttgcaaacctaagaaaaaagggggacttggaattatcaatttggaacttgagaacacggctctgctaatcaaacatctagacaagttttacaacaaaaaagacatgtcgtgggtacacttgatatggaataaatactactctcactctaccatacccccacataaagaaaaaggctccttttggtagaaagacattttcaggctaacccccctgttcagggcaatcacatttgtacatattggctcaggagaaaccactcttttctggaaagacaaatggaacaattcttgtctacaaaataagttctccattttattctcatatgcaaaaaatgaagacatatcagtacaagacttcttatcaatccatgagttcaaacataattttcacataccattatcaaatcaagcaatgcag

SEQ ID NO: 47444 - DNA, 239 bp, Oryza sativa
  Clone ID: PAT_MRT4530_50211C.1
tcggtggcggccgccgcgtacgactccgactccgcggcgaggggtttctcctgcggggcccacttcttcgtgcgggccaccgactcgaggaaccgtgtcgatgcacgcggcgcggggggacaccgtgggcgccgtgctctctctacctcgccgaccggggggtaccggccgcgacctcccgcctcgactacgccgtgaggcagctcgcgccggagaccgccctttgccgacctaccgcc

SEQ ID NO: 47445 - DNA, 114 bp, Oryza sativa
  Clone ID: PAT_MRT4530_50212C.1
atggataaggcgctggtctacggaaccagagattctggggccaagatatcagctctcaaccatgatcaagaaccagggtccaggaagagcacatgccacggacttcagcgatga

SEQ ID NO: 47446 - DNA, 5895 bp, Oryza sativa
  Clone ID: PAT_MRT4530_50213C.1
atgggttccgtcaccggcatcgacgacctcgtcttcccaccagggcagacgtttcggttcggcagcctcgacttcgtcaccaacaacttcggcaagatttctctccttgactcggaatcagaccagtcgggagagaatcgacttccagtcccgtttggattcccaaacgcggctgaaagttacttcaagaccatctcgatcgagtcggcttcaaaccacccggccgagatcgcattttctccaacgacgccagatcaagatgatggggcttacccaccgatcctgatgaagctccccgacgatctagcggccgtcttcaccacgacagcgtcttcatcccgtaggcctaggcggaagtcggcttcaacaccgatttcgcctagcttcagggaagtcggcgtcatcctccaaccactcggcacggtttcgacggatcagctggatgactacaacagctctcccaccgtcgactcacgtcctactgacatcgtggagtacgacgaatttagttctcgctacaacgacttcgacgacttcaacgacttcgacggaagcctagatgacaattacacccctctctactttggcgttttcatggccaataatgagacggaggagcaacgccaagcccgggagactgaagaacgtcgccgactggaggaggagcatcaagtacaagaacaagaacggctacggcgtgagcagcaggaccgtgagcggatcgccaaggaggctgaagatcgacgtcagcgagctttggaagcagggcgccgagcgcgtgatctcatcggccaacaagatgtcgaagggacaccggttttccgcacccctcaacagaatgcggttgccgcgatcacccttctcgacaccctcctcaaccaaaacgagctcaatcgttccgaccacgtcgtcaacatcttgaaccagacgaagaccatgatcgcagcatcggtcccagttaactccgaaagcgtccacacgccgactggcagccgagttccccacttccgatctcatgactaccatcatccaagcctcagcatcactggagcaggatccaatcgcaggagcaggggccacgacgagcggtctgttcactcgcctcccgaacttcatagggagcgccgagtggaacggcctcactcaccacctcgtcgccgccccatcgatcttcgcgacacaatcatacagcgccgagcagctcgaggctaccatcactcgccggatcgccgcgacgacgaccttgatggagtagcggccttcaccgacgatctgcgtcgagtggattggccagccggcttcaaaccgactggaatagagaagtatgacggcaccactaaccccgaatcgtggcttaccgtctacggtctcgcaatccgcgcagcaggaggagacaacaaggccatggcgaattatctaccagtggctttagcggattccgcccgatcttggctccatggattgccccgtggtacaattggatcttgggccgaactacgcgaccacttcatcgccaacttccaaggcaccttcgagcgtcccggcacacaatatgatctttacaacgtcattcagaagcccggagaatctcttcgagattacatccggcgattttctgaacaacgtaacaagatctccgacatcaccgacgacgtcatcatcgccgcattcaccaaagggattcgccacgaagaattggtcggcaagttcgggcgcaagcctcccaggacagtcaagctcatgtttgaaaaagccaacgagtacgccaaagctgaagacgccgtcaccgcatcgaagcagtcgggtcccagttggaagccgaaaaatacgccggctacgggaggaggtggaagtaacaatcataaggaccgcaagcgtaagcctgaggaacttgttgcaaccgccgctcactcttctcgacagcgttcgcgcgtcaacaccttcgacaagatcatgaactcccaatgcccgcatcatccaaactccaatcacgtggccaaagagtgcttcatctacaagcagttcgcggagcagtacaccaagtctactcggaagaactccgacgaggaacaaagcacgtcaaggaagaaggacgacggcgacaccccggctggatttcaagaccaccgcaaggagctcaaccatattttcggcggccccatggcttatgagtctaaaaggaaacaaaagctgaccgaacgggagatcaatgctgtccagcccgacacgccccaatatcttcgatggtcagagatcgcaatcaggtttgaccgctcggatcaccctgaccgagtggtccacccggggcggtaccccctggtactagacccagtggttcgtaatgtcaagcttcgcagaaccctcattgatggtggcagtgcactcaatatcctcttcgccaagaccctggatgatatgcagatccctcgctccgagttgaaaccaagcaatgcgccttttcatggagtaattccaggattatctgcaactccactcggccagatcaccctcccagtcacttttggcactcgggaaaatttccgcacagagaatatcagctttgaagtcgccgatttcgagacagcataccatgccatactcggacgcccggcgttagccaagttcatggccgtcccgcactacacttacatgatgatgaagatgcctggtccccgtggagtcctatccctacggagcgacatcaagcaagccgtcacatgcgacaaggagagttgcgacatggcccaaacccgcgagatggcgtctgcccgagaggaaatccgactggctgcaaccacggaaagcgcgctcatcacctttcttcaaaataataaagatatctttgcgtggaaaccttcggatatgcccggtattcccagagaggtgattgagcactccttacatgtcaaagaagacgccaagcctattaaacaacgactccgccgatttgcacaagacaggaaggacgcgatcaaggaggagttaaccaagctgttagcagcaggcttcatcaaagaagtccttcatcccgactggctggcaaacccggttctagttcggaagaaaacagggcaatggcgcatgtgtgttgattataccgacctcaacaaatcttgccctaaagatcctttcgggttgcctcgcattgaccagatccgactgaaggaatccgactgcttgaagacttcattcatcacgccttttggggcatactgctacgtcaccatgccgtttggactaaaaaacgcaggagcaacctatcagcgcatgatccagagatgcttttcaacacagatcggccgcaacgttgaagcctatgtggatgacgtagtcgtcaagaccaagcaaaaggatgatctgatcttggatctagaagagaccttcgcgagcatccgcgccttcaggatgaaattaaaccctgaaaagtgcaccttcggagtaccgtcagggaagctgcttggttttatggtgtctcataggggcatccaagccaacccggagaaagttaccgctatcctcaacatgaaaccgccaagcacccagaaagatgttcagaagctgactggatgcatggcggcgctcagccgattcgtttcaagacttggcgagcgggggatgcccttcttcaagctactgaagaaaacagataatttccaatggggacccgaagcacagaaggccttcgaagatttcaaacaactcctcaccaagccaccggtcttagcttcaccacacccgcaggagccgttgttgctgtatgtatcagccacctcccaggtcgtgagcacagtcttggttgtcgagcgtgaggaagaaggccatgtccagaaagttcagcgaccaatctacttcgtcagcgaggtcctggccgactccaaaacgaggtaccctcaggttcagaagctgttatatggtattttaattactaccaggaagctgtctcattactttcaaggtcactcggtaacggtggtcacatcatttccactcggcgatgtactgcacaaccgcgaagcaaatgggcggattgctaagtgggctttggagttgatgtctttggacatatcattcaagcctcgtacttcaatcaagtctcaagcgttagctgattttgtcgccgagtggaccgagtgccaagaggaagcccccgtggagaaaatggagcactggaccatgcattttgacgggtcaaaaagactttcgggcactggagctggagtggttttaatttccccgactggagaaagattaagttatgtgctttggatacatttttcggcgtcccacaatgtcgccgagtatgaggccctccttcatggattacggattgcaatttctctggggataaagcgtctgattgtccgaggtgattcacagctggttgtcaaccaagttatgaaagagtggtcctgcattgatgacaacatgatggcatatcgacaagaggtacgcaaactggaggataagttcgacggactcgagcttagtcacgttcttcgacacaacaatgaagctgccgacagacttgcaaactttggatccaagcgcgaggcggcaccatctgacgttttcgtcgaacacctttactcgccgacagtacctcataaagatgctactcaagttgcggacacccatgacatcgctatggttgaagccgactggcgagagcctttcatacgatttttaacttctcaagagctccctcaagataaagatgaagccgagcggatttcaaggcggagcaaactttatgttatgcacgaatctgagctatacaagaaaagcccttcaggaattctgcaacgctgcgtatctttagaggaagggagacaattgctgaaagacatacattctgggatatgcggaaaccatgctgctgcgcgcaccattgtcggcaaagcttaccggcagggttttttctggcctactgcagtgtccgatgccgacaaaattgtgcgcacatgtgaaggttgccaattttttgccagacaaattcacttaccagctcaagagttgcaaactatcccgctgtcttggccgtttgcggtttgggggctcgacatggttggcccgtttaaaaaggcagtcggcggttatacgcacctcttcgtggccattgacaaattttccaagtggatcgaagctaagcctgttgtcacgattacagcagataatgctcgagatttcttcatcaacatcgtgcatagatttggagtgcccaatcggataatcactgataatggcacacaattcaccggcggagttttcaaagacttttgtgaagattttggaatcaagatttgctatgcctcagtagcacacccaatgagtaatggacaggtcgaaagggctaacggcatgatacttcaagggattaaagctcgagtttttgaccggctaaaaccctatgccggcaaatgggtgtcacagttaccatcagtactttggtctttgcgtactacgcccagtcgggccacaggccagtcaccttttttccttgtctatggggcagaagcaatgttgccgagtgaagtcgaattcgaatctttgcgcttccgtaatttccgtgaagaacgctatgaagaagaccgagtggacgacttgcaccgactggaagaggtccgcgaagcagctttgattcagtcagctcggtacttacaagggttgcgacgttatcataatcgcaatgttcgatctcgtgcctttctagtcggcgacctggttttacggaaaattcaaaccacacgagatcggcacaagttatctcctctatgggaagggccatttattatctctgaagttacccggccaggttcatatcgactcaagcgcgaagacggcactctcgtcgacaactcttggaacattgaacatcttcgtcgtttctacgcttaa

SEQ ID NO: 47447 - DNA, 765 bp, Oryza sativa
  Clone ID: PAT_MRT4530_50214C.1
atggccggcaagaggccgggagacgcgccggccggcgacacggccgccaagagggcgagaaccgccgcgcgccggcagaagaccaccgtgtcggcgcgcctccgacgctcggagacgaagcacgacacctacgtcgtgcgcgtcggcgccagccgcgtcgtcgccaccgtgaccgcgcgccccgccgtggcgcgccggtgggtgttctccacgcggtggcgccacggccgccgcctccgctccggcgccgggctcaccgtcgcaatgggggtgcagtggacgccgccgtcccgcgcgctcgccggcggcgccgagccgcggccgggcacgctgcagctctgcgtgggcagccggtgcctcgtcttccaggtcgctcagggcaacgccttccccgccgcgctccggcggttcctcgccgacggcggcgtggcggcgttcgtgggctacggcatccgctccgactgccggaaactgcccgctcaccatggccttcatgtggcgtgcacgcgcgagctccgcgccgtgaccggcatgggcagctcgtccatggcgcgcatggcggaggagctcctcggggctcgccggaatcaagaagccggcggcggtgggcaggagcaggtgggacgcgccgaagctgtccaagaagcaggtgaagtacgcgtgtgtcgacgccttcctctcccaccgcctcggcgtccatgtcggcgccgcgccgccgtcgacctcttcttccgactcggcgtgaagcagaacaaggccaagtga

SEQ ID NO: 47448 - DNA, 5895 bp, Oryza sativa
  Clone ID: PAT_MRT4530_50215C.1
atgggtcctttctccggcatcgacgacctcgtcttcccacccgggcagacgtttcggttcggcagcctcgacttcatcaccgacaacttcggcaagatttctctctttgactcggaatcggaccagtcgggagagaaccggatctcagtcccgtttggattcccaaacgcggctgaaacctacttcaagaccatctcaatcgagtcggcttcaaaccactcggctgagatcgcattttctccaatgacaccagatcaaggtgatggggcttacccaccggtcctgatgaagctccccgacgatttagcggccgtctccaccacgacagcgtcctcatcccgtaggcctaggcggaagtcggcttcaacaccgatttcgcctagcttcagggaagtcggcgtcatcctccaaccactcggcacggtctcgacggatcagctagatgaccactacagctctcccaccgtcgactcgcgccccaccgacatcgtggagtacgacgaatttagttctcgctacaacgacttccacgacttcgacgacttcgacggaagcctagatgacgactacacccctctctactttggcgttttcatggccaataacgagacggaggagcaacgccaagcccgggagaccgaagagcgtcgccgactggaggaggagcaccaagcacaagaacaagaacggctacggcgtgagcagcaggaccgtgagcggatcgcgaaggaggctgaggatcgacgtcagcgagctttggaagcggggcgccgagcgcgtgatctcatcggccagcaagatgtcgaagggacaccggttttccgcacccctcaacagaatgcggttgccgcgatcaccctcctcgacaccctcctcaaccaaaacgagctcaatcgatccgaccacgtcgtcaacatcttgaaccagacgaagaccatgatcgcggcttcggtcccagttaactccgaaagcgtccacacgccgactggcagccgagtcccccacttccgatctcatgactaccgtcatccaagcctcagcatcaccggcgcaggatccaaccgcaggagcaggggccacgacgagcggtctgttcactcacctcccgaccttcatagggagcgccgagtggaacggcctcgctcaccacctcgtcgccgccccatcgatcttcgcgacacaatcatacagcgccgagcagctcgaggctaccatcactcgccagaccgccacgacgacgaccttgacggagtagcagccttcaccgacgacctgcgtcgagtggattggccagccggcttcaaaccgactggaatagagaagtatgacggcaccactaaccctgaatcgtggcttaccgtctacggtctcgcaatccgcgcagcaggaggtgacaacaaggccatggcgaactatttaccagtggctttagcggattccgcccgatcttggctccatggactgccccgtggtacgatcggatcttgggccgaattacgcgaccacttcatcgccaacttccaaggcaccttcgagcgtcctggcacacaatatgatctttacaacgttatccagaaatccggagaatcccttcgagagtatatccgacgattttctgaacaacgtaacaagatctccgacatcaccgacgacgtcatcatcgccgcattcaccaaagggattcgccacgaagaattggtcggcaaatttgggcgcaaacctcccagaacagtcaagctcatgtttgaaaaagccaacgagtacgccaaagccgaagacgccgtcaccgcatcgaagcagtcgggtcccagttggaagcctaaaaatacgccggctacgggaggaggtggaagtaacaaccataaggaccgcaagcgtaagcctgaggaacttgttgcaaccgctgctcactcttctcgacagcgttcgcgcgtcaacaccttcgacaagatcatgaactcccaatgcccgcatcatccaaactccaaccacgtggccaaagagtgcttcatctacaagcagttcgcggagcagtacaccaagtctactcggaagaactccgacgaggaacaaagcacgtcaaggaaaaaggacgacggcgacaccccggctggatttcaagaccaccgcaaggagctcaaccatattttcggcggccccatggcttatgagtctaaaaggaagcaaaagctgaccgaacgggagatcaatgctgttcagcccgacacgccccaatatcttcgatggtcagagatcgcaatcaggtttgaccgctcggatcatcctgaccgagtggtccacccggggcggtaccccctggtactagacccagtggtccgtaacgtcaagcttcgcagaaccctcattgatggcggcagtgcactcaatatcctcttcgccaagactttggacgatatgcagattcctcgctccgagttaaaatcaagcaatgcgccttttcatggagtaattccaggattatccgcaactccactcggtcagatcactcttccggtcacctttggcactcgggaaaacttccgcacagagaatatcagctttgaagttgccgatttcgagacagcataccatgccatactcggacgcccggcgttagccaagttcatggccgtcccgcactacacgtacatgatgatgaagatgcctggtccccgaggagtcctaaccctacggagcgacatcaagcaagctgtcacatgcgacaaagagagttgcgacatggcccaaacccgcgagatagcgtctgcccgagaggaaatccgactggctgcaaccacggaaagcgcgctcatcacctttcttcaaaataataaagatatttttgcgtggaaaccttcggatatgcccggtattcccagagaggtgattgagcactccttacatgtcaaagaagacgccaagcctattaaacaacgactccgccgatttgcacaagacaggaaggacgcgatcaaggaggaattgaccaagctgttagcagcaggcttcatcaaagaagtccttcatcccgactggctggcaaacccggttctagttcggaagaaaacagggcaatggcgtatgtgtgttgactacactgacctcaacaagtcctgccctaaagatccttttgggttgcctcgcattgaccagatccgactgaaggaatccgactgcttgaagacttcattcattacgccttttggggcatactgctacgtcaccatgccgtttggattaaaaaacgcaggagcaacttatcagcgcatgatccagagatgcttttcaacacagatcggccgcaacgttgaagcctatgtggatgacgtagtcgtcaagaccaagcaaaaggatgatctgatcttggatctagaagaaaccttcgcgagcatccgcgccttcaggatgaaattaaaccctgaaaagtgcaccttcggagtaccgtcagggaagctgcttggttttatggtgtctcataggggcatccaagccaacccggagaaagttactgctatcctcaacatgaaaccgccaagcacccagaaagatgttcagaagctgactggatgcatggcggcgctcagccgattcgtttcaagacttggcgagcgggggatgcccttcttcaagctactgaagaaaacagataatttccaatggggacccgaagcacagaaggccttcgaagatctcaaacaactcctcaccaagccgccggtcttagcttcaccacacccgcaggagccgttgttgctgtatgtatcagccacctcccaggtcgtgagcacagtcttggttgttgaacgtgaggaagaaggccatgtccagaaagttcagcgaccaatttacttcgtcagcgaggtcctggccgactccaaaacgaggtaccctcaggttcagaagctgttatatggtattttaattactaccaggaagctgtctcattactttcaaggtcactcggtaacggtggtcacatcattcccactcggcgatgtactccacaaccgcgaagcaaatgggcggattgctaagtgggctttggagttgatgtctttggacatatcattcaagccccgcacttcaatcaagtctcaagcgttagctgattttgtcgccgagtggaccgagtgccaagaggatacccctgtggagaaaatagagcactggaccatgcattttgacgggtcaaaaagactttcgggcactggagctggagtggttttaatttccccgactggagaaagactaagttatgtgctttggatacatttttcggcatctcacaacgtcgccgagtatgaggcgctccttcatgggctacggattgcaatttccctagggataaagcgtctaattgttcgtggtgattcacagctggttgtcaaccaagttatgaaagagtggtcctgcattgacgacaatatgatggcatatcgacaagaggtgcgcaaattggaagacaagttcgatggactcgagctcagtcacgttcttcgacacaacaatgaagctgccgacagacttgccaattttggatccaagcgcgagacggcgccctcagatgttttcgtcgaacacctttatacaccgaccgtacctcataaagataccactcaagatgcagacacccgtgacatagctatggttgaagccgactggcgagagccctttatacgatttttaacttctcaagagctccctcaagacaaagatgaagccgagcggatttcaaggcggagcaaactttatgttttgcacgaatctgagttatacaagaaaagcccttcaggaattctgcaacgctgcgtatctttagaggaagggagacaattgctgaaggacatacattctgggatatgcggaaaccatgctgctgcgcgcaccattgtcggcaaagcttaccggcagggttttttctggcctactgcagtgtccgacgccgacaaaattgtgcgcacatgtgaaggttgccaattttttgccagacaaattcatctgccagctcaagagctgcagactatcccactgtcttggccgtttgcggtttgggggctcgacatggttggcccgtttaaaaaggcagtcggcggttacacgcacctcttcgtggccattgacaaattttccaagtggatcgaagctaagcctgttgtcacgattacagcagataatgctcgcgatttcttcatcaacattgtgcacagattcggagtacccaatcggatcatcaccgataatggcacacaattcaccggcggagtttttaaagacttttgtgaggactttggaatcaagatttgctatgcctccgtggcacaccccatgagcaatggacaggtggagcgagccaatggcatgatacttcaagggattaaagcacgtgtttttgaccggctaaaatcctatgccggcaaatgggtgcaacagttgccatcagtactttggtctttgcgaactacacccagtcgggccacaggccagtcaccttttttccttgtctacggggcagaagcaatgttgccgagtgaagtcgagttcgaatctttgcgcttccgtaatttccgtgaagaacgctatggagaagaccgagtggacgacttgcaccgactggaagaggtccgcgaagcagctttgattcagtcagctcggtacttacaagggttgcgacgttatcataatcgcaatgttcgatctcgtgcctttctagtcggcgacctggttttacggagaattcaaaccacacgagatcggcacaagttatctcctctatgggaagggccatttattatctctgaagttacccggccaggttcatatcgactcaagcgcgaagacggcactctcgttgacaactcttggcacattgaacatcttcgtcgtttctacgcttaa

SEQ ID NO: 47449 - DNA, 5838 bp, Oryza sativa
  Clone ID: PAT_MRT4530_50216C.1
atgggttccatctccggcatcgacgacctcgtcttcccacccgggcagacgtttcggttcggcagcctcgacttcgtcaccaacaacttcggcaagatttctctcctcgactcggaatcagaccagtcgggagagaaccggatttcggtcccgtttggattcccgaacgcggctgaaagctacttcaagaccatctcgaccgagtcggcttcaaaccactcggccgagatcgcatcttctccaacgacaccagatcaagatgatggggcttacccaccagtcctgatgaagctccccgacgatttagcggccgtctccaccacgacagcgtcttcatcccgtaggcctaggcggaagtcggcttcaacaccgatttcgcctagcttcagggaagtcggcgtcatcctccaaccactcggcacggtttcgacggatcagctggatgactacaacagctctcccaccgtcgactcacgtcctactgacattgtggagtacgacgaatttagttctcgctacaacgacttcgacgacttcgacgacttcgacggaagcctagatgacaactacacccctctctactttggcgttttcatggccaataatgagacggaggagcaacgccaagcccgggagaccgaagaacgtcgccgactagaggaggagcatcaagcacaagaacaagaacggctacggcgtgagcagcaggaccgtgagcggaccgcgaaggaggctgaggatcgacgtcagcgagctttggaagcagggcgccgagcgcgtgatctcatcggccagcaagatgtcgaagggacaccggttttccgcacccctcaacagaatgcggttgccgcgatcacccttctcgacaccctcctcaaccaaaacgagctcaatcaatccgaccacgtcgtcaacatcttgaaccagacgaagaccatgattgcggcttcggtcccagttaactccgaaagcgtccacacgccgactggcagccgagttccccacttccgatctcatgactaccgtcatccaagcctcagcatcaccggcgcaggatccaaccgcaggagcaggggtcacgacgagcggtctgttcactcacctcccgaccttcatagggagcgccgagtggaacggcctcgctcaccacctcgtcgccgccccatcgatcttcgcgacacaatcatacagcgccgagcagctcgaggctaccatcactcgccggacagccacgacgacgaccttgacggagtagcagccttcaccgacgacctgcgtcgagtggattggccagccggcttcaagccgactggaatagagaagtacgacggcaccactaaccccgaatcgtggcttaccgtctacggtctcgcgatccgcgcagcaggaggagacagcaaggccatggcgaactatttaccagtggctttagcggattccgcccgatcttggctccatggattgccccgtggtacaattggatcttgggccgaactacgcgaccacttcatcgccaacttccaaggcaccttcgagcgtcccggcacacaatatgatctctacaacgtcattcagaagtccggagaatcccttcgagattacatccggcgattttctgaacaacgtaacaagatctccgacatcaccgacgacgtcatcatcgccgcgttcaccaaagggattcgccacgaagaactagtcggcaagtttgggcgtaagcctcccaggacagtcaagcttatgtttgaaaaagccaacgatcactcttctcgacaacgttcgcgcgtcaacacgttcgacaagatcatgaactcccaatgcccgcaccatcctaactccaaccacgtggccaaagattgtttcgtctacaagcaattcgcggatcaatacaccaagactgcacggaagaactctgacgaagaacaaagcacgtcgaggaagaaagacgacggcgacgccccggcaggatttcaagaccaccgcaaggagctcaaccatatcttcggcggccccttagcttatgagtctaaacggaagcaaaagttgactgaacgagagatcaatgctgttcaacccgacacgccccagtatcttcgatggtcagaaatcgcaattaagtttgatcgctcggatcatcctgaccgagtggtccacccggggcggtaccccctggtactagacccagtggtccgtaatgtcaagcttcgcagaaccctcatcgacggtggcagtgcactcaatatcctcttcgccaagaccttggatgatatgcagattcctcgctccgagttaaaaccaagcaatgcgccttttcacggagtaattccaggattatccgcaactccactcggccagatcaccctcccggtcactttcggtactcgggaaaactttcgcacagagaatatcagctttgaagtcgccgatttcgagacagcataccatgccatactcggacgcccggcgttagccaagttcatggccgtcccgcactacacttacatgatgatgaagatgcctggtccccgaggagtgctatccctacggagtgacatcaagcaagccgtcacatgcgacaaggagagttgcgacatggctcaaacccgcgagatggcgtctgcccgagaggatatccgactggctgcagccacggcgagcgaaggagaaatacctgctaccaagacttcaaaaagtggagaaagcgaagccaagactaagaagattcccctagatccctctgatcctactaaaactgctaacaataaagatatctttgcgtggaaaccatctgatatgcccggtattcctagagaggtgattgagcactccttacatgtcaaagaagatgccaagcctatcaaacaacgactccgccgattcgcacaagacaggaaggacgcgatcaaggaggaattaaccaagctgttagcagcaggcttcatcaaagaagtccttcatcccgactggctggcaaacccggttctagttcggaagaaaacagggcaatggcgcatgtgtgttgattataccgacctcaacaagtcttgtcccaaagatccttttgggttgcctcgcattgaccaggtagttgactcaaccgccggctgtgagcttctcagttttctggattgctactcggggtatcatcagatccgactgaaggaatccgactgcttgaagacttcattcatcacgccctttggagcttattgctatgtcaccatgccgttcggactaaaaaacgcaggagcaacttatcaacgtatgatccaaagattcttctcaacgcagatcggccgcaacgttgaagcctatgtggatgatgtagtcgtcaagaccaagcaaaagggtgatttgatctcggatctagaagaaaccttcgtgagcatccgtgctttcaggatgaaattgaaccctgaaaagtgcaccttcggagtaccgtcagggaagctgcttggctttatggtgtctcataggggcatccaagccaacccagagaaagttactgctatcctcaacatgaaaccgccaagtacccagaaagatgttcagaagctgactggatgcatggcggcgctcagccgatttgtttcaagacttggtgagcgggggatgcccttctttaagctgctgaagaaaacagataacttccagtggggacccgaagcacaaaaggccttcgaagatttcaagaaacttctcaccgagccaccagtcttagcctcaccacacccgcaggagccgttgttgctgtacgtatcagccacctcccaggttgtgagcacagtcttggtcgttgagcgcgaggaagaatgccatgtccaaaaagtccagcggccgatttattttgtcagcgaggtcctagccgactccaaaacgaggtaccctcaggttcagaagctgttatatggtattctaattactaccaggaagctatctcactactttcaaggtcactcggtaacggtggtcacatcatttccactcggtgatatactgcacaaccgcgaagcgaacggacgtattgctaagtgggctttggagttgatgtctttggacatatcattcaagccccgaatttcaatcaagtcccaagcgttagctgattttgtcgccgaatggaccgagtgccaggaggatacccccgcggagaacatggagcactggaccatgcattttgacggatccaaacgactttcgggcactggagcaggagtggttttgatttccccaactggagaaagattgagctatgtgctttggatacatttttcggcgtcccacaacgttgccgagtatgaggccctccttcatggactacggattgcaatttccctagggataaagcgtctgattgttcgaggcgattcacagttggttgtcaaccaagtgcgcaaattggaagacaagttcgagggactcgagctcagtcacgttcttcgacacaacaatgaagccgccgacagacttgccaattttggatccaagcgcgagacggcgccctcagatgttttcgtcgaacacctttatacaccgaccgtacctcataaagatactactcaagatgcggacactcatgacgtagctatggttgaagccgactggcgagagcccttcatacgatttttaacttctcaagagctccctcaagataaagatgaagccgagcggatttcaaggcggagcaaactttatgttatgcatgaatctgagttatacaagaaaagcccttcaggaattctgcaacgctgcgtatctttagaggaagggagacaattgctgaaagacatacattctgggatatgcggaaaccatgctgctgcacgcaccattgtcggcaaagcttaccggcagggttttttctggcctactgcagtgtccgacgccgacaaaattgtgcgcacatgtgaaggttgccaatttttcgccagacaaattcatctaccagctcaagagttgcaaactatcccactgtcttggccgtttgcggtttgggggctcgacatggttggcccgtttaaaaaggcagttggcggttacacgcatctctttgtggccattgacaaattctccaagtggattgaggctaaaccggttgtcacaatcacagcagataatgctcgagacttcttcatcaacattgtgcatagatttggagtgcccaatcggataatcactgataatggcacacaattcactggcggagtttttaaagacttttgtgaggactttggaattaagatttgctacgcctcagtggcacaccccatgagcaatggacaggtggagcgagctaatggcatgatacttcaagggattaaagcgcgtgtctttgaccggctaaaaccctatgccggcaaatgggtgcaacaactgccatcagtactttggtctttgcgaactacacccagtcgggccacaggccagtcaccttttttccttgtctatggggcagaagcaatgttgccgagtgaagtcgaatttgagtctttgcgctttcgtaatttccgtgaagaacgctacgaagaagaccgagtggatgacttgcaccgattggaagaagcccgcgaagcagctttgattcggtcggctcgatatttacaagggttgcggcgctatcataatcgcaatgttcgatctcgtgcctttttagtcggtgacctggttttgaggaaaattcaaactacacgagatcggcacaagttatctcctctatgggaagggccatttattatctctgaagtcacccgaccaggttcttatcgactcaagcgcgaagacggtactcttgtcgacaactcttggaacattgaacatcttcgtcgtttctacgcttaa

SEQ ID NO: 47450 - DNA, 5940 bp, Oryza sativa
  Clone ID: PAT_MRT4530_50217C.1
atgggttccgtctccggcatcgacgacctcgtcttcccacccgggcagacgtttcggttcggcagcctcgacttcgtcaccaacaacttcggcaagatctctctccttgactcggagtcagaccagtcgggagagaaccggatttcagtcccgtttggactcccaaacgcggctgaaagttacttcaagaccatctcaatcgagttggcttcaaaccactcgggcgagatcgcatcttctccaatgtcaccagatcaagatgatgaggcttacccaccgatcctgatgaagctccccaacgatttggcggccgtctccatcacgacagcgtctccatcccgtaggcctaggcggaagtcggcttcaacaccgatttcgcctagcttcagggaagtcggcgtcatcctccaaccactcggcacggtttcgacggatcagctggatggctactacagctctcccaccgtcgactcgcgtcccaccgacatcgtagagtacgacgagtttagctctcgctacaacgacgcggatctcgacgacttcgacggaagcctagatgacaactacacccctctctacttcggcgtcttcatggccgataacgagacggaggagcaacgccaagcccgggaaaccgaagcacgtcgcgagactgagcgtcgccgactggaggaggagcgtcaagcacaagaacaagaacggctacggcgtgagcagcaggagcgtgagcgaaccgcgaaggaggctgagggccgacggcagcgagccttggaagcaggccgccgagcgcgtgatttcatcggccaacaagatgttgaagggacaccggttttccgcacccctcaacagaacgcggttgccgcgatcaccctcctcaacaccctcctcaaggaaaacgagctcaatcaatctgatcacgtcgtcaacatcttgaaccagacaaagaccatgattgcggcttcggtcccagttaactccgaaagcgtccgcacgccgactggcagccgactcccccacttccgatctcatgactaccgtcgtccaagtctcagcatcactggcgcaggatccaatcgcaggagcaggggtcacgacgagcggtccgttcactcgcctcccgaccatcatagggagcgccgagtggaacggcctcgctcaccacctcgtcgccgccccgtcgatcttcgcgacacaatcatacagcgccaagcagctcgaggccatcatcattcgccggaccgccacgacgacgaccttgatggagtagcagccttcaccgacgacctgcgtcgagtggattggccagccggcttcaagccgactggaatagagaagtacgacggcaccaccaacccagaatcatggcttaccgtctacggtctcgcgatccgcgcagcaggaggagatagcaaggccatggcgaactatttaccagtagctttagcggattccacccgatcttggctccatggattgccccgtggtacgattggatcttgggccgaattacgcgaccacttcatcgccaacttccaaggcaccttcgagcgtcccggcacacaattcgacctctacaacgttgttcagaagtccggagaatcccttcgagattacatccggcgattttctgaacaacgtaacaagatctccgacatcaccgacgacgttatcatcgccgcattcaccaaagggattcgccacgaagaattggtcggcaagttcgggcgtaaacctcccaggacagtcaaacttatgtttgaaaaagccaacgagtacgccaaagccgaagacgccgtcaccgcatcaaagcagtcgggtcccagttggaagccaaaaaaggatacgccggctacgggaggaggtggaagtaacaatcataaggaccgcaagcgtaagcctgaggaacttgttgcaaccgccattcactcttctcgacagcgttcgcgcgtcaacacgttcgacaagatcatgaactcccaatgcccgcaccatcctaactccaaccacgtggccaaagactgtttcgtctacaagcaattcgcggagcaatacaccaagactacacggaagaactccgacgaagaacaaagcacgtcgaggaagaaggacgacggcgacaccccggtaggatttcaagaccaccgcaaggagctcaaccatatcttcggcggccccctggcttatgagtctaaaaggaagcaaaagttgaccgaacgggagatcaatgctgttcagcctgacacgccccaatatcttcgatggtcagagattgcaatcaagtttgaccgctcggatcatcctgaccgagtggtccacccggggcggtaccccctggtactagacccagtggtccgtaatgtcaagcttcgcagaaccctcatcgacggtggcagtgcactcaatatcctcttcgccaagaccttggatgatatgcagattcctcgctccgagctaaaaccaagcaatgcgccttttcacggagtaattccaggattatccgcaactccactcggccagatcaccctcccggtcacttttggcactcgggaaaacttccgcacagagaatatcagctttgaagtcgccgatttcgagacagcataccatgccatactcggacgcccggcgttagccaagttcatggccgtcccgcactacacttacatgatgatgaagatgcctggtccccgaggagtcctatccctacggagcaacatcaagcaagccgtcacatgcgacaaggagagttgcgacatggcccaaacccgcgagatagcgtctgcccgggaggatatccgactggctgcagccacggcgagcgaaggagaagtgcccgctaccaagacttcaaaaagtggagaaagcgaagccaagactaagaagattcccctagatccttctaatcctactaaaactgctaacaataaagatatctttgcgtggaaaccatctgatatgcccggtattcctagagaggtgattgagcactccttgcatgtcaaagaagatgccaagcctatcaaacaacgactccgccgattcgcacaagacaggaaggacgcgatcaaggaggaattaaccaagctgttagcggcaggcttcatcaaagaagtccatcatcccgactggctggcaaacccggttctagttcggaagaaaacggggcaatggcgcatgtgtgttgattatactgacctcaacaagtcttgccctaaagatccttttgggttgcctcgcattgaccagatccgactgaaggaatccgactgcttgaagacctcattcatcacgccctttggagcatactgctatgtcaccatgccgttcggactaaaaaacgcaggagcaacttatcaacgtatgatccagagatgcttctcaacgcagatcggccgcaacgttgaagcctatgtggatgatgtagtcgtcaagaccaaacaaaaggatgatttaatctcggatctagaagaaaccttcgcgagcatccgcgctttcaggatgaaattaaaccctgaaaagtgcaccttcggagtaccgtcagggaagctgcttggttttatggtgtcttataggggtatccaagccaacccggagaaagttactgctatcctcaacatgaaaccgccaagtacccagaaagatgttcagaagctgactggatgcatggcggcgctcagccgatttgtttcaagacttggcgagcgggggatgcccttctttaagctactgaagaaaacagatgatttccaatggggacccgaagcacagaaggccttcgaagattttaagaaactcctcaccgagccaccggtcttagcctcaccacacccgcaggagccgttgttgctgtatgtatcagccacctcccaggttgtgagcacagtcttggtcgttgagcgtgaggaagaaggccatgtccagaaagtccagcgaccgatttactttgtcagcgaggtcctagccgactccaaaacgaggaagctatctcactactttcaaggtcactcggtaacggtggtcacatcatttccactcggtaatatactgcacaaccgcgaagcaaacggacggattgctaagtgggctttggagttgatgtctttggacatatcattcaagccccgaatttcaatcaagtcccaagcgttagctgattttgtcgccgaatggaccgagtgccaggaggatacccctgcggagaagatggagcactggaccatgcatttcgacggatcaaaaagactttcgggcactggagcaggagtggttctaatttccccaactggagaaagattaagctatgtgctttggatacatttttcggcgtctcacaacgttgctgagtatgaggcgctccttcatggactgcgaattgcgatctccctagggataaagcgtctaatagttcgaggcgattcacagctggtcgtcaaccaagttatgaaagagtggtcctgccttgacgacaacatgatggcatatcgacaagaggtacgcagattggaagacaagttcgatggactcgagctcagtcacgttcttcgacacaataatgaagccgccgacagacttaccaactttggatccaagcgcgaggtggcgccctccgatgttttcgtcgaacacctttatacgccgacagtacctcacaaagatactactcaagttgcgggcactcatgacgtagctatggttgaagtcgactggcgagagcccctcatacgattcttgacttctcaagaactcccccaagacaaagatgaagccgagcggatttcaagacgaagcaaactttatgttatgcatgaagctgagctgtacaagaaaagcccttcagggattctgcaacgctgcgtatctttagaggaagggagacaattgctgaaagacatacattctgggatatgcggaaaccatgctgccgcacgcaccattgtcggcaaagcttaccggcagggttttttttggcctacagcagtgtccgacgccgacaaaattgtgcgcacgtgcgaaggttgccagttttttgccagacaaattcatctaccagctcaagagttgcagaccatcccactgtcttggccgtttgcggtttgggggctcgacatggttggcccgtttaaaaaggcagtcggcggttacacgcacctctttgtggccattgacaaattctccaagtggattgaagctaaaccggttgtcacaatcacagcagataacgctcgagacttcctaatcaacattgtgcatagatttggagtgcccaatcggatcatcactgataatggcagacaattcactggcggagtttttaaagacttttgtgaagactttggaattaagatttgctatgcctcagtggcacatcccatgagcaatggacaggtggagcgagccaatggcatgatacttcaagggattaaagcgcgagtttttgaccggctaaaaccctatgccggcaaatgggtggaacagctaccatcagtactttggtctttgcgtactacacccagtcgggccacaggccagtcaccttttttccttgtctatggggcagaagcaatgttgccgagtgaagtcgaattcgagtctttgcgctttcgtaatttccgcgaagaacgctacgaggaggaccgagtggatgacttgcaccgactggaagaagtccgcgaagcagctttgattcagtcggctcgatacttacaagggttgcgacgttatcataatcgcaatgttcgatcccgtgcctttctagtcggcgacctcgttttgaggaaaattcaaactacacgagatcggcacaagttatctcctctatgggaagggccatttatcatctctgcagtcacccggccaggttcctatcgactcaagcgcgaagacggtacactcgtcgacaactcttggaacatcgaacatcttcgtcgtttctacgcttaa

SEQ ID NO: 47451 - DNA, 6331 bp, Oryza sativa
  Clone ID: PAT_MRT4530_50218C.1
agatagggaaatacaatgataagcttaagcatagaaacgacgaagatgttcaatgttccaagagttgtcgacgagagtaccgtcttcgtgcttgagtcggtaggaacctggtcgggtgacttcagagatgataaatggcccctcccataaaggagataacttgtgccgatcccgtgtagtttgaattttcctcaaaaccaggtcgccgactagaaaggcacgggatcgaacattgcgattatgataacgccgcaacccttgtaaatatcgagccgaccgaatcaaagctgcttcgcggacttcttccaatcggtgcaagtcatccactcggtcctcttcgtagcgttcttcacggaaatttcgaaagcgcaaagattcgaattcgacttcactcggcaacattgcttctgccccatagacaaggaaaaaaggtgactggcctgtggcccgactgggtgtagttcgcaaagaccaaagcactgatggcagctgttgcacccatttgccggcatagggttttagccggtcaaaaacacgtgctttaatcccttgaagtatcatgccattggctcgctccacctgtccattgctcatggggtgtgccactgaggcataacaaatcttaattccaaagtcctcacaaaagtctttaaaaactccaccagtgaattgtgtgccattatcagtgatgatccgattgggtactccaaatctatgcacaatgtgatgaagaagtctcgagcgttatctgctgtgattgtgacaaccggtttagcttcaatccacttggagaatttgtcaatggccacaaagagatgtgtgtaaccgccgactgcctttttaaacgggccaaccatgtcgagcccccaaaccgcaaacggccaagacagcgggatagtttgcaactcttgagctggcaagtgaatttgtctagcgaaaaattggcaaccttcgcacgtgcgcacaatcttgtcggcgtcggacactgcagtaggccagaaaaaaccctgccggtaagctttgccgacaatggtgcgtgcagcggcatggtttccgcatatcccagaatgtatgtcctgcagcaattgtctcccttcctctaaagatacgcagcgttgcagaattcctgaagggcttttcttgtataactcagcttcatgcataacataaagtttgctccgccttgaaatccgctcggcttcatctttgtcttgagggagttcttgagaagtcaaaaatcgtatgaggggttttcgccagtcggtttcaaccatagcgacgtcatgagtgcccgcaacttgagtggtatctttgtgaggtactgtcggcgtataaaggtgttcgacgaaaacatcagagggcgccacctcgcgcttggatccaaagttgacaagtctatcggcgtcttcattattatgtcgaagaacatgactgagctcgagtccatcgaacttatcttccaatttgcgtacctcttgtcgatatgccatcatgttgtcgtcaaggcaggaccactccttcataacttggttgacaaccagctgtgaatcgcctcgaactattagacgctttatccctagggaaattgcaatccgcagtccatgaaggagggcctcatattcggcgacgttgtgggacgccgaaaaatgtatccaaagcacgtagctcaatctttctccagttggggaaatcaaaaccactcctgctccagtgcccgaaagtcgtttagatccgtcaaaatgcatggtccagtgctccatgttctccgcgggggcatcctcctggcactcggtccattcggcgacaaaatcagctaacgcttgggacttgattgaaattcggggcttgaatgatatgtccaaagacatcaactccaaagcccacttagcaatacgtccgtttgcttcgcggttgtgcagtatatcaccgagtggaaatgatgtgaccaccgttaccgagtgaccttgaaagtagtgagatagcttcctggtagtaattagaataccatataacagcttctgaacctgagggtacctcgttttggagtcggctaggacctcgctgacaaaataaatcggtcgttggactttctggacatggccttcttcgtcgcgttcaacgaccaagactgtgctcacaacctgggaggtggctgatacatacagcaacaacggctcctgcgggtgtggtgaggctaagactggtggctcagtgaggagtttcttgaaatcttcgaaggccttctgtgcttcgggtccccactggaagttatctgttttcttcagcagcttaaagaagggcatcccccgctcgccaagtcgtgaaacaaatcggctgagcgccgccatgcatccagtcagcttctgaacatctttctgggtacttggcggtttcatgttgaggatagcagtaactttctccgggttggcttggatgcccctatgagacaccataaagccaagcagcttccctgacggtactccgaaggtgcacttttcagggttcaatttcatcctgaaagcacggatgctcgcaaaggtttcttctagatccgagatcaaatcatccttttgcttggtcttgacgactacgtcatccacataggcttcaacgttgcggccgatctgcgttgagaagcatctctgaatcatgcgttgataagttgctcctgcgttttttagtccgaacggcatggtgacgtagcagtatgccccaaaaggcgtgatgaatgaagtcttcaagcagtcggattccttcagtcggatctgatgataccccgagtagcaatccaaaaaactgagaagctcacggccggcggtcgagtcgactacctggtcaatgcgaggcaacccaaaaggatctttagggcaggatttgttgaggtcggtataatcaacacacatgcgccattgccctgttttcttccgaactagaaccgggtttgccagccagtcgggatgaaggacttctttgatgaagcctgctgctaacagcttggttaattcctccttgatcgcgtccttcctgtcttgtgcgaatcggcggagtcgttgtttgataggcttggcatcttctttgacatgtaaggagtgctcaatcacctctctaggaataccgggcatatcagatggtttccacgcaaagatatctttattgttagcagttttagtaggatcagagggatctaggggaatcttcttagtcttggcttcgctttctccactctttgaaatcttggtagcgggctcttctccttcgctcgccgtggctgcagccagtcggatatcctctcgggcagacgccatctcgcgagtttgggccatgtcgcaactctccttgtcgcatgtgacggcttgcttgatgtcactccgtagggataggactcctcggggaccaggcatcttcatcatcatataagtgtagtgcgggacggccatgaacttggctaacgccgggcgtccgagtatggcatggtatgctgtctcgaaatcagcgacttcaaagctgatgttctctgtgcgaaagttttcccgagtgccaaaagtgactgggagggtgatctggccgagtggagttgcggataatcctggaatcactccgtgaaaaggcgcattgcttggttttaactcggagcgagggatctgcatatcatccagggtcttggcgaagaggatattgagtgcactgccaccgtcgatgagggttctgcgaagcttgacattacggaccactgggtctagtaccagggggtaccgccccgggtggaccactcggtcaggatgatccgagcggtcaaacttgattgcgatctctgaccatcgaagatattggggcgtgtcgggctgaacagcattgatctcccgttcagttaacttctgcttccgtttagactcataagccagggggccgccgaagatatggttgagctccttgcggtgatcttgaaaacctgccggggtgtcgtcgtcgtccttcttcctcgacgtgctttgttcttcgtcagaattcttccgtgcagtcttggtgtattgatccgcgaattgcttgtagacgaaacaatctttggccacgtggttggagttaggatggtgcgggcattgggagttcatgatcttgtcgaacgtgttgacgcgcgaacgctgtcgagaagagtgactggcggttgcaacaagttccgcaggcttacgcttgcggttcttatgattgttacttccacctcctcccgtagccggcgtacccttgttttgcttccaactgggacccgactgctttgatgcggtgacggcgtcttcagccttggcgtactcgttggctttttcaaacataagcttgcatgcctgcaggtcgactctagaggatccccatctaggaactggcacgggggtacggttcgaggtgtgtcattcaatctgagttggaaggaagggttcaaacatgacccccacaagaaacgtgaaacctacaaggataaactaagggacgaaggggctcaggattttgaaaggaaaatgatggatttctgcagcaagcacatgcttttgcctgatcccgcaaccaaagaacctgagccagattaccccttcgatgacctaaaggagaatacatcctgtcgattgcatgttcccattggacgctccggaagaactcttgaggccactacaaccattgctatccctaggagaacatataataaagagtccatacccgatgagtatgcaaaagtgcagctgcaagtggtccacgaagggtttgagtcgtaagacatcgacatccctagtccagatggtgtatccgtacttggggatgcggttgatcttataattctttggcacaagaatgacaaatcctttggattgggcaccgacgccacgcgaaaacccttttggccaaaaccgggggttccaaaacctccgagaaattctccaaagaagcaggtgaatgataaggcggacaaacccgagatgcctaaggaaatttcggtgccggatgtcccaatggagagtgcagcgccggaggtgcccatggagatttcagtgccggatgtcccaatggagactacagtggcagaacaagatgtgcaaattgtggcttcagtcgggacagatatagaagatgtagcaggattagaatgggacggtacagagatagaagtatttgaaaacccttctcctgcgaaagaccccggggcgcaggaacccctagtctctgacaaggccactgacaagtctgaggtgcctaaagtgcttaggagccacaactccaagtccaaagatgataaaaaagagaagttcatggtaaccgtcttcagagggggtaaggaacatgccaaactcagaggtgatgacccccagaaggccgctgcactaaccgggaaaaaatacttcccaactaatgattgcccagaaaaatacgaatatgggaaagcacttttaccggaatgggcacttgacgaaggtctataggagatgggaaggtttcataccttctacatggatgccagcaagaaaggcttgggtaatataacagctcgatcaccaacagattgtttcggcagcaaaggttacgtttggctagatttcgaagatcttcacgccatatattgtcgggacaagatggacgtcaactatgtcgttgtttggtgcatgatgcaataaatggatgctaagaagaaaaaaaagaacctatcggattcttggatccaactcggatctgtgaaacacatcataccgtgaggctagcaccagggtcagactagatgaacggcaagactcccgaagagatagcttaatacaagcagataatgattactgtcgcacaatacattggacgagccttcttgcactttcaaaataagagagttgtcatggccgcttataattttagcgatcattatatctgtttaatcatccacccgaaggacggaaccgtggtagtcttggaccctctcgatttcagtcaccagtcatacaaagaatttctaacaatcttatagtatgcatacaactactacaagttcaagggtggagaacagacccgaacaagggagaagctactatgtcacaagcaacctagaggcactgtcctttgcgggtattacgcgtgcgaattcctcagtgttaatgggaggtacagagttaacacaaaggatttgccaagaatagaacttcgaacaagctttgacgatacaggcatcacaaatgttcagcgcgatctatgccacttcatccaccgtgagtgctgtcatatgcgaggagaattcttcgacccagagggtgccctaactacaagtgacgaattcaagcaacttcgggagtggaacaatgctatgcca

SEQ ID NO: 47452 - DNA, 878 bp, Oryza sativa
  unsure (1)..(878): unsure at all n locations
  Clone ID: PAT_MRT4530_50219C.1
ctagctagtcatggcggcccacccggctgtctgattctcagccagtgcaaagccggcctcagccgcatgccgcccgcgagctggaggagtcctcgttattaggaataagttcatcttaggtcccttacccctcctcttcttcctcctctctccccatcttccctcttcatctctgtccaagcgcgacggttgacggagggcggggagaaggggcggtgcacggtggccgtcgggagaagagcctcggagatggcccaggcggcgctcagatccggagatggaaggcgacgccgtggcgagagtggagatcggtggaggaggtgcgacgatgccggcggagggagttgggggtgccgccggtggattgccgctactccgcccggccggattgccgccgccactccgctgggggtccgcccgccgccgccccactccgccccgtcggtttcgcgccgccgctctgcccgcccgccccgccgacttcacgccgttgcgcaccggaagacgacgacgcgcagtgaggaggtccgcgagcctccgcacggtgaactgggtgcagttggagagcgcgatgaggcacatgagctcgtacaccaccccgagcgccgcctccgccgccgacctccgcggcgcgggaatgtccggctcgcccaacgagtcctcccatccagcccctgacctcgacccgcggttccacccccgccccctcctcatcctcctccaccacccgggccaaagaagccgtcgtcgtcgtccccggagaagggccgcccgtgtcgaagggaggcttggatcggcgggtgcgggggcgggtgcgcgcgcggcggcggacggtggcggtggctgangtggaagggcggcnngcgttgatggtgatg

SEQ ID NO: 47453 - DNA, 342 bp, Oryza sativa
  Clone ID: PAT_MRT4530_5021C.1
atgatgaagaggctggtggtcctgaggaggcgggagccggcggtgaggttcagctgctgcggcgtcaggtacggcgagtgccgccgcaaccacgcggccagcaccggcggccacgccgtcgacggctgccgcgagttcatcgccgccgaggacggcggcggcggcaacagcacaagcgccgtgggcgtcgccgcggcggcgctcaagtgcgccgcctgcggctgccaccgcagcttccaccgcagggtgcaggtgtacgaggtggcctgggacgacgactgcgcctccggcgacacctcctcctcctcgccgtcgtcgtcgtcctcgttgagcagcgagtag

SEQ ID NO: 47454 - DNA, 2503 bp, Oryza sativa
  Clone ID: PAT_MRT4530_50220C.1
atgatgcagcagcagcagcagccgccgccgccgccgcctccgccgcagcacccgccgccgcctcaggccgggggcggcggcggcggggagttctaccggggcccgccgccgcagccgccgatgcggcagctctcggcggcgtcctccaccaacatccccggcgactacgccgcgcaccaggggcaccccccgccgcagcagaaccagccgccgtacgacgcttatggggacaatttcggtgctaaaaggatgcggaagcctgtccagcggcgaacagtggactacacaagcacagtcgtccgttatgttcaagctcgcatgtggcagcgggatgctagggacaggcccactgtgcagccgactccagctgctgttctggacatgttgccgtctgttgcataccccgataatccctcaacaagttttgctgcaaaatttgtacattcatcaataaacaagaaccgatgctctattaatcgggtcttgtggactcccacagggcgtcggcttattacgggatcacagagtggtgaattcaccctatggaatggccaatcttttaattttgaaatgatccttcaggctcatgaccaagctgtaagatcaatgatttggagtaacaatgagaactggatggtcactggtgatgatggtggtgcaatcaagtattggcaaagtaacatgaacaatgttaaagttaataaaacagctcacagagaatcagttcgtgacttgagcttttgtagaacagacctgaagttttgctcctgttctgatgacactactgtgaagccaggccatggttgggatgttaagagtgtcgattggcaccctacaaaatctttactggtttcaggtggtaaagactatctcgtgaaactttgggatgcaaaaagtggtagagagctacgttcattccatggtcataaaaacattgtacaatgtgtaaagtggaatcagaatgggaactgggtgttgactgcctccaaggatcagattattaagctatatgatattagatccatgaaagagcttgaatccttccgtggacacaacaaggatgtgactgctttggcatggcatccatttcatgaagaatattttgttagcgggagctatgatggagcgatctttcattggttggttggccatgaaactccacagatagagataaataacgcacatgacaatagtgtgtgggaccttgcctggcatcctgttggttatctactttgcagtgggggcaatgatcatgctacgcgattttggtgtagaaataggcctggtgatcttacccgcgataaatacaacagcggacagatgcaaggttacggtgaccaacatcctgcttttgctggccgtgctatgggtggattccagatgcctgaaccttcaacaacacctggaccatttaatactggattatcacgaaatgaaggcacaattcctggcattggggtcgcaatgcctcttgatggatctgatcatggagagcagaggccatcgatacctggccttccacctgggcaacctcccttgcctccaggtccccatccatctcttctagccggtgggcagcaacagcaatatcaacagatgcagcagcagcatcctcaatttcctcgaccaccacctccaaatatgcctcaattgcagcccccagcacacatgcttccacacgcgcaaggatctcgagcaccacttcctcagcttccatcaatgtcaggtccaccaccagtgaatccaccactaccacctatgcctcacccaatggcaatgcaagtacaaggttcatcaaaccagatgatgcctcaaatgccacagcacttgattggcatgaatcagacacaccagggccctcctagtaatatgcctccaatgggtggctttccaaatggaatgggaaatattcaaggtggatctagtgcttctggcatgcaaaactttcctatgggaggcatgtacaacaggcctcagggaaaaatgcctccacaagcacaagcacagatgacatccatccctggtctgagctcatatcagccgggtatgggcaatgtgggccttccgccgccacccccacagcatccaccgcctcgcggttcagcgccgcaatgatctcttgtaactgtgcaatgatgattggaagccttctattttccatgcggtaaaacatatgtagtatgatcgtattcgaggaagagacgagtctccagcaaacggagacggatatcttggataatgatagttaggattgttcttatctcttgcaccgtcggctaggatacattttgctgcccttggactgaacgggctgtgctgtaacaaacctgtccacctaacagcttgtttctgctccctatttatgctgctcatgttgtattagttcttatgctactgaggttttcaacatagacggaggctatcaagcagttttgtaacaagtgagaatcattttgcctggcccagtgaatttgattggttgacggcgtacgctctatattgt

SEQ ID NO: 47455 - DNA, 5679 bp, Oryza sativa
  Clone ID: PAT_MRT4530_50221C.1
atgggttccgtctccggcatcgacgacctcgtcttccctcccgggcagacgtttcggttcggcagcctcgacttcgtcaccaacaacttcggcaagatttctctcctcgactcggaatcagaccagtcgggagagaaccggatttcggtcccgtttggattcccgaacgcggctgaaagctacttcaagaccatctcaaccgagtcggcttcaaaccactcggccgagatcgcatcttctccaatgacaccagatcaagatgatggggcttacccaccagtcctgatgaagctccccgacgatttagcggccgtctccaccacgacagcgtcttcatcccgtaggcctaggcggaagtcggcttcaacaccgatttcgcctagcttcagggaagtcggcgtcatcctccaaccactcggcacggtttcgacggatcagctggatgactacaacagctctcccaccgtcgactcacgtcctactgacatcgtggagtacgacgaatttagttctcgctacaacgacttcgacgacttcgacgacttcgacggaagcctagatgacaactacacccctctctactttggcgttttcatggccaataatgagacggaggagcaacgccaagcccgggagaccgaagaacgtcgccgactggaggaggagcatcaagcgcaagaacaagaacggctacggcgtgagcagcaggaccgtgagcggaccgcgaaggaggctgaggatcgacgtcagcgagctttggaagcagggcgccgagcgcgtgatctcatcggccaacaagatgtcgaagggacaccggtcttccgcacccctcaacagaatgcggttgccgcgatcacccttctcgacaccctcctcaaccaaaacgagctcaatcaatccgaccacgtcgtcaacatcttgaaccagacgaagaccatgattgcggcgtcggtcccagttaactccgaaagcgtccacacgccgactggcagccgagtcccccacttccgatctcatgactaccgtcatccaagcctcagcatcaccggcgcaggatccaaccgcaggagcaggggtcacgacgagcggtctgttcactcacctctcgaccttcatagggagcgccgagtggaacggcctcgctcaccacctcgtcgccgccccatcgatcttcgcgacacaatcatacagcgccgagcggctcgaggccatcatcattcgccagaccgccacgacgacgaccttgatggagtagcagccttcaccgacgacctgcgtcgagtggattggccagccggcttcaaaccgactggaatagagaagtacgacggtaccactaacccagaatcgtggcttaccgtctacggtctcgcaatccgcgcagcaggaggagacagcaaggccatggcgaattatttaccggtggctttagcggattccgcccgatcttggctccatggattgccccgtggtacaattggatcttgggctgaattacgcgaccacttcatcgccaacttccaaggcacctttgagcgtcccggcacacaatacgacctctacaacgttattcagaagtccggagaatcccttcgagattacatccggcgattttctgaacaacgtaacaagatctccgacatcaccgatgacgtcatcatcgccgcgttcaccaaagggattcgccacgaagaactagtcggcaagtttgggcgtaagcctcccaggacagtcaagcttatgcttgaaaaagccaacgagtacgccaaagctgaagacgccgtcaccgcatcaaagcagtcgggtcccagttggaagccaaaaaaggatacgccggctacgggaggaggtagaagtaacaatcataaggaccgcaagcgtaagcctgcggaacttgttgcaaccgccagccactcttctcgacagcgttcgcgcgtcaacacgttcgacaagatcatgaactcccaatgcccgcaccatcctaactccaaccatgtggccaaagattgtttcgtctacaagcaattcgcggatcaatacaccaagactgcacggaagaactctgacaaagaacaaagcacgtcgaggaagaaggacgacggcgacaccccggcaggttttcaagatcaccgcaaggagctcaaccatatcttcggcggccccctggcttatgagtctaaacggaagcagaagctgactgaacgggagatcaatgctgtgcagcccgacacgccccagtatcttcgatggtcagagattgcaatcaagtttgaccgctcggatcatcctgaccgagtggtccacccggggcggtacccctgtgcactcaacatccttttcgccaagaccttggatgatatgcagattcctcgctccgagctgaaaccaagcaatgcaccttttcacggagtaattccaggattatccgcaactccactcggccagatcaccctcccggtcacttttggtactcgggaaaactttcgcacagagaatatcagctttgaagtcgctgatttcgagacagcataccatgccatactcggacacccggcattagccaagttcatggccgtcccgcactacacttacatgatgatgaagatgcctggtccccgaggagtcctatccctacggagtgacatcaagcaagccgtcacatgcgacaaggagagttgcgacatggctcaaacccgcgagatggcgtctgcccgagaggatatccgactggctgcagccacggcgagcgaaggagaaatacctgctaccaagacttcaaaaagtggagaaagcgaagccaagactaagaagattcccctagatccctctgatcctactaaaactgctaacaataaagatatttttgcgtggaaaccatctgatatgcccggtattcctagagaggtgattgagcactccttacatgtcaaagaagatgccaagcctatcaaacaacgactccgccgattcgcacaagacaggaaggacgcgatcaaggaggaattaaccaagctgttagcagcaggcttcatcaaagaagtccttcatcccgactggctggcaaacccggttctagttcggaagaaaacagggcaatggcgcatgtgtgttgattatactgacctcaacaaatcgtgccctaaagatccttttgggttgcctcgcattgaccaggtagtcgactcgaccgccggctgtgagcttctcagttttttggattgctactcggggtatcatcagatccgactgaaggaatccgactgcttgaagacttcattcatcatgccttttggggcatattgctacgtcaccatgccgttcggactaaaaaacgcaggagcaacttatcaacgtatgatccaaagatgcttctcaacgcagatcggccgcaacgttgaagcctatgtggatgatgtagtcgtcaagaccaagcaaaaggatgatttgatctcggatctagaagaaacctttgcgagcatccgtgctttcaggatgaaattgaaccctgaaaagtgcaccttcggagtaccgtcagggaagctgcttggctttatggtgtctcataggggcatccaagccaacccggagaaagttactgctatcctcaacatgaaaccgccaagtacccagaaagatgttcagaagctaactggatgcatggcggcgctcagccggtttgtttcaagacttggcgagcgggggatgcccttctttaagctactgaagaaaacagatgatttccagtggggacccgaagcacagaaggcctttgaagatttcaagaaactcctcaccgagccaccagtcttagcttcaccacatccgcaggagccgttgttgctgtatgtatcagccacctcccaggttgtgagcacggtcttggtcgttgagcgcgaggaggaaggccatgttcagaaagtccagcgaccgatttactttgtcagcgaagtcctagccgactccaaaacgaggtaccctcaggttcagaagctgttatatggtattctaattactaccaggaagctatctcactactttcaaggtcactcggtaacggtggtcacatcatttccgctcggtgatatattgcacaaccgcgaagcaaacggacggattgctaagtgggctttggagttgatgtctttggacatatcattcaagccccgaatttcaatcaagtcccaagcgttagctgattttgtcgccgagtggaccgagtgccaggaggatacccctgcggagaagatggagcactggaccatgcattttgacggatcaaaacgactttcgggcactggagcaggagtggttttgatttccccaactggagaaagattaagctatgtgctttggatacatttttcggcgtcccacaacgttgccgagtatgaggcgctccttcatggactacggattgcaatttccctagggataaagcgtctgattgttcgaggcgattcacagctggttgtcaaccaagttatgaaagagtggtcttgccttgacgacaatatgatggcatatcgaccagaggtacgcaaattggaagacaagttcgacggactcgagctcagtcacgttcttcgacataacaatgaagccgccgacagacttgcaaactttggatccaagcgcgaggtggcaccctccgatgttttcgtcgaacacctttatacgccgacagtacctcacaaagatactactcaagttgcgggcactcatgacgtagctatggttgaagccgactggcgagaacccctcatacgatttttgacttctcaagaactcccccaagacaaaggtgaagccgagcggatttcaaggcggagcaaactttatgttatgcatgaagctgagttatacaagaaaagcccttcaggaattctgcaacgctgcgtatctttagaggaagggagacaattgctgaaagacatacattctgggatatgcggaaaccatgccgctgcacgcaccattgtcggcaaagcttaccggcagggttttttctggcctactgcagtgtccgacgccgacaagattgtgcgcacgtgcgaaggttgccaatttttcgccagacaaattcatttaccagctcaagagttgcaaactatcccgttgtcttggccgtttgcggtttgggggcttgacatggttggcccgtttaaaaaggcagtcggcagttacacgcatctcttcgtggccattgataaattttccaagtggattgaagctaaaccggtaatcgcgatcacagcagataatgctcgagatttcttcatcaacatcgtgcatagatttggagtgcccaatcggatcatcactgataatggcacacaattcactggcggagtttttaaagacttttgtgaggactttggaattaagatttgctacgcctcagtggcacaccccatgagcaacggacaggtggagcgagccaatggcatgatacttcaagggattaaagcgcgtgtctttgaccggctaaaaccctatgccggcaaatgggtgcaacagctgccatcggtactttggtctttgcgaactacacccagtcgggccacaggccggtcaccttttttccttgtctatggggcagaagcaatgttgccgagtgaagttgaattcgaatctttgcgctttcgaaatttccgtgaagaacgctacgaagaggactga

SEQ ID NO: 47456 - DNA, 3942 bp, Oryza sativa
  Clone ID: PAT_MRT4530_50222C.1
atgcgccgagcagcccgaggccttcatcattcaccggatcactatgacgacgacctagacggagttgccgctttcaccaacgacctgcatcgagtggattggccagccggctttaagccgactggaatagagaagtatgacggtaccaccaacccggaatcatggcttaccgtctacggtctcgcgatccgcgcagcaggaggagatagcaaggccatggcgaattatttaccaatggctttagcagattccgcccggtcctggctccatggattgccccgtggtacaattggatcttgggccgaattacgcgaccacttcatcgccaacttccaaggcactttcgagcgccccggcacacaattcgacctttacaacatctccgacattaccgacgacgttatcatcgccgcgttcaccaaaggaattcgccacgaagaattggtcggcaagttcgggtgtaagcctcccaaaaccgtcaaacttatgtttgaaaaagccaatgaatacgccaaagctgaagacgccgtcatcgcatcaaagcagtcgggctccaattggaagcaaaaaaaggatacgccggctacgggagggggtggaagtaacaaccacaaggaccgcaagcgtaagcctgaggaacttgttgcaaccactactcactcttcccgacaacgttcgcgcgtcaacacgtttgacaagatcatgaactcccaatgtccgcatcatcccaactccaaccacgtggccaaagattgttttgtctaccagcagttcgcggaaaaatatgctaagactactcggaagaactccgatgaagatcaaagcacgtcgaaaaagaaggatgatggcgactccccgacaggctttcaagaccaacgcaaagaacttcatcatatcttcgatggtcctttggcttatgaatctaaaagaaagcaaaagttgactgaacgggagatcaatgctgttcagcccgacacgccccaatatcttcgatggtcagaaacaacgatcaagttcgaccgctcggatcatcctgatcgagtggtccacccggggcggtaccccctggtactagacccagtggtccgtaacgtcaagcttcgcagaaccctcatcgatggtggcagcgcactaaatatcctcttcgccaagaccctggatgatatgcaggttccccgctccgagttaaaaccgagcaatgcgccctttcacggagtcatcctagggctatctgcaactccactcggccagatcactcttccggttaccttcggcactcgggaaaacttccgcacggagaatatctgtttcgaagtcgccgatttcgagacagcgtatcacgccatactcggacgcccggcgttagccaagttcatggccgtcctgcactacacttacatgatgatgaagatgcccggtccccgaggagtcctatccctatggagtgacatcaagcaagccgtcacgtgcgacaaagaaagttgcgagatggcccagactcgcgagatggcggtcgcccgagaagacatccgactggctgcgaccacggcgagcgaaggagaggtgcccgcgaccaagattccgaagagcggagaaagcgaagccaagaccaaaaagattcccctagatccttctgattccaccaaaactgctgtaataggcgccgagttagattacaggaaggatgcgatcaaggaggaattaaccaagctgttagcagcaggcttcattaaagaagtccttcatcccgactggctggctaacccggtcctagttcggaagaaaactgggcaatggcgtatgtgtgtcgattataccaacctcaacaaatcttgccctaaagatccttttgggttgcctcgcattgaccagatccgactgaaagaatccgactgcttgaagacctcattcatcacgccctttggggcctacttctatatcactatgccattcggattgaagaacgcaggagcaacttatcaacgcatgattcagagatgcttctcgactcaaattggccacaatgttgaagcttacgtggatgatgtagtcgtcaagaccaagcagaaggacgatttaatctcggacctagaagaaaccttcgcaagcatccgtactttcaggatgaatctaaaccctgaaaaatgtgtcttcggagtaccgtcagggaagctgcttggttttatggtgtctcatagaggcatacaagccaacccggagaaaatcaccgccatcctcaacatgaaaccgccaagctcccagaaagacgtcctgtccgactccaagtcgaggtatcctcaggttcagaagttgttatatgctattttgatcaccgttaggaaattatctcattacttccaaggccactcggtcacggtggtcacatcgtttccactcggcgatattctacacaatcgtgaagccaatggacggatcgccaagtgggctctggaattaatgtctttagatatatccttcaagccccgaacattgatcaaatcccaagcattagcagattttgttgccgagtggaccgagagccaggaagatacccccggagaaaagatagagcactggaccatgcattttgacggttcaaaaaggctttcgggcactggagcgggagtggtcctaatttccccaactagagaaagattaagttatgtgctttggatacatttttcggcatctcacaatgtcgcagagtatgaggcgctccttcacggactacggattgcggtttccctggggatcaagcgtctgatagttcgtggggattcccagctagtcgtcaaccaagttatgaaagagaggtcctgccttgatgacaacatgacggcatatcggcaagaggtacgtaaattggaaaacaagttcgatagactcgagcttagtcacgttctccgacataacaatgaagccaccgacaggcttgcccactttggatccaagcgcgagatggctccctccgatgtattcgtcgaacacctgtatgagccgaccgtacctcagaaagaaacgactcaagtggcggacacccaagacatagctatgattgaagccgactggagagagcccctcatacaatttttaacctcccaagagctccctcaagacaaagatgaagccgagcggatttcaaggcgtagcaggctttatgttattcatgaagccgagttatacaagaaaagcccttcaggaattctgcaacgctgcgtatctctagaggaagggagacaactgctgaaagacatacattctggcatatgcggaaaccatgctgctgcacgcaccattgtcggcaaagcttaccggcagggttgccaattttttgccagacaaattcatctaccagctcaagagttgcaaacaatcccactgtcctggccgtttgcggtttgggggctcgacatggttggcccgtttaaaaaggcaatcggcggttacacgcatctctttgtcgccatcgacaaattctccaagtggattgaagctaaaccagttgtcacaatcacggccgataaagctagagacttcttcatcaacattgtgcataggtttggggtgcctaatcggattatcaccgataatggcacacaattcactggcggagtttttaaggatttttgcgaagacttcggaattaaaatttgctatgcctctgtagcgcaccccatgagcaatggacaggtcgaacgagccaacggcatgatacttcaagggataaaggcacgagttttcgaccgattaaaaccctacgctggaaaatgggtggaacagctgccatcggtactttggtctttgcatactacccccagtcgggccacaggccagtcaccttttttcctcgtctacggggcagaagcgatgttgcctagtgaagttgaattcgaatctttgcgctttcgcaattttcgtgaagaacgctacgaggaggactga

SEQ ID NO: 47457 - DNA, 545 bp, Oryza sativa
  unsure (1)..(545): unsure at all n locations
  Clone ID: PAT_MRT4530_50223C.1
gttgtggacacccanttggttgctggccctcctttgttcgcaagggatatgatttgacctttgggttgggaattgcaccctgcccaatgcatgctggcgcaactatgcaatgccccggncttgccaatgctgggttttgctgttngggccctggatggtgagatggatactacaatgtctggaaaggaggactagcacggaggtgatgtgccaaaggtgacatagtgggctaaacatgccaggtgggagggatnaaatgcatgtgtgtgatgcacccatgagtgcaataagtgatggccccctctaattattgatgtgggcccacgtgggtgtggattgacgggagacccnatttgaggatttggaatgatgctgtgtgatgaggaaaatgagatgggatgatgtggtggtgacctgtcgcagtgccctgtggcatggctgttgcaggattgtgtgatctaaattttcctgtagatgcatatgcngaatgnttccgggtaaaggcttatacngagtttgtntgttaaaaaaaaaaaaaaataaaa

SEQ ID NO: 47458 - DNA, 1160 bp, Oryza sativa
  Clone ID: PAT_MRT4530_50224C.1
ctgctggtgtgaacggagcggagcacatgagaggaagccggtaggaagatgatatggtccgagaggctccgttgggtgttggcatccggtggccggcggcggcggccatggcgggcggcggcagctggcggggccgcgcccggcggcggccatggcgggcggccaaaggtgtcacgcgcggcagcggtcgtgccctctcgtctgccggccggcctcttttcttttttttttctgataatttgtgattgataatttctaagctgaatgtgcattaaacccctgtccaggaccagccagggcacacaaacgacaattgttgacatacagatccacgtcttacaaaaatataaaagattacaaatgcagcggaaaagaaaaaaacgagataagcctgaagaattgactcctgcagcgggcaactccattccacaggcaatccttgacggcagtgacgaaaccaacctcttcaagacatcaccaacagagaagaacttcaactctgctggacaaccgaacacctcggccgacccaactccatcacgcccaccctcgctaccggtgcctaggaaagggtcgagctatacttcagatcaagcagttacccactcccgcttgcggccgaccggccgaccaaggcgaggcgacggcgaggcacggccaccgacggcggtgaccggcggtgcgggaagcggcggcgacggccgaaaggcggcggcgcatggccggagcagcggcgtggccggcgctcgcgagcggaagacgaaggcggcgacgacgacccgacgagaggaggggcggacgagcggcggcgacacctagagaaggggaggagaggagttagggatggagaaggcgaccgcgacaaccaaagtggctggctggagacggaggggaatggatagctcaccggctcgcgagggagatggggtcccggtggggttccggtgacgcgaggcggtggccgagatggcccacacggcggcggagctagcggcggcggcggcttggcgcggcggcggccctagtggcgacggcacgcggccggagatgggcggcggcggcggagctcggcgagcgcggcgcgacggtatacatgtacaatagaagaaatgtctagtgaaatatgtacaaacggacctaaatatatagttgcggagtta

SEQ ID NO: 47459 - DNA, 249 bp, Oryza sativa
  Clone ID: PAT_MRT4530_50225C.1
atggccgacactggaatggattgtggacgaagaaccggaggtcccctgcacggcaacttgcaggacgtaatgaataatttctacccttacgacttgctttatgatccgtgctctgacaaccccagttccttcttctccatctgcgacgaccctttcctttctagtttcggtgactatgaagaacctaatggaatagggtttagattcccagattgggggatggtcgtgagagacggtccggctgtgtga

SEQ ID NO: 47460 - DNA, 670 bp, Oryza sativa
  Clone ID: PAT_MRT4530_50226C.1
tggagcagtcccctcgtgcgccgcggtgaatccggcagctggacaaccggacaccccggccgacccaactccatcacgcccacccacgccaccggtgcctaggaaagggtcgagctatacttcagatcaagcagttacccactcccgcttgtgcaacgtcttcgagaaaccgcggatcgacgaaacggccagggggcgccgacatgcgggcctcactggcagcggctcaaagggggtggtccaccgtggaccaggtccacggggccggggtggtggtgtatcacgtggcgtcgacgtggcaccacgtggctggccacgcgggccatgggatggacggccacgatcgggcgagggccgatcgggcggttggggacgggcggcaccgaggccagcccgggcatggcgcacggtggcgaccggcgaccggccggcggcaacggccggcgacgcggacggcggcgcggtgcgacggcacgcatgcggggagcggcggcgcgcacgagagaggagaggaaggggaggaaaagggggtcctcaccgaaggggcgacagcgaccggtgcgggaggggaggagcggcggcgcaggaggcagtggcgaccggcgcggaagcggcggcagcgcacgggcgaagcggcggcgagcgtgcggggaggcggcgcatgcgggag

SEQ ID NO: 47461 - DNA, 5271 bp, Oryza sativa
  Clone ID: PAT_MRT4530_50227C.1
atggccgataacgagacggaggagcaacgccaagcccgggagaccgaagcacgtcgcgaggctgagcgtctccgactggaggaggagcgtcaagcacaagaacaagaacggttacggcgtgagcagcaggagcgtgagcggaccgcgaaggaggctgaagatcgacgacagcgagctttggaagcagggcgccgagcgcgtgatctcatcggccaacaagatgttgaagggacaccggttttccgcacccctcagcagaatgcggttgccgcgatcaccctcctcgacaccctcctcaaggaaaacgagctcaatcaatctgatcacgtcgtcaacatcttgaaccagacgaagaccatgattgcggcttcggtcccagttaactccgaaagcgtccacacgccgactggcagccgagttccccacttccgatctcatgactaccgtcatccaagcctcagcatcaccggcgcaggatccaatcgcaggagcagggctcgaggccatcatcattcgccggaccgccatgacgatgaccttgacggagtagcagccttcaccgacgatctgcgtcgagtggattggccagccggcttcaagccgactggaatagagaagtacgacggtaccactaacccagaatcgtggcttaccgtctacggtctcgcaatccgcgcagcaggaggagacagcaaggccatggcgaactatctaccagtggctttagcggattccgcccgatcttggctccatggattgccccgtggtacaatcggatcttgggccgaattacgcgaccacttcatcgccaacttccaaggcaccttcgagcgtcccggcacacaatacgacctctacaacgttattcagaagtccggagaatcccttagagattacatccggcgattttctgaacaacgtaataagatctccgacatcaccgacgacgttatcatcgccgctttcaccaaagggattcgccacgaagaattggtcggcaagttcgggcgtaaacctcccaggacagtcaagcttatgtttgaaaaagccaacgagtacgccaaagctgaagacgccgtcaccgcatcaaagcagtcgggtcctagttggaagccaaataagggtacgccagctacgggaggaggtggaagtaacaatcataaggaccgcaagcgtaagcctgcggaacttgttgcaaccgccagtcactcttctcgacagcgttcgcgcgtcaacacgttcgacaagatcatgaactcccaatgcccgcaccatcctaactccaaccacgtggccaaagattgtttcgtctacaagcaattcgcggatcaatacaccaagactacacggaagaactccgacgaagaacaaagcacgtcgaggaagaaggacgacggcgacgccccggcaggatttcaagaccaccgcaaggagctcaaccatatcttcggcggccccttggcttatgagtctaaacggaagcaaaagttgactgaacgggagatcaatgctgttcaacccgacacgccccagtatcttcgatggtcagaaatcgcaatcaagtttgaccgctcggatcatcctgaccgagtggtccacccggggcggtaccccctggtactagacccagtggtccgtaatgtcaagcttcgcagaaccctcatcgacggtggcagtgcgctcaatatcctcttcgccaagaccttggatgacatgcagatccctcgctccgagctaaaaccaagcaatgcgccttttcacggagtaattctaggattatccgcaactccactcggccagatcaccctcccggtcacctttggcactcgggaaaacttccgcacagagaatatcagctttgaagtcgccgattttgagacagcatatcatgccatactcggacgcccggcgttagccaagttcatggccgtcccgcactacacttacatgatgatgaagatgcccggtccccgaggagtcctatccctacggagcgacatcaagcaagccgtcacatgcgacaaggagagttgcgacatggcccaaacccgcgagatgacgtctgtccgagaggatatccgactggctgcagccacggcgagcgaaggagaagtgcccgccaccaagacttcaaaaagtggagaaagcgaagccaagactaagaagattcccctagatccttctgattctactaaaactgctaacaataaagatatctttgcatggaaaccatctgatatgcccggtattcctagagaggtgattgagcactccttacatgtcaaagaagatgccaagcctatcaaacaacgactccgccgattcgcacaagacaggaaagacgcgatcaaggaggaattaaccaagctgttagcagcaggcttcatcaaagaagtccttcatcccgactggctggcaaacccggttctagttcggaagaaaacagggcaatggcgcatgtgtgttgattatactgacctcaacaaatcctgccctaaagatccttttgggttgcctcgcattgaccagatccgactaaaggaatccgactgcttgaagacttcatttatcacgccctttggagcatactgctatgtcaccatgccgtttggactaaaaaacgcaggagcaacttatcaacgtatgattcagagatgcttctcaacacagatcggtcgcaacgttgaggcctatgtggatgatgtagtcgttaagaccaagcaaaaggatgatttgattttggatctagaagaaaccttcgcgagcatccgcgctttcaggatgaaattaaaccctgaaaagtgcaccttcggagtaccgtcagggaagctgcttggttttatggtgtctcataggggcatccaagccaacccggagaaagttattgctatcctcaacatgaaaccgccaagtacccagaaagatgttcagaagctgactggatgcatggcggcgctcagccgatttatttcaaggctcggcgagcgggggatgcccttctttaagctactaaagaaaacagacgacttccagtggggacccgaagcacagaaggccttcgaagatttcaagaagctcctcaccgagccaccagtcttagcctcaccacacccgcaggagccgttgttgctgtatgtatcagccacctcccaggttgtgagcacagtcttggtcgtcgagcgcgaggaagaaggccatctccagaaagtccagcgaccgatttactttgtcagcgaggtcctagccgactccaaaacgaggtaccctcaggttcagaagctgttatatggtattctaattactaccaggacgctatctcactactttcaaggtcactcggtaacggtggtcacatcatttccactcggtgatatactgcacaaccgtgaagcaaacggacggattgctaagtgggctttggagttgatgtctttggacatatcattcaagccccgaatttcgatcaagtcccaagcgttagctgattttgtcgccgaatggaccgagtgccaggaggatacccccgcggagaagatggagcactggaccatgcattttgacgggtcaaaacgactttcgggcactggagcaggagtagttctaatttccccaactggagaaagattaagctatgtgctttggatacatttttcgacgtcccacaacgtcgccgagtatgaggcgctccttcatggactacggattgcaatctccctagggataaagcgtctaatagttcgaggcgattcacagctggtcgtcaaccaggttatgaaagagtggtcctgccttgacgacaacatgatggcatatcgacaagaagtacgcaaattggaagataagttcgatggactcgagctcagtcacgttcttcgacacaacaatgaagctgccgatagactcgccaactttggatccaagcgtgaggcggcaccctccgatgttttcgtcgaacacctttatacgccgacagtacctcacaaagatgctactcaagttgcgggcactcatgacgtagctatggttgaagccgactggcgagagcccctcatacgatttttgacttctcaagaactcccccaagacaaagatgaggccgagcggatttcaaggcggagcaaactttatgttatgcatgaagctgagttgtacaagaaaagcccttcagggattctgcaacgctgcgtatctttagaggaagggagacaattgctgaaagacatacattctgggatatgcggaaaccatgctgctgcacgcaccattgtcggcaaggcttaccggcagggtttcttttggcctactgcagtatccgatgccgacaaaattatacgcacgtgcgaaggttgccagtttttcgccagacaaattcatctaccagctcaagagttgcagaccatcccactgtcttggccgtttgcggtttgggggcttgacatggttggcccgtttaaaaaggcagtcggcggttacacgcatctctttgtggccattgacaaattctccaagtggattgaagctaaaccggttatcacaatcacagcagataacgctcgagacttcttcatcaacattgtgcatagatttggagtgcccaatcggatcatcactgataatggcagacaattcactggcagagtttttaaagacttttgtgaagactttggaattaagatttgctatgcctcagtagcgcatcccatgagcaatggacaggtggagcgagccaatggcatgatacttcaagggattaaggcgcgtgtttttgaccggctaaaaccctatgccggcaaatgggtgaaacagctgccatcagtactttggtctttgcgaactacacccagtcgggccacaggccagtcaccttttttccttgtctatggggcagaagcaatgttgccgagtgaagttgaatttgagtctttgcgctttcgaaatttccgtgaagaacgctacgaagaggaccgagtggatgacttgcaccgattggaagaagtccgcgaagcggctttgattcagtcggctcgatacttacaagggttgcggcgttatcataaccgcaatgttcgatcccgtgccttcctagtcggcgacctggttttgaggaaaattcaaactacacgagatcggcacaagttatctcctctatgggaagggccatttatcatctctgaagtcacccgaccaggttcctatcgactcaagcgcgaagacggtactctcgtcgataactcttggaacattgaacatcttcgtcgtttctatgcttag

SEQ ID NO: 47462 - DNA, 112 bp, Oryza sativa
  Clone ID: PAT_MRT4530_50228C.1
atgatgttcgtcatggtgggtcatcctcatccccacagctgcggcaggtgtgagattaaaccatgccggcaaggtgctcttgctgatagtgacatgatagttgtcgcggaac

SEQ ID NO: 47463 - DNA, 157 bp, Oryza sativa
  Clone ID: PAT_MRT4530_50229C.1
gtcttttctagagaaggagcaaaacttgcagtataggcatttttaaacacgccacacatttgtaggactgaaaaatgccagccatctttcgactttgggagcagagttctcgtaggcaacggaattttcaatcaagaaaaatatgatgtcgcatttg

SEQ ID NO: 47464 - DNA, 1446 bp, Oryza sativa
  Clone ID: PAT_MRT4530_5022C.1
atggaggtctccttctccgcgccgcctcctccggatgcggcatctgctgccgccgcggccccatcgctggtgcccgccgtgtcggcggcggcggtggcggcgaccaccgtttcctgctcgccgcagccaccgacggggtcgccctcggccgacgacaggatcctcgtttcagttgaagtgcttctgcacgccactagcacagctcgagccgaggacgtctgcgctgcggtggagaggatgttagaagctcgaagcttaagctatgttgatggtcctgtcccgattcctaatgatgatccttttcttcttgcaaatgttaaaaggatccaaatctgcgacactgatgagtggactgagaatcacaaagttctgttattttggcaagtcaggcctgttgttcatgtgttccagagtagagacttccaaaggtacattctacagttgagcgaagatggtccaggtgaggagccgggtgaggacgatacactctctagcttcaatgagtgggctctgcctgccaaagaatttgatgggttgtgggaaagcttactctatgaagttggtctcaagcagaggttgctgagatatgctgctagtgctttgctgtttactgaaaagggtgtagacccatgtcttgtttcctggaacaggattgtacttttgcatggtccacctggaacaggaaagacttccttgtgtaaagcacttgctcaaaaactttccattcgcttcaagtcaaggtattccatgtgtcaattgattgaagtcaatgcccattcactgttcagcaagtggttttctgaaagcggaaaactggtggccaaacttttccagaagatccaggagatggtggaagaagaaagcaacctggtatttgtattgatagatgaagttgaaagcctagctgctgccagacaggctgccatatctggatctgaaccttcagattccataagggttgtaaatgcattacttacacaaatggacaaactcaagtcttggccaaatgttatcattttgacaacatcaaatatcaccacagctattgatattgcatttgttgatagagcagacatcaaggcatacgttggacccccaacccttcaagcacgatacgaaattttgaggtcatgcttacaggaacttttgcgagttggaattcttacacatactcagggtggcaattctctttgccttttgagttattttagcctgatggagaaccagcactgtcctgaggtcgcagatcctcatggttcggttcatctctctggcctactccataaagctgcagaaatatgtgagggattaagcggtcgaacattgaggaaacttcctttcctggcacatgcttctgttgctaacccttcatgctgcgatgcctctgctttcctgcacgctttgatacagactgctcaaagagagctctccgagtcgcgtggttga

SEQ ID NO: 47465 - DNA, 4008 bp, Oryza sativa
  Clone ID: PAT_MRT4530_50230C.1
atggacatgacgctgatcgattgcagccgtagccccgtagcccgtagcgacggaccgcacggcgcgtgcttctcttcgcctcaaacctaccaggtgttcggcgaaatgccggagcgggcttcatgccgctcgctcaccaccgcgccggcggcgccgcgtccggcggggaaagctattgcaacatcagtcatcacctatgtcatcaacaaggcattcgactacttgaaggataacaaggaagctggagggctgaagcctactagagagaggctggagaaactcctccctcagatcaaggtggtcttggatgctgtggacatggagcatatcggagaccaaagtgatgcactggatgcgtggttgtggcagctcagagatgctgttgaattggctaaggatgcgcttgatgaactggagtactacaagcttgagagggaggccaaaaaaatacaagcgggtagcaaggtgagtggctctctgcatcagtataagggcaagattgttcagcgttttaatcacacatttaacactgggtcactgaagaggttgaaaaatgctgtcaaggctttagctgatgttgcctctggtgttgagcgatttatccaagttctgaatcagtttggcaataaggttaactttaaacaagaggtggaattcaagaatttgcgtgagacaagctcattgcctcatagcctagtacttggaagagaagaggagagcaatattgtagttcagtggctgaccaagcgtgaaaacagtgcatctgaacagattgttggcaacatccccatattttgtatagttggtttagggggtattgggaagacaacactagctcaagttatatgcaacgataacaaggtaaaagattattttgatttgttcgtctgggtttgtgtttctcacattttcgatgttgaaacactaacgagaaagatcctccaaggtgtgactagaacagaaataggtatgattggcctagatgctctccacaaggcacttcaggagaaactgagttccagaacctttctcttggtactggatgatgtgtggaatgatgagagtctgcgtggttgggagactttagtaagtccattaagatatgggaagaccggaagcaagatcttgctgacaactcgaatggaatcagtagctaatcttgctgcaagagcgatgcaaggagaatgccagtctttatcattgagtgggctaaaagaaactgaacttcttcttctgttagaaagacatgccttttttggagttaatcctgatgattatagaaacttgcaacacatcagcaagaaaatggtaagcaaactcagtggttctccattggcagcaaaggttctaggtggattgttgaacaacaaaagggatagtaacacttggaacagaatattggcatcaagtgttcataatatacaacagggcaaggaagggattatgacagtgttaaagttgagctatcagcatttaccaacccatttgcagtcatgtttcaggtattgcagcttatttcataaagactatgaattcacaaagaaagaattagtgtatttatggatgggctcaggactaatccaacaatcggtagatggcatgacaccagaggatgttggaatgggatatttagatgcactaaccagaaagtctttttttgagattaaatcaagacctcggtctagtcgtgatataaaatgtcgtttatttgaagaatattacgaggaacggtttgttgtgcatgatcttttgcatgaattggcacggtcagcttcagtgaacgaatgtgccagagttagtataagttctgaaaagattccaaatactattcgccatttatgccttgatgtgataagtctcactgttgttgaacagatctcccagtcaaagaaattacgcacacttatcatgcattttcaagagcaagatcaggcagaacaagaacacatgctcaaaaaagtgttggctgtcacaaaaagcttgagggtattatccctaaccgcaaattatccctttaagctgcctgatgcagtgggtgatctagtgcaccttcgctatttgtctctctctctcatgtggggcgaaggaaacacgacacattcctgttggttcccacaagttgtatacaatctatatcacttgcaaacaatgaagttcaataatccgagacccgcagtccctatggaaggacaaatggaaggaatgtgcaagctggttaatctgcgccatttgcatctaactcttgtaataaggcccatgattccttttataggaaagctgacttctcttcatgagctatatggtttcagcatccaacaaaaggttggttacactattgtcgaactgaagaatctgagagacattcatcatttacatgtttcaggtcttgagaatgtttgcaacatagaagaggctgctgaaatcatgttggaccagaaagagcatctatctgcagtaacattagtttgggctccaggatcatctgactcatgtgatccaagcaaagctgatgcaattctcgataagcttcaaccacactccaacacttctaaattgcaacttgaaggatatcctggttctcgacctccattttggctgcaagatctcatactcattaacttgacatacatctatctacgtgattgtcaaagcatgcagtgccttccatatcttgggcatttaccttctcttcaatatctgtacatagttaacatgaagtcggtagagtgtgtggattcatcattttatggaagtggtgagaagccttctggattgcaatcccttaaggtactagagattgagaacatgccagtttgcacggaatgggttggattggagggtgaaaacttatttcctcggcttgagacactagcagtgcgtgattgtcaggagctgagaagactaccgactttacctactagcattcgacaaattgaaattgatcatgctggtttacaggctatgccgacattttttgtgagcagtgatggaagttcatcatcaatgttcaacctctctctgtctaagctaatgatatccaactgcccgtatataacaactttatggcatgggtgttctctttatgctctcgaggaattgtccatccaacaatgtgcaagtttatcatgtctaccagaagattcattcagttcatgttcctccctgaaaacccttgaaattgtgaagtgcccaaatctgatcgcacgacagatcatgttgccccatactatgagaaccatcacttttggattgtgtgctaatgctgaacttgcgttactagactcattgacaggtcttaaatatctgaaacggatctttttagatggttgtgcaatgtcaaaactccctttacaactgtttgcaggtttgatagggctaactcatatggtgttaaatgcttgctcaatcgcacaccttccaacagtggaagcctttgcaagattgataaatcttgaataccttttcatttgggactgcaaagagctggtttcacttatcgggatccaaggtctcgcatcgctcatgtcattgacaatcgctagctgtgacaagcttgttgaagattcatctattctgtcaccagaggatgctgattcatctggcctatctctgaatctcagtgaacttgatattgaccacccatcaatcttacttagagagccattgagaagcgtcactaccatcaagaggcttcaaatttctggtggacctaacctagcactcttacctgaggaatatctgttgcataactgtcatgcccttgaagaactagttctgactaatgcttctcatctgcaatgtttaccacaagcagtgacaaccttgacctccctgcagtccatgcatataaacaatgcagttaagattcagacacttccagatatgccagcatctcttaccagcctgcacatctatggctgcagctctgagctcaagaagagatgccaaaaacatgtaggccatgattgggttaagattgcacatatcagtgatgccgacattcgttga

SEQ ID NO: 47466 - DNA, 162 bp, Oryza sativa
  Clone ID: PAT_MRT4530_50231C.1
atgaagaataaatctaatgcatatttcaattcaacaacatatactcttaatgactttctcggatttaatgcatggctctctattctttcacacaagattgactacatgggcatcgagaaagctctgttgagtcaaggccgggatatagattccattatctaa

SEQ ID NO: 47467 - DNA, 1530 bp, Oryza sativa
  Clone ID: PAT_MRT4530_50232C.1
atggcttcttccacctctctcctcctccccaccgccgccgccgccgctcgccgcagcccctccggccaccgcgcccccccttccgccgtgctgtcccccccgcgccgcctcgccaccctccgctgcctgggctatgcgcggcggcgagcgcaggcccggcacgtcgtcgcgtgcgcctcggctgcctccgcggggtcgctcgacgccctcatcttcgactgcgacggcgtcatcctcgagtcggagcacctccaccggcaggcgtacaacgacgccttcgcgcatttcggggtgagctgcgagcccgcctccgccgccgccaccgacgcgccgctgtactgggacgaggccttctacgacgacctccagaaccggatcggcggcgggaagcccaagatgcggtggtacgtgccgccgtggttgcgtgattcgggaaactctgatcgccatgcgcatttcgccatgatccttgagtactttggggagaatgggtggcctacttcaaagatctttgaaacaccaccttcaagcgactctgataaggagaagctagactggaaaacagaaagatacaaagaaatactaaaatctggaacagtgaagccaagacctggtgttttgcgactgatggatgaagtaaagggtgcgggtatcaagctagctgtttgctctgctgcgactaaaagttcggtgattatgtgtcttgaaaacctcatcggacttgaacggtttaatggccttgattgcttccttgctggtgatgatgttaaactaaagaagcctgatccatcaatatatattacagcagcagaggatttctcggatgcaattgccacctatcctgatctcacaccaatccattcgcccttgctcgccggggaatccaagatcttccacacgattttcgcctataaaatgcacgtagttaagcgtagagaatttgaggccatggcaatcagcagaaggagctccatgctgttggtgatggccttagtgcttgggacggtctcccttgccacggccgcatctggagtcgccaccttctacactcaatacacaccgtcggcgtgctacgggaacaggaacatggggaacatggtggcggcggcgaacgacaggttgtacaacaacggcgccgtgtgcgggcggtgctacgccgtgaagtgcgccggcgcggcggccggcggcggcggaggcaacccctgcaccggcgccagcgtcaccgtgaagatggtcgacaactgcgccagcagcgacgggtgcacgagcaccatcgacctctccagggaggccttcgccaagatcgccaacctcgacgccggcgtcatcaggatcacctacaacccaacgtacgtatagtagagtttcggagctacttcctccatttcacaatataagtcattctagtattttccacattaacatcaatgtatctagattcattaatatcaaaataaatgtggaaaatgctagaataacttacattgtgaaatggagggagtagaccatataattattattatggtcatc

SEQ ID NO: 47468 - DNA, 1344 bp, Oryza sativa
  Clone ID: PAT_MRT4530_50233C.1
atggcggcggcgcgctctttgccaccttgggtggtgctggatcgcaacgcctttctccacaaaccggacgacgaggaggaggaggacccggggtgggcaaccatcagctgctcgcgctcgtcgccgatccccccccggccctcccgcctgtccatccgcctcgacggcgacccggaggaggaggaccgccgcggcttccgcagcagcgtcctgctcgccgacgccgggttcatcgtgctctcctcctgcctccccgacacgcgcggccacaaatcctacctcgtctgcgacgtcgccgccgcggacaatgccgcctcgctcaagatgctcccgactcttccgatgaggtttctcccgtctgtgacctactgcccgcaccccgtccggcaacaacccgacgccgatggcggcggctacctccttgccatctttgcaatggacatggacgccgatgcagaggctgacgggtatctaccgcaagtcctctgccttctgccgtcatcggcaccattcgaccgccgtcgctggggaaccagaaggccaatcttcccctccgagaagccaaagagtttcaccgctcatcaaaccttctcattccaaggctctgcttactgggtggatcttggacaaggcatcctcttctgcagctgccatgatctcatgtctggtaccaacaacatcaacaacaacgacgacgacgatttgcaatttggttacatccaattacccgatggttgctacgttggttgcgactcgctctatctcactcatctgccgtcacagtatcgtgatatccgttgcatcagtgactccatcagattcgtctccatcgagggatacaacaccgatcctccatacgacatgctattatccatgtgggatttgacgccgagctcaaggcagtggcacaaggttggtagtatccatgttgggagcttgtgggagcaggaggggttcaggagatcagggttgccgacgaacacgtcgccgacccagcccatgttgagcagcgaggaggacggcgtcgtgtatctcatggcgggtgatttctacgaggaggatgagaagcacaggagcctgcacgtcttcagcgttgacatgacgacttgcgagtttgtgtcggcttggcgccttcctccttggcgccattcgggtcctccatccctgatagggtctgatatattcaagcacctcaagatggataatctctgtcagcttgttccacccaatacgagggccaaggtgctccctcgtccaccaaagagggatcgaggtgaaggcaatgtgattacagttcgaccaaggaaggtgcaacgagttcatcatcaaggggaaaatgtctaa

SEQ ID NO: 47469 - DNA, 576 bp, Oryza sativa
  Clone ID: PAT_MRT4530_50234C.1
attacggctccacccccgccgcccgtacaaactctaggtcaaccgactccgccgcctccaggagaggagaggtaagtcaaagatggtgaccgcctccaacgtgtgcgcgacgcacgtgatggaggacgcgcgccaccacatgctgcggccgcctggactccatcatctccaatgagctcctcaacgggcatcgcgtggcgctcgtccgctgcaaggagaactgcatgtccggcgagatcgtccaccaaaagaagaagcacctccgcttcctccgcatgaggatgaacaacaagccctcccatgggcccatccacttccgctcccccggcaagatcctctgagggcacccgaccgaggcatgatcccagcacaaaaacaagaggagagaggcggagatggcaaggatgaaggtgtacgacggcgtgccgacgccgaacaacaggaccaagcggatgatgcatccccgacacgctcaaggctctgaaggtgaagcctgggaacagctactgcctcctcggccacgtctacgaggaggatggctggaactagtatgacaccatcagggatgttgaggac

SEQ ID NO: 47470 - DNA, 371 bp, Oryza sativa
  Clone ID: PAT_MRT4530_50235C.1
gtttctggctccatgcatagatgcatccaaggagggtgggacgccacacgtatatttgttttatctatgctaatctgagcattatcggaggagagctctagcagagggattggattaagtcgtagtagtcagataggtggtgtgtactgatactaatgagcttggagtatactgacaggacaatgacgtgcatgatgttggctgcgttcatggtcacgagaggctgaggtgctccatcgatctggtggtctgcaacggtcagacgtcataagccaaaactcgaacggaagaattatgagctcttatagatcacacacgcaacacgcacacagttctataagcttaagaacttgaacaactggagtactaat

SEQ ID NO: 47471 - DNA, 1076 bp, Oryza sativa
  Clone ID: PAT_MRT4530_50236C.1
atggcgccgcggctgttgtcgtgttttggcaggggcagcgcgacggcgtcggcgccggatcagccggaggaggcggcggcggcggccgcgccggggccggtgctgctggagctgttctgctcgcaggggtgcggggcgtcgccggaggcggacgcggtggcggcgcggatggtgcacgaggaccagcagcgggcggcggcgggcgagggaggcggcggggagcgcggcgtggtggtgctgggcttccacgtcgactactgggactaccgcgggtggaaggacccgttcgcgtccagcgcgtggacggtgcggcagaaggcgtacgtggaggcgctccggctcgacacgctgttcacgccgcaggccgtcgtgcagggccgcgcccactgcgtcggcaccgagcaggacgccctcgcccaggccgtccgcgacgcgccccgctaccccgcccccgccatgaaggtgacgttccagcggccgaacccgagcacgctgcaggcgtcgttcacggggacgctgcggagccggatggagggcggcgggagcgtgttggtggcgctgtacgagagcgggctggtgacggactgcgggcgcggcgagaacaaggggaagtcgctgctcaacgaccacgtggtgcggcggctggagaaggtggccgccgtgcgcgacggcgcgtcggcgaagaagtccgtgtccgggtccgtgcagttcccgctctgggacggcttccgcgcctcccgctgcggcctcgtcctcttcgtccagaacgccgcgctgcaggtgctcggcgtccagcacttcgacctgcccgacaacgtgtgactactcgcggtcggtcggtcgaggcttgcgcctgcgtgtgtagacgtgtgccgtgtaatgtactactagtaaatattctttgtagagtacacgtttgattattgatcgacgcgtttgtattgttgttgatttgttgggggtacgagactagacgagagtggggagatgggtaattggagacattattaattcagacattgcagcagccttgcagatgcgtgccgatgtctgcctcgggccatattccctatagt

SEQ ID NO: 47472 - DNA, 325 bp, Oryza sativa
  Clone ID: PAT_MRT4530_50237C.1
atggtggcttgcccgtcgcggctcacagccaagcgcccaagtgcccaacaccccttcacccgtcgtagccgtgggcactcaggtcttaggctgccgtcgtggcaccgtgcgctcgccgcacctcgtgcccactggcgccacgccgccgccgccgcaagccctcaatcgcagggcgggaggggcggcggagccctcccctctgccagattcggcgggagggaaggcggcggcggcgacgacgccggggggcttcggattcggcggcctcttcgtctgactctcctcgcctacactggccgacagtgttatgctaattctgcctacg

SEQ ID NO: 47473 - DNA, 191 bp, Oryza sativa
  Clone ID: PAT_MRT4530_50238C.1
atgaaggacttgaatggggattcggtgctcatcacatggaccgacctcttcgccaccaccttcttccccagtgtcttcttcctgggcgacatcaccctagcgggcaacgtcccagccattgctgaggccacgccgggctcacaacttcagcgatgcgcggcttcaatccgttgccgccctcaccgaagctg

SEQ ID NO: 47474 - DNA, 381 bp, Oryza sativa
  Clone ID: PAT_MRT4530_50239C.1
ggcggggaggataatcgatcacgagataatattatttattgagaaggaaaatggatacagtaatggaaaatgagcagatccgccagcttgctcttgccgccaacggcaacggcacaactcacacgactgccggatattactagctctctgctctccagtacataatctcgtgatgcatacacacagatcgattgatctctacgagctagcaacataggcaaagctcatacacttgttcaatacatgcaaatcaacgcaatagacatgcatatggcaaaatacttataagattaattatatagctaacaagcattatgcttgcaagctgcttcatcggctaattccacttgtggcgccggatcgccgtggccagcctcgtgc

SEQ ID NO: 47475 - DNA, 195 bp, Oryza sativa
  Clone ID: PAT_MRT4530_5023C.1
atggatagggttttgaggggttctagaaggttcgcgaaggggttggtggcggaagcgagaggaagaaggggaagaggtggatgggttggtactacttcgttgctcgacgagtgtttattaatccgcggggaaaggaaaccaactggtttcgcgggaatccgcggcgcctacggttgggcagaagagccagtgtag

SEQ ID NO: 47476 - DNA, 1633 bp, Oryza sativa
  Clone ID: PAT_MRT4530_50240C.1
atggatccctaccccaagaagcgcaagcccgacgagaacggcgcggccgtggcctcctccccggccgcgggcgccgccgcgctcggcctcacccgcgacgacctcctccgcctcgtcgagccgctctcccgggaccagctcgccgacatcgccgccaccgccgcgctcgcctcgggggtggccctcgacgccgtgcgcgccgccgccgaccgggacccggccctccgcaagctcttcgtgcgggggctcggctgggagaccaactccgactcgctccgggccatcttctccgccttcggcgacctcgaggaggccgtcgtcatcaccgacaagtccaccggccgctccaagggctacgggttcgtcacgttccgccacgccgactccgccgtcctcgccctcaaggagccctcgaagaagatcgacggccgcatgaccgtcacgcagctcgccgccgccggcgcggccgggggggcgtcgggcggggccgccggcgccggtggcgcccccgcggccgacgtctccctccgcaagatcttcgtcgggaacgtccccgccgacatgccgtcggagcgcctccttgcgcatttcgcagcctatggtgagattgaggaggggcctctagggttcgacaagcagacgggcaagttccggggctttgccctctttgtgtacaagacacccgagggtgcgcaggcctcgttagtggactcggtgaaggtgattgacgggcaccagcttgtctgcaagctagcgatcgaagggaaaaaggggaagcaatcgcagcagcagcagcagcaatctggacctggtggggctcagccgccccaaatgctccaaggcgggccgccggacatgccgggttcagggcttgggcttggtggaccacaaatgggtgcgcagtatggtggccctgggagtctgtcttcgtatggtgcatttgggggtgtaggcgctgggctaggtggtcccaatccgtatgcgaatttgccatcttccatgggcggcggcggagctgggttgggttcattgggcaatcagatgccttctgggatgggtggtgctggggctggtgcgtacgggcctgggggattgggtggtggttcatttgggggctcatcccagtttggtgctggtgggatgggggcttatgggggtctaggcatgggtggagcctcatcactgtaccgcatgcaacagggttcgggtgggcttccttctggcgggtatggtgagggtaactaccctcttccagggcctggtttccggggtcaggagggtggaatgtcacctggaccaggtggtagagctcctatgtaccccaatgtgcctccttatttctgaggtgtgtgacaactcttgggagcatatgctttgaatggttgtgctgaattcagaagttgtctgcttacatggatgtcttgcatattctggctgcctctgatatggaaatcagttttttgctctcaatttttctgttacaagataattcaagctagcttagtgttttctgagatctcttcattagacatgtactttctcataaatatgtgaggtgtcgtttcacattgttgtgtaatgctcattgtcttatgatatccagttacttatgattacatctggtgcttggttg

SEQ ID NO: 47477 - DNA, 567 bp, Oryza sativa
  Clone ID: PAT_MRT4530_50241C.1
tcaaatcgcaggaagcacgcgggactcgccggcgacggacaggaagccaatgtcgccgccgccgccgccgtgcctctcgacgctctcgccgtcgccgcagtaatcctccttggcgtcgtcgtccgggccctcgacgcgcgcgacgacgggtgcgcggcagacggggcaggtgggcgcgcgcgtgagcagccaccggtcgacgcactccctgtggaacccatgcccgcacgccggcagcacgcgcacctcgtccccggcggcgtactccgccaggcacaccgcgcagtcgccgctgccgccctcctcgtcggcgccgccgccgccgccgtcgcggggcggcatctggaccacgtgcaccgggatcccgtcgagcgcgcgcttggtctcctcggacggctcggggcgcaccgacgacgacccgccgtcttctcgccgtcgccgcccgccgccgtcgcagaagcaggcgtagagcgcggtgagcgcgatgtaggagacgctggcgacgaagagcaccgtggtggtcacccccagcgcccgcaccatgtgcgcccgctgcgcgcggtccat

SEQ ID NO: 47478 - DNA, 4578 bp, Oryza sativa
  Clone ID: PAT_MRT4530_50242C.1
atggattcgccgccgccgccgcgggaggaggtggtggtattcgcggtcaacagcgagcgcttcgagctccgccgtgacgggggcgaccccggggagtccctcctcgagttcctccgctcccgcacccgcttcaccggcgccaagctcggctgcggcgaaggcaaggcaaccccccaacccaccgctcttcctcctcctcggctgctttgcttccgtgggtgcggggcgtgcgtggtggtggtctcggcgtacgacgcggaggccgacgaggtggcgcacgcggcggtcagctcgtgcctcacgctggcgcgcggcctccaccaccgcgcggtgaccaccaccgaggggctcgggagcagccggcgcggcctccacgcgctgcacgagcggctcgccggcttccacgcctcgcagtgcgggttctgcacgcccggcgtgtgcatgtccctcgccggcgcgctcgcggccgccgaggggaacgggaagaaggccgcctccgccgcggaggggttctcgaggctcacggcggccgaggcggagcgcgcggtggccgggaacctgtgccgctgcacggggtaccgaccgatcgccgacgcgtgcaagagcttcgccgccgacgtggacttggaggatttggggctcaactgcttctggaacaagggcgatgccactgccagtgtctccaagttgccgccttacaaggagaggagcatcgccgcgttcccggagttcttgaaggatgaaatcagatcttcattggggattgatcattccatttcgtcagcatctatggtggggagtgtgagctcttggtatcaacctaaaaatgtggaggagtattataagctgataggttctttgtcatcatcatctgataaaagtagaacaaaggtggttgtgggcaacacttcttctggtgtttacagggatgcagagctgtatgataggtacatagacttgagagccattccagaactgaattcggttagcaaggatgtcaagggtgttggcattggggctgcaatgtccatttctcaggtaatcgagattttacgaggagaaggcaacagctacaaggacgtggtgttttgcaagattgctgatcacatggagaaagtggcttctcagtttgtccggaacatggcgagcttgggtggaaatctgataatggctcagagggatgagtttgcctctgacattgcaacggttctgcttgctgctggttcatcactgtgcatccaggtatcatcagaaaggatgaatgtcacactggagcgattcctggacatggccccttgtgattgcaagacgttgctattaagaatttacattcctcactgcactccaagtggcatctcatcaagttctgaatctgtaaataagacaggagataaacctgcaagttccgtgctatttgagacataccgagcttccccacggcctattggaaatgctgtttcataccttaattctgcattcctggctaaattatcttcagatgaaacttcaggaaactgtatattggagaagctatgtttggcttttggtgcatatggaacacaacatgctgtcagggctacaaatgttgagagtctcttagtgggtaaacccatcactgcatcactcttactagaagcgtgcacggttctcaagaaaacaattgttccaggggaaggtacaagacatgctgcttacagatcaagcttagctgttgcctttctttttagttttctttatccaataaccaaaggaactttcaagcctgtagaggcggtccacctgaacggccatataatttctgataacaatggaaatatgaatcgtggacccgacacacatgttgatgtttcacctaaggagatcaataatgtgaaatctgatttacatggtaatgatcgcatacttgaatcatccaaacaggtcatcgagatcagtgaagactatctcccggttggcttaccagccaagaaagttggagcagaactacaagcctctggtgaggctatatatgtggatgacatcccttccccaaaagactgcctgcatggagcatttgtatatagcacaaaacctttagctcatgtgaagagcatagaactgaacccttctctcgagcagctaaaaactgtggcgattgttactgccaaggatattcctaaaggaggcagcaatgttggggccaacactatatttggacctgaacctctgtttggtgatccactcactcagtgggctggggaaccacttggtattgtggttgcagagacacaaaaaactgccaatatagctgccagtcgagcattggtcgactacagcatggaaaatttagatgctccaattttatcaattgaggaggctgtgagaagtagtagttattttgaaatcctaccatttcttcttccccaaaagattggtgatttctcaaaaggaatggaagaagctgaccagaaaatatattcaactgaggtgaaccttcactcgcagtattacttttacatggaaacacaaactgcgctagccatacctgaggaggataactgtatggtcgtgtatagctcaagccagtgcccggaggtagcacaagaaaccattgcaaaatgcctgggtttaccttgtcataatgtccgtgttattactagaagagttggtggtggctttggaggcaaagctgtcagatcgttaccagtggcaacagcttgtgcactttcagcatttaagttgcagcgtcctgtccgaatatatcttgatcgcaagactgacatgataatgactgggggccggcatcccatgaaaatacgctattctgtaggcttcaaatccgatgggaacatcacagcgctacatatagaattgttggtaaatgccggaataacccaggatgttagtccagtgattcctcacaatttcatagaggctctgaagaaatataattggggtgccttctcctatgatgcaagaatctgcaaaacaaacattgcaaccagatccgcaatgcggggtcctggagaagtgcagggttcttatgttgctgaagctattattgagcatgttgctgctgtgctctctactgatgttaatttggtcaggcagagaaatcttcacacagtggagagcctcagtttgtatcatagtgaatgcatggaagatgccttggggtatacacttccctctatctgcaatcagttgattacatcagcaaattaccagcaccaacttgaaatgattcggtccttcaacaaaagcaacagatggaaaaagcgggggctttctgtcgtgccgatagtgcataaattcgcatctcggccaacgcctggtaaagtgtctattcttaatgatggatccgttgctgttgaagttggaggcattgaacttggccaagggctttggacaaaagtgaagcagatggcagcgttcggtcttggacagctttggactgatagaaggcaagaactgttggagagagtgagaattattcaagcagatacactaagtgtgatacagggagggtggaccacagggagtacaacatcagaatctagctgcgaggcagttcatcgtgcctgcaatatcttggtcgacaggctgaaaccactcaaggagcaattgcaagaaaaacaaggaacagtttcatgggatgagcttatttcacaggcaaaaatggtaggtgtggacttatcagctaaagaactctacgttcccggggcttctggttcctatctaaactatggggcagctgctagtgaggtagagattgatcttctgacaggagcgaccacaattttgcgtagtgatcttatatatgattgtggacggagtttaaatcctgcccacgcgtccgggcaggttgaaggggcttttgtccagggaattggttatttcatgaacgaggagtacgtgacgaactcagatgggctgcttgtctcagacgggacttggacatacaagattcctacggtggacaccatcccaaaacagttcaacgttaagctactcaacagtggattccacaagaaacgtgtgctctcttcaaaagcttctggggagccacctttgctacttgctgcctcggtgcattgtgcaacaagggaagcaattagagcagcaagggaggagtatcactgttccaggtctggatcttcacctcccttctttgatcttgaagttcctgccatcatgcccacggtgaaggagctatgcggcttagacaacgtggagaagtatttggagagtatctgctcgaaataaacagccaagttggcaatcttaccagacggcatatgtcttctttttttagtcctttagcaaagttttttttagtcctttagcaatggagataacactgccagtttttttttctcaccaaaaaaaaaaaggaggtactcaatagtgaacatgagcataatgtatattaatagtggtgaacatgagcaaagaaaatagtatttacttaatttaatagtggtgaacataagcaggcgttgcataatgtatattgagcgtataaagagggattttgtttgagcagaaatgttggctgacatttgttcaatatttactgcaacttcagcatatggatct

SEQ ID NO: 47479 - DNA, 1040 bp, Oryza sativa
  Clone ID: PAT_MRT4530_50243C.1
actattaaatcttagcttgtactattgtcgtagctttctgaagtatcagaattcagaacctcacagagtgcagaagagcatctttttaacctcgccaaaaaagttctctcacgaacaaaaagcgagatcaagtatctgaaacatccgcctctacaagcaagtatagagacatcgttgacgatttctgtatcttgtatcttctctctataggctatagtgctattatattcgctagctagttgctgccgcgcgcgcggttaattggtttgcgtggcgcgcgtcacaccacgtctgaaaccggcatcgtctcccagaagttgtccacgaagttccagaagccgtcattgaaaccgaactcagtcgggacgaactgcgcggcggcggcggcggcgacctcgcccacgccggccatttcgaggtggtggtcggcggcgaaggagacaagctccgggtgagggaagctgctcgcctgcatgtactcatcccagacgccggggctggcctggctctggccgctcgacgccgacgtcgacgccgcctcgctggtggtggtggacatgcccatgcccatggcgtcctcgcacggctcctgcagcagctggctcctgccgcgcggcttcctgtgtatcttggtcctccagtagttcttgatctcgttgtcggtccggccggggaggtgcttggcgatcttggaccacctgttcccccaccgggagtggagctcccggatgaccatgtcctcctccggcgtgatgctgccccgccgcacaccgggcctcaggtagttgagccaccgcagcctgcagctcttcccgttccggttcagcccggcagagcgcgcgaggttgtcccaggatccttcgccgttttgcgagatgtagctgacgaggatgaggtcctcctccagcgtccacgggcccttgcgcaccgccggctcgccggcgcggccgcacatcctggtggccatcgaatagctagcgtgccgcgaggaacagagagcagagcagagcagagacgggtgagggggcggtggatttgct

SEQ ID NO: 47480 - DNA, 5466 bp, Oryza sativa
  Clone ID: PAT_MRT4530_50244C.1
atgggttccatctccggcatcgacgacctcgtcttcccacccgggcagatgtttcggttcggcagcctcgacttcgtcaccaacaacttcggcaagatctctctccttgactcggagtcataccagtcgggagagaaccggatttcagtcccgtttggactcccaaacgcggctgaaagttacttcaagaccatctcaatcgagtcggcttcaaaccactcgggagagatcgcatcttctccaacgtcaccagatcaagatgatggggcttacccaccgatcctgatggagctccctgacgatttggcgaccgtctccatcatgacagcgccttcatcccgtaggcctaggcggaagtcggcttcaacaccgatttcgcctagcttcagggaagtcggcgtcatcctccaaccactcggcacggtttcgacggatcagctggatggctactacagctctcccaccgtcgactcgcgtcccaccgacatcgtggaatacgacgagtttggctctcgctactacaacgacccggatctcgacgacttcgacggaagcctagaagacaactacacccctctctacttcggcgtcttcatggccgacaatgagacggaggagcaatgccaagcccgggaaaccgaagcacgtcgcgagattgagcgtcgccgactggagcaggagcgtcaagcacaagaacaagaacggctacggcgtgaccagcatgagcgtgagcgaaccgcgaaggaggctgaggaccgacggcagcgagccttggaagcagggcgccgagcgcgtgatttcattggccagcaagatgttgaagggataccggttttccgcacccctcagcagaatgcggttgccgcgatcaccctcctcgacaccctcctcaaggaaaacgagcacaatcaatctgatcacgtcgtcaacatcttgaaccagacaaagaccatgattgcggcttcggttccagttaactccgaaagcgtccacacgccgactggcagccgactcccccacttccgatctcatgattatcgtcatctgagcctcagcatcaccggcgcaggatccaaccgcaggagcaggggccacgacgagcggtccgtccactcgcctcccgaccaccatggggagcgccgagtggaatggcctcgctcaccacctcgtcgccgccccgtcgatcttcgtgacacaatcatacagcgccgagcagctcgaggccgtcatcattattcgccagaccgccacgacgacgaccttgatggagtagcagccttcaccgacgacctgcgtcgagtggattggccagccggcttcaagccgactggaatagagaagtacgacggtaccactaacccagaatcgtggcttaccgtctacggtctcgcaatccgcgcagcaggaggagacagcaaggccatggcgaactatttaccagtggctttagcggattccgcccgatcttggctccatggattgccccgtggtacgattggatcttgggccgaattacgcgaccgcttcatcgccaacttccaaggcaccttcgagcgtcctggcacacaatacgacctttacaacgttattcagaagtccggagaatcccttcgagagtatatccgacgattttctgaacaacgtaacaagatctccgatatcaccgacgatgtcattatcgccgcattcaccaaagggattcgccacgaagagttggtcggcaagttcggacgtaaacctcccagaacagtcaagcttatgtttgaaaaagccaacgagtatgccaaagccgaagacgccgtcaccgcatcaaagcagtcgggtcctagttggaagccaaaaaatacgccggctacgggaggaggtggaagtaacaatcataaggaccgcaagcgtaagcctgaggaacttgttgcaaccgccactcattcttctcgacagcgttcgcgcgtcaacacgttcgacaagatcatgaactcccaatgcccgcaccatcctaactccaaccacgtggccaaagattgtttcgtttacaagcagttcgcggagcaatacaccaagcctacacggaagaactccgacgaagaacaaagcacgtcgaggaagaaggacgacggcgacaccccggcaggatttcaagaccaccgcaaggagctcaaccatatcttcggcggccccctggcttatgagtctaaaaggaaacaaaagttgaccgaacgggaaatcaatgctgttcagcccgacacgcctcaatatcttcgatggtcagagattgcaatcaagtttgaccgctcggatcatcctgaccgagtggtccacccggggcggtatcccctggtactagacccagtggtccgtaatgtcaagcttcgcagaaccctcatcgatggtggcagtgcactcaatatcctcttcgccaagaccttagatgatatgcagatcccgcgctccgagttaaaaccaagcaatacgccttttcacggagtaattccaggattatccgcaactccactcggccagatcaccctcccggtcacttttggcactcgggaaaacttccgcacagagaatatcagctttgaagtcgccgatttcgagacagcataccatgccatactcggacgcccggcgttagccaagttcatggctgtcccgcactacacttacatgatgatgaagatgccgggtctccgaggagtcctaaccctacggagcgacatcaagcaagccgtcacatgcgacaaggagagttgcgacatggcccaaacccgcgagatagcgtctgcccgagaggatatccgactggctgcaaccacgaacaataaagatatctttgcgtggaaaccatctgatatgcctggtattcctagagaggtgattgagcactccttacaagttaaagaagatgccaagcgtattaaacaacgactccgccgattcgcacaagacaggaaggacgcgatcaaggaggaattgaccaagctgttagcggcaggcttcatcaaagaagtccatcatcccgactggctggtaaacccggttttagttcggaagaaaacggggcaatggcgcatgtgtgttgattatactgatctcaacaaatcttgccctaaagatccttttgggttgcctcgcattgaccaggaatcagactgcttgaaggcttcattcatcacgccctttggagcatactgctatgtcaccatgccgttcggactaaaaaacgcaggagcaacttatcaacgtatgatccagagatgcttctcaacacagatcggccgcaacgttgaagcctatgtggatgacgtagttgtcaaaaccaagcaaaaggatgatttgatcttggatctagaagaaaccttcgcaagcatccgcgccttcaggatgaaattaaaccctgaaaagtgcaccttcggagtaccgtcaggaaagctgcttggttttatggtatctcataggggtatccaagccaacccggagaaagttactgccatcctcaacatgaaaccgccaagtacccagaaagatgttcagaagctgactggatgcatggcggcgctcagccgattcgtttcaagacttggcgagcgggggatgcccttctttaagctactgaagaaaacagatgatttccaatggggacccgaagcacagaaggcctttgaagattttaagaaactcctcaccaagccgccggtcttagcctcaccatacccgcaggagccgttgttgctgtatgtgtcagccacctcccaggttgtgagcacagtcttggtcgttgagcgtgaggaagaaggccatgtccagaaagtccagcgaccgatttactttgtcagcgaggtcctagccgactccaaaacgaggtaccctcaggttcagaagctgttatatggtattctaattactaccaggaagctatctcactactttcaaggtcactcggtaacggtggtcacatcatttccacttggcgatatactgcacaaccgtgaagcaaacggacggattgctaagtgggctttggagttgatgtctttggacatatcattcaagcctcgaacttcaatcaagtctcaagcgttggctgactttgtcgctgaatggaccgagtgccaggaggatgcccccacggagaagatagagcactggaccatgcattttgatggatcaaaaagactttcgggcactggagctggagtggttttaatttccccaactggagaaagattaagctatgtgctttggatacatttttcggcgtcccataacgtcgccgagtatgaagcgctccttcatggactgcggattgcaatttccctagggataaagcgtctaatagttcgaggcgattcacagttggttgtcaaccaagttatgaaagagtggacctgccttgatgacaacatgatggcatatcgacaagaggcggcgccctctgatgtctttgtcgaacacctttatacgccgacagtacctcacaaagatgctactcaagttgcgggcacccatgacgtagctatggttgaagccgactggcgagagcccctcatacgatttttgacttctcaagaactcccccaagacaaagatgaagccgagcggatttcaaggcggagcaaactttatgttatgcatgaagctgagttatacaagaaaaacccttcaggaatcctgcaacgctgcgtatctttagaggaagggagacagttgctgaaagacatacattctgggatatgcggaaatcatgctgccgcacgtaccattgtcggcaaagcttaccggcagggttttttctggcctactgccgtgtccgacgccgacaaaattgtgcgcacgtgcgaaggttgccaatttttcgccagacaaattcatctaccagctcaagagttacagaccatcccactgtcttggccgtttgcggtttgggggctcgacatggttggcccgttcaaaaaggcagtcggcggttacacacacctctttgtggccattgacaaattctccaagtggattgaagctaaaccggttgtcacaatcacagcagataacgctcgagacttcttcctcaacattgtacatagatttggagtgcccaatcggatcatcactgataatggcaggcaattcactggcggagtttttaaagacttttgtgaagactttggaattaagatttgctatgcctcagtagcacatcccatgagcaatggacaggtggagcgagccaatggcatgatacttcaagggattaaagcgcgagtttttgaccggctaaaaccttatgccggcaaatgggtggcacagctgccatcagtactttggtctttgcgtactacacccagtcgggccacaggccagtcaccttttttccttctctatggggcagaagcaatgttgccgagtgaagtcgaattcgaatctttgcgctttcgtaatttccgcgaagaacgctacgaagaggactga

SEQ ID NO: 47481 - DNA, 2538 bp, Oryza sativa
  Clone ID: PAT_MRT4530_50245C.1
atggccggcgtcctgcggctcgccggcgccgcgcggtccccactggcccgcgcgctggcccccgccgcacggaggatgggggcgtcggcggcggcggctatggaggacgaggcgtactggaccgagtgggaggaggaggaggagaaggcgagggcgcgggagtccgcgcccgtcgcggagatgtgccccaccggcggcggcggcggtggcccgcagtgggtggtgatggggaggcccgggccgcagaagcacgcccacgccgcccgcctcgccgaggtgctcgccgtgccgtacatctccatggggacgctcgtcaggcaggagctcagcccggcgtcctctctctacaagaagattgcaaattcggtgaatgaagggaaacttgtgcccgaggacattatatttggattgctgacgaagcgtcttgaggagggatacaataagggtgaaactggattcatccttgatgggatcccacgcactcatatgcaggcggagattctcgatgagattgtggatatcgacttggttctgaacttcaaatgtgctgataactgttttatgaagaggcggtttggtggtgacatctgcccccactgtggacagctttttgattttagcaaaactgcgtcttcagaccgtaatccgagccttgggagctgtacatggccttctcaggtgcaacatgctgcagttttaggtctggaggactcgagaatggagaagatgcgtgcttatgctgaacaggtcacctgggcactgagaatagttgtaaaacagagattgtggagtgactatctgcattccagtttggtagctgttcatgatgaacctctgtttctatctcaactcaaggtcgacgcgaagaggtgggcgcagcacaagaaaaccaaaccccaaccgcggcgacgcgaacggcaagcaaaacccccacacttcccggcggcggcggcggcggtgacggcggcggcgatggagacggtggagacgctggtggcgcacatccagggcctctccgggagcggggaggagctggcccacctccacaaccttctccggcaggccgacggcgagcccctgcgcgcccactccgccgccctcctccccttcctcgcccagctccacccgagcgcccactccctcggcttcctctacctcctggaggcgttcgcgtcttcggcttccaacctgagggcgcagggcggcggggacttcctggtcaccacggccgatttcctcgtctcctgctcggcggagcagatacgcttggcgcctgataagtttctgagtgtgtgtagggtgttcaagaatgaggtcatgcagctcaacgcgccgattagagggattgcccctctgcgggcggcaatccgcaagattcagacttcgtctgaagagctgaccccgatccatgcggattaccttctcctgtgcctgcttgcgaagcagtacaaggctggcctaagcgtcctggaagacgacatactcgaagttgatcagccaaaggacttattcctctattgctactatgggggaatgatatacattgggctgaagaagttcactatagcactggattttcttcacaattgtttacaatgttatgcatttttacaggctgttaccgtcccaatgtcatcattgaatgctattgctgttgaagcttacaagaaatacatcctagtttcgctcattcagaatgggcagataccattgctagataaaggtgagtctatatttatggttccatcatttccaaagtacacatcttcaactgctcaaaggaacctcaaaaatcatgctcaggtttatgttgacctgtcaacatgctacagcaaaggtaactactctgaattagaggagtatatccagctgaatgctgagaagtttcaatcggacaacaaccttggacttgtgaagcaagtgctctcctcaatgtacaagcgaaacatccagaggttgacacagacctacttgactctttcgcttgaggatattgccagctctgttcaacttaaaaccccgaaggaggctgagatgcatgtgcttaggatgattgaagatggtgagatccatgcaaccataaaccagaaggatgggatggtcagctttcatgaagatcctgagcaatataaaagctgtgagatggttgagcatattgactcgtctattcaaaggttgatggctttgtccaagaagctgtcttctattgatgagaacatctcgtgcgatcctgcatatttaatgaagactggaagagagcgtggtggaagattcgattacgatgacttcgactcagttccgcacaaatatttttgagacgacctctgcattatgtgactcgaggtagtacattagtcaaactagttgttctcatgattgccagtttgatccgtacattccgcccatcaaaatttaaaccctgtaaattctggcgttaaagaatggtgcttttgaaccagagactgaatcagttggtagtttattcaatcagctatcctcttggatgcattttgctgcaattcatccatttttctgtgg

SEQ ID NO: 47482 - DNA, 1068 bp, Oryza sativa
  Clone ID: PAT_MRT4530_50246C.1
tcagaggttgctccctgcatcctcgccaatgtgaggttcaaatttcaccgacccaccaagcgagagcgagcggcagtggtggtggttgcgggcagatccaccgcccacgaccacgggagtagcggcagtggcgggggcgagcagatccgtcgcctccaccctcgggagcgacggcggcgggtagatcggcaggtggtggacggcaacaatggggacaggcaggtccaccgtcccagctctcgggagcggcggcagcgggcggatctgccactcccgccttcgggattggcaacagcggacaggcagcggctgcacggcgaagagcgcgaacatgaagaggacgccggacgctgaatcgcgggagaggtgtgtggtggccggtgaccagtagggagaaaggtggtggtcgttgggtggcggcagtaggtagaagcccgacaacggcgcctcgaagacaatgcggcggaaccgcgcgtgctcctctgcggacgagaggcggagctcggtgacacctaaacacatcggcttttgaacagctccgagggcgactatgagcttgagggataggagcttggccagcgtgacgaggcagaaaccctgcgcctgcgcgtcgtgctccctgcgtccatccctcgccacgccttgccgcaccaacagcgctcccggtgagcatcctaatccatcccatccggcctcggcctcgtcctcgaatttcgtctcctcgcccggcgtcctcctgcagtcgatgcaacgactgcacctgatccaggcgttacacattctatccggtatcgcgtcgacgaccgccacacttgagccagtggtagttatggccgagaagagcgtggccccttcctccttcctcctttgcctctcgtcgacgcttcccggactcctccttccaccgaagcgcgcgccacgctcgctggaaccagacgcaagggcggcgctgctgccttctgcacgctgcggctgcgacggccgacggcgacgggcgaggggcgctcgctgcttgggcgcctgggtggtcggcgtgacgccgccgagccgaggtcgccaagacgccat

SEQ ID NO: 47483 - DNA, 3099 bp, Oryza sativa
  Clone ID: PAT_MRT4530_50247C.1
atgcccggtattcctagagaggtgattgagcactccttacatgtcaaagaagacgccaagcctatcaaacaacgactccgccgatttgcacaagacaggaaggacgcgatcaaggaggaattgaccaagctgttagcagcaggcttcatcaaagaagtccttcatcccgactggctggcaaacccggttctagttcggaagaaaacagggcaatggcgcatgtgtgttgattacactgacctcaacaagtcttgccctaaagatccttttgggttgcctcgcattgaccaggtagttgactcaaccgccggctgcgagcttctcagttttctggattgctactcggggtatcatcagatccgactgaaggaatccgactgcttgaagacttcattcatcacgccttttggagcatactgctacgtcaccatgccgtttggattaaaaaacgcgggagcaacctatcaacgcatgattcagagatgcttttcaacacagatcggccgcaacgttgaagcctatgtggatgacgtagtcgtcaagaccaagcaaaaggatgatctgatctcggatctagaagaaaccttcgcgagcatccgcgccttcaggatgaaattaaaccctgaaaagtgcaccttcggagtaccgtcagggaagctgcttggctttatggtgtctcataggggcatccaagccaacccggagaaagttactgctatcctcaacatgaaaccgccaagtacccagaaagatgttcagaagctgactggatgcatggcggcgctcagccgatttgtttcaaggcttggcgagcgggggatgcctttcttcaagctactgaagaaaacagatgatttccagtggggacccgaagcacagaaggcctttgaagatttcaagaaactcctcaccgagccaccagtcttagcttcaccacatccgcaggagccgttgttgctgtatgtatcagccacctcccaggttgtgagcacggtcttggtcgttgagcgcgaggaggaaggccatgtccagaaagtccagcgaccgatttactttgtcagcgaggtcctagccgattccaaaacgaggtaccctcaggttcaaaagctgttatatggtatactaattactaccaggaagctatctcattactttcaaggtcactcggtaacggtggtcacatcatttccacttggcgatatcctgcacaaccgcgaagcaaacggacggattgctaaatgggctttggagttgatgtctttggacctatcattcaagccccgaatttcaatcaagtcccaagcgttagctgattttgtcgccgaatggaccgagtgccaggaggacaccaccgtgaagaagatggagcactggaccatgcattttgacgggtcaaaaagactttcgggcactggagcaggggtggttttgatttccccaactggagaaagattaagctatgtactttggatacatttttcggcgtcccacaatgtcgccgagtatgaggccctccttcatggactgcggattgcaatttccctagggataaagcgtctaatagttcgaggtgattcacagctggttgtcaaccaagttatgaaagagtggtcctgccttgacgacaatatgaaggcatatcgacaagaggtacgcaaattggaagacaagttcgatggactcgagctcagtcacgttcttcgacacgataatgaagccgccgatagacttgccaactttggatccaagcgcgaggtggcgccttctgatgtcttcgtcgaacacctttatacgccgacagtacctcacaaagatactactcaagctgcgggcattcatgacgtagctatggttgaaaccgactggcgagagcccctcatacgatttttgacttctcaagaactccctcaagacaaagatgaagccgagcggatttcaaggcggagcaaactttatgttatgcatgaagctgagttatacaagaaaagcccttcaggaattctgcaacgctgcgtatctttagaggaagggagacaattgctgaaagacatacactctgggatatgcggaaaccatgctgctgcacgcaccattgtcggcaaagcttaccggcagggtttcttttggcctactgcagtgtccgacgctgacaaaattgtgcgcacgtgcgaaggttgccaatttttcgccagacaaattcatctaccagctcaagagttgcaaactatcccgctgtcttggccgtttgcggtttgggggctcgacatggttggcccgtttaaaaaggcagtcggcggttacacgcatctctttgtggccattgataaattttccaagtggattgaagctaaaccggttgtcacaatcacagcagataatgctcgagacttcttcatcaacattgtgcatagatttggagtgcccaatcggatcatcactgataatggcacacaattcactggtggagtttttaaagacttttgtgaggactttggaattaagatttgctacgcctcagtggcacaccccatgagcaatggacaggtggagcgagccaatggcatgatacttcaagggattaaagcgcgtgtctttgaccggctaaaaccctatgccggcaaatgggtgcaacagctgccatcggtactttggtctttgcgaactacacccagtcgggccacaggccagtcaccctttttccttgtctatggggcagaagcaatgttgccgagtgaagttgaatttgaatctttgcgctttcgaaatttccgtgaagaacgctacgaagaggaccgagtggatgacttgcaccgactggaagaagtccgcgaggcagctttgattcggtcggctcgatatttacaagggttgcggcgctatcataatcgcaatgttcgatctcgtgcctttttagtcggtgacctggttttgaggaaaattcaaactacacgagatcggcacaagttatctcctctatgggaagggccatttattatctctgaagtcacccggccaggttcttatcgactcaagcgcgaagacggtactcttgtcgacaactcttggaacattgaatatcttcgtcgtttctacgcttaa

SEQ ID NO: 47484 - DNA, 613 bp, Oryza sativa
  Clone ID: PAT_MRT4530_50248C.1
gcacgagagcaactcttgctgcagtacagcccacaactgccgtcaatggcctagctggaagctccattgttggaactaagctacatgttaaatcatctcgccttaatttgaagtctactaaatccagggctggttctgtggtagcaaagtatggtgacaagagtgtatactttgatttagaggacttgggcaacactactggccagtgggacttgtatggttcagatgcaccttcaccatacaacccccttcagagcaagtttttcgagacttttgctgctcctttcactaagagaggtctgttgctcaaattcctgatattgggaggtggctcaactcttgcatacttcagttcaacagcatcaggggatatactaccaatcaagaaaggacctcaacttccacccaagcttgggccacgcggaaagatctaatttcttttcaatccaactttctcaaccttcattttgtaattgatgtatctgtccccagcttgtaagtattcttgaagcctacctgaaacttttgttacagaagttaaatcttattgcatacgatttatcttgttccaaagttggagcattgctttctaaaaaaaaaaaaaaaaaaaaaa

SEQ ID NO: 47485 - DNA, 4225 bp, Oryza sativa
  Clone ID: PAT_MRT4530_50249C.1
atgggtcccatctccggcatcgacgacctcgtcttcccacccgggcagtcgggagagaaccggctttcagttccgtttggactcccaaacacggctgaaagttacttcaagaccatctcaatcgagtcggcttcaaaccactcggccgagatcgcattttcttcaacgacaccagatcaagatgatggggcttacccaccagtcctgatgaagctccccgacgatttagcggccgtctccaccacgacagcgtcttcatcccgttacaacagctctcccaccgtcgactcacgtcctactgacatcgtggagtacgacgaatttagttctcgctacaacgacttcgacgacttcgacgacttcgacggaagcctagatgacaactacacccctctctactttggcgttttcatggccaataatgagacggaggagcaacgccaagcccgggagaccgaagaacgtcgccgactggaggaggagcatcaagcacaagaacaagaacggctacggcgtgagcagcaggaccgtgagcggaccgcgaaggaggctgaggaccgacgtcagcgagctttggaagcagggcgccgagcgcgtgatctcatcggccaacaagatgtcgaagggacaccggttttccgcacccctcaacagaatgcggttgccgcgatcacccttctcgacaccctcctcaaccaaaacgagctcaatcaatccgaccacgtcgtcaacatcttgaaccagacgaagaccatgattgcggcttcggtcccagttaactccgaaagcgtccacacgccgactggcagccgagtcccccacttccgatctcatgactaccgtcatccaagcctcagcattaccggcgcaggatccaatcgcaggagcaggggtcacgacgagcggtccgttcactcacctcccgatcaccatagggagcgccgagtggaacgacctcgctcaccacctcgtcgccgccccatcgatcttcgcgacacaatcatacagcgccgagcagctcgaggctaccatcactcgccggaccgccacgacgacgaccttgacggagtagcagccttcaccgacgacctgcgtcgagtggattggccagccggctttaagccgactggaatagagaagtacgacggcaccactaaccccgaatcgtggcttaccgtctacggtctcgcaatccgcgcagcaggaggagacagcaaggccatggcgaactatttaccaggcaccttcgagcgtcccggcacacaatatgatctctacaacgtcattcagaagtccggagaatcccttcgagattacatctggcgattttctgaacaacgtaacaagatctccgacatcaccgacgacgtcatcatcgccgcgttcaccaaagggattcgccacgaagaactagtcggcaagtttgggcgtaagcctcccaggacagtcaagcttatgtttgaaaaagccaacgagtacgccaaagctgaagacgccgtcaccgcatcaaagcagtcgggtcccagttggaagccaaaaaaggatacgccggctacgggaggaggtggaagtaacaatcataaggaccgcaagcgtaagcctgcggaacttgttgcaaccgccagtcactcttctcgacagcgttcgcgcgtcaacacgttcgacaagatcatgaactcccaatgcccgcaccatcctaactccaaccacgtggccaaagattgtttcgtctacaagcaattcgcggatcaatacaccaagactgcacggaagaactctgacgaagaacaaagcacgtcgaggaagaaggacgacggcgacaccccggcaggttttcaagatcaccgcaaggagctcaaccatatcttcggcagccccctggcttatgagtctaaacggaagcagaagttgactgaacgggagatcaatgctgttcagcccgacacgccccagtatcttcgatggtcagagattgcaatcaagtttgaccgctcggatcatcctgaccgagtggtccacccggggcggtaccccagagaggtgattgagcactccttacatgtcaaagaagacgccaagcctatcaaacaacgactccgccgatttgcacaagacaggaaagacgcgatcaaggaggaattaaccaagctgttagcagcaggcttcatcaaagaagtccttcatcccgactggctggcaaacccagttctagtccggaagaaaacaaggcaatggcgcatgtgtgttgattacactgacctcaacaagtcctgccctaaagatccttttgggttgcctcgcattgaccaggtagtcgactcgaccgccggctgtgagcttctcagttttttggattgctactcggggtatcatcagatccgactgaaggaatccgactgcttgaagacttcattcatcacgccctttggggcatactgctacgtcaccatgccgttcggactaaaaaacgcaggagcaacctatcaacgtataatccagagatgcttctcaacgcagatcggccgcaacgttgaagcctatgtggatgatgtagtcgtcaagaccaagatgaaattgaaccctgaaaagtgcaccttcggagtaccgtcagggaagctgcttggctttatggtgtctcataggggcatccaagccaacccggagaaagttactgctatcctcaacatgaaaccgccaagtacccagaaagatgttcagaagctgactggatgcatggcggcgctcagccgatttgtttcacgacttggcgagcgggggatgcccttctttaagctgctgaagaaaacagataacttccagtggggacccgaagcacagaaggccttcgaagatttcaagaaactcctcaccgagccaccagtcttagcctcaccacgcccgcaggagccgttgttgctgtatgtatcagccacctcccaggttgtgagcacagtcttggtcgttgagcgcgaggaagaaggccatgtccaaaaagtccagcgaccgatttattttgtcagcgaggtcctagccgactccaaaacgaggtaccctcaggttcagaagctgttatatggtattctaattactgccaggaagctatctcactactttcaaggtcactcggtaacggtggtcacatcatttccgctcggtgatatattgcacaaccgcgaagcaaacggacggattgctaagtgggctttggagttgatgtctttggacatatcattcaagccccgaatttcaatcaagtcccaagcgttagctgattttgtcgccgagtggaccgagtgccaggaggatacccctgcggagaagatggagcactggaccatgcattttgacggatcaaaacgactttcgggcactggagcaggaatacacttttcggcgtcccacaacgtcgccgagtatgaggccctccttcatgggctgcggattgcaatttccctagggataaagcgtctaatagttcgaggcgattcacagctggtcgtcaaccaagtcatgaaagagtggtcctgccttgacgacaacatgatggcatatcgacaagaggtacgcaaattggaagataagttcgatggactcgagctcagtcacgttcttcgacacaataatgaagccgccgacagacttgccaattttggatccaagcgcgaggtggcgccctctgatgttttcgtcgaacacctctactcgccgacagtacctcacaaagatgctactcaagttgcgcgcacccatgatgtagctatggttgaagccgactggcgagagcccctcatacgatttttgacttctcaagaactccctcaagacaaagatgaagccgagcggatttcaaggcggagcaaactttatgttatgcatgaagctgagttatacaagaaaagcccttcaggaattctgcaacgctgcgtatctttagaggaagggagacaattgctgaaagacatacattctgggatatgcggaaaccatgctgctgcacgcaccattgtcggcaaagcttaccggcagggtttcttttggcctactgcagtgtccgacgccgacaaaattgtgcgcacgtgcgaaggttgccaatttttcgccagacaaattcatctaccagctcaagagttgcaaacaatcccgctgtcttggccgtttgcggtttgggggctcgacatggttggcccgtttaaaaaggcagtcggcggttacacgcatctctttg

SEQ ID NO: 47486 - DNA, 948 bp, Oryza sativa
  Clone ID: PAT_MRT4530_5024C.1
atggagctcaacttccaagtgcaacctccagtgttccagctgcaagactactgctactactacagccaagaggtggcggcggcggcgtcgccggcggcgaagccgacgaagccgcgggggaggaagaagggcagcacgagccacagcaagttcgtcggcgtccggcagcggccgtcggggcggtgggtggcggagatcaaggacacgacgcagaagatccgcatgtggctcggcaccttcgagaccgccgacgccgccgcgcgcgcctacgacgaggccgcgcgcctcctccgcggcgccgaggcgcgcaccaacttcgcgccacgcatctcgccggactgcccgctcgccgtccgcatccgcggaatcctccaccacaagaagctcaagaaggccaggtccgccgccgcggccacggccggctcccccggcgccgcatccaagaagaggtccaccacggcggcggcggcggcggccactccgacgatcacaaccacaagcaatagcaatagcgatggtgcgggtagtgcttgtggtggctcgagcagcagcagcagcagcacggacagctgcgacggcgccgtgaagcaaggcggcggcggcggcggcgcaccaacggacgccagcgaggtgtaccggccggacttcgtccacgcgggcgccgaggagttcgattcttggatgttcgacacggcgttcggcccgttcccagagctggacagcttcgccgccgtcgacgccgtcacgccaccgccagcaacggcgtcgccggaggagtcaagcgccggcacgccgccggtcgagatggcggagttcgagcggataaaggtggagcggcggatctcggcgtccctgtacgccatgaacggcctgcaggagtacttcgacaaggtgttcgacgcgtccgcctgcgacccgttctgggatttctcgccactgtgccattag

SEQ ID NO: 47487 - DNA, 1705 bp, Oryza sativa
  Clone ID: PAT_MRT4530_50250C.1
ctggcggctccggcccgacgacgcgacaccacaactggatcccttagtctgtgtgtctcatcgagatgcaggcacaaggctcaaatagctcatgaaaacagcccactgtttgggcctccacatcaatgcggaaaacgatcaaagaattgatttattccttagtttgtccagctacaaaccaacctctcagaaactgaagcaaaatttgtgttaaaacaggcagcagtttgggcgttatcgccctcatgtattctgaagaaattagcaatggcaatacaatgcaaatagtctggagcctttccctacgcgtcgacaagagaaaattctagcctggaaactaaaaggtatcaagagcctcttccgtttattatcttccttgtattgattccattctgcttgcttcaaacagatgccgctgctgtctgctgtttgtggacgaactcgatgcccttctcgatactggccttcaactcagacttcaatgcctcaagtgccttggcctcgtactcggtcactccctcaaggtcagcagaaatgatggactcgacaccgttctttccaagcttaactctggatgcaaagaacggcagctcggttaactcagactgaacgaatgtgcactcataaacatcagggtcgccagcaagtgcacgcagagatgactcgacgaatctggcagcagcgtaggccatggagagggtagcggagccagcaccagctttcgcctccaccacctctgttccagcattctgtatcctctttgtcagctgttcagtttcttcatctgtgaaggtgacagatggcatggtctttgacagcagtggtagaattgtgatcccagcatgaccaccgacaactggaacatcaacatcgatgagcttgaggttcttcttctgagctacaaatgtgttagctctaacaacatctagggtggtaactccaaagagcttcttgggattgtacacacccttttgtttcagaacctcggcagcaattggcaccgtggagtttactgggttgctgataatatggatgaaggcctctggacaattgtctgcaacagcctcaacaagcgacttgacaatgctcgcattgatgttaaaaaggtcatcgcgagtcatgcctggcttccttgggaccccagcagggatgacaacaacgtccacacctttcaagcagttggctagttccgagggcccagtgaagtccagaacttgagaaggtgtgttgcagtggctgagatcagcagcaactcccttaacatttgcaatatcatacagatgcagctctgagaccagaggagacatcttaatcaaaaggcccaatggttggccaataccaccagcagcaccgagcactgccactttgtacgaagcctcaggagaaatttgagaaccagacttcgcctttggtacaatccttggagcaacagatgcccggagagatgcattcctacccaggaatgacgaccctgattcaaagctaacggatgatgctgccttcaggccactgtagcttgtgaagccatgattccttggctttgagatcatgccagcctgagcgccaaccgaactgatggtaacagctgatgccatttttaactcgattgccggattggtcgtggactcgtgggcggaggaaggggaggggaggggatgcgtgggttggcgttggcctcttttttttttgggtcgcggacgcgtgg

SEQ ID NO: 47488 - DNA, 5787 bp, Oryza sativa
  Clone ID: PAT_MRT4530_50251C.1
atgggttccatctccggcatcgacgacctcgtcttcccacccgggcagacgtttcggttcggcagcctcgacttcatcaccaacaacttcggcaagatttctctcctcgactcggaatcagaccagtcgggagagaaccagatttcggtcccgtttggattcccgaacgcggctgaaagctacttcaagaccatctcaaccgagtcggcttcaaaccactcggccgagatcgcatcttctccaacgacaccagatcaagatgatggggcttacccaccagtcctgatgaagctccccgacgatttagcggccgtcttcaccacgacagcgtcttcatcctgtaggcctaggcggaagtcggcttcaacaccgatttcgcctagcttcagggaagtcggcgtcatcctccaaccactcggcacggtttcgacagatcagctggatgactacaacagctctcccaccgtcgactcacgtcctactgacatcgtggagtacgacgaatttagttctcgctacaacgacttcgacgacttcgacggaagcctagatgacaactacacccctctctactttggcgttttcatggccaataatgagacggagcaagatgtcgaagggacaccggttttccgcacccctcaacagaatgcggttgccgcgatcacccttctcgacaccctcctcaaccaaaacgagctcaatcgatccgaccacgtcgtcaacatcttgaaccagacgaagaccatgattgcggcctcggtcccagttaactccgaaagcgtccacacgccgactggcagccgagttccccacttccgatctcatgactaccgtcatccaagcctcagcatcaccggcgcaggatccaaccgcaggagcaggggtcacgacgtgcggtctgttcactcacctcccgaccttcatagggagcgccgagtggaacggcctcgctcaccacctcgtcgccgccccatcgatcttcgcgacacaatcatacagcgccgagcagctcgaggctaccatcactcgccggaccgccacgacgacgaccttgacggagtagcagccttcaccgacgacctgcgtcgagtggattggccagccggcttcaaaccaactggaatagagaagtatgacggcaccactaaccccgaatcgtggcttaccgtctacggtctcgcaatccgcgcagcaggaggagacaacaaggccatggcgaactatttaccagtggctttagcggattccgcccgatcttggctccatggattgccccgtggcacaattggatcttgggccgaactacgcgaccacttcatcgccaacttccaaggcaccttcgagcgtcccggcacacaatatgatctctacaacgtcattcagaagtccggagaatcccttcgagattacatccggcggttttctgaacaacgtaacaagatctccgacatcaccgacgacgtcatcatcgccgcgttcaccaaagggattcgccacgaagaactagtcggcaagtttgggcgtaagcctcccaggacagtcaagctcatgtttgaaaaagctaacgagtacaccaaagctgaagacgccgtcaccgcatcaaagcagtcgggtcccagttggaagcaaaacaagggtacgccggctacgggaggaggtggaagtaacaatcataaggaccgcaagcgtaagcctgcggaacttgttgcaaccgccagtcactcttctcgacagcgttcgcgcgtcaacacgttcgacaagatcatgaactcccaatgcccgcaccatcctaactccaaccacgtggccaaagattgtttcgtctacaagcaattcgcggatcaatacaccaagactgcacggaagaactctgacgaagagcaaagcacatcaaggaagaaggatgacggcgacaccccggcaggttttcaagatcaccgcaaggagctcaaccatatcttcggcggccccctggcttatgagtctaaacggaagcagaagttgactgaacgggagatcaatgctgttcagcccgacacgccccagtatcttcgatggtcagagatcgcaatcaagtttgaccgctcggatcatcctgaccgagtggtccacccggggcggtaccccctggtactagacccagtggtccgtaatgtcaagcttcgcagaaccctcatcgacggtggcagtgcactcaatatcctctttgccaagaccctggatgatatgcagatccctcgctccgagttaaaaccaagcaatgcgccttttcacggagtgattccaggattatccgcaactccactcggccagatcaccctcccggtcacttttggcactcgggaaaactttcgcacagagaatatcagcttcgaagtcgccgatttcgagacagcttaccatgccatactcggacgcccggcgttagccaagttcatggccgtcccgcactacacttacatgatgatgaagatgcctggtccccgaggagtgctatccttacggagcgacatcaagcaagccgtcacatgcgacaaggagagttgcgacatggcccaaactcgcgagatggcgtctgcccgagaggatatccgactggctgcagccacggcgagcgaaggagaaatacctgctaccaagacttcaaaaagtggagaaagcgaagccaagactaagaagattcccctagatccctctgatcctactaaaactgctaacaataaagatatctttgcgtggaaaccatctgatatgcccggtattcctagagaggtgattgagcactccttacatgtcaaagaagatgccaagcctatcaaacaacgactccgccgattcgcacaagacaggaaggacgcgatcaaggaggaattaaccaagctgttagcagcaggcttcatcaaagaagtccttcatcccgactggctggcaaacccggttctagttcggaagaaaacagggcaatggcgcatgtgtgttgattatactgacctcaacaagtcctgccctaaagatccttttgggttgcctcgcattgaccagatccgactgaaggaatccgactgcttgaagacttcattcatcacgccctttggggcatactgctacgtcaccatgccgttcggactaaaaaacgcaggagcaacttatcaacgtatgattcagagatgcttttcaacacagatcggccgcaacgttgaagcctatgtggatgacgtagtcgtcaagaccaagcaaaaggatgatttgatctcggatctagaagaaacctttgcgagcatccgtgctttcaggatgaaattgaaccctgaaaagtgcaccttcggagtaccgtcagggaagctgcttggctttatggtgtctcataggggcatccaagccaacccggagaaagttactgctatcctcaacatgaaaccgccaagtacccagaaagatgttcagaagctgactggatgcatggcggcgctcagccgatttgtttcaagacttggcgagcgggggatgcccttctttaagctgttgaagaaaacagataacttccagtggggacccgaagcacagaaggccttcgaagatttcaagaaactcctcaccgagccaccaatcttagcctcaccacacccgcaggagccgttgttgctgtatgtatcagccacctcccaggttgtgagcacagtcttggtcgttgagcgcgaggaagaaggccatgtccaaaaagtccagcgaccgatttattttgtcagcgaggtcctagccgactccaaaacgaggtaccctcaggttcagaagctgttatatggtattctaattactactaggaagctatctcactactttcaaggtcactcggtaacggtggtcacatcatttccactcggtgatatactgcacaaccgcgaagcaaacggacgtattgctaagtgggctttggagttgatgtctttggacatatcattcaagcctcgaatttcaatcaagtcccaagcgttagccgattttgtcgccgaatggaccgagtgccaggaggatacccccgcggagaacatggagcactggaccatgcattttgacggatccaaacgactttcgggcactggagcaggagtggttttgatttccccaactggagaaagattaagttatgtgctttggatacacttttcggcgtcccacaacgttgccgagtatgaggccctccttcatgggctgcggattgcaatttccctagggataaagcgtttaattgttcgaggcgattcacagctggttgtcaaccaagttatgaaagagtggtcctgccttgacgacaacatgatggcatatcgacaagaggtacgcaaattggaagacaagttcgatggactcgagctcagtcacgttcttcgacacaacaatgaagccgccgacagacttgccaatttcggatccaagcgcgagatggcgccctcagatgttttcgtcgaacacctttatacaccgactgtacctcataaagatactactcaagatgcggacactcatgacgtagctctggttgaagccgactggcgagagcccttcatacgatttttaacttctcaagagctccctcaagataaagatgaagccgagcggatttcaaggcggagcaaactttatgctatgcatgaagctgagttatataagaaaagcccttcaggaattctgcaacgctgcgtatctttagaggaagggagacaattgctgaaagacatacattctgggatatgcggaaaccatgctgctgcacgcaccattgtcggcaaagcttaccggcagggtttcttttggcctactgcagtgtccgacgccgacaaaattgtgcgcacgtgcgaaggttgccaatttttcgccagacaaattcacttaccagctcaagagttgcaaactatcccgctgtcttggccgtttgcggtttgggggctcgacatggttggcccgtttaaaaaggcagtcggcggttacacgcatctctttgtggccattgataagttttccaagtggattgaagctaaaccggttgtcacaatcacagcagataatgctcgagacttcttcatcaacattgtgcatagatttggagtgcccaatcggatcatcactgataatggcacacaattcactggcggagtttttaaagacttttgtgaggactttggaatcaagatttgctatgcctcagtggcacaccccatgagcaatggacaggtggagcgagccaatggcatgatacttcaagggattaaggcacgtgtttttgaccggctaaaaccctatgccggcaaatgggtgcaacagctgccatcagtactttggtctttgcgaactacacccagtcgggccacaggccagtcaccttttttccttgtctatggggcagaagcaatgttgccgagtgaagttgaattcgagtctttgcgctttcgaaatttccgtgaagaacgctacgaagaagaccgagtggatgacttgcaccgattggaagaagcccgcgaagcagctttgattcggtcggctcgatatttacaagggttgcggcgctatcataatcgcaatgttcgatctcgtgcctttttagtcggtgacctggttttgaggaaaattcaaactacacgagaccggcacaagttatctcctctatgggaagggccatttattatctctgaagtcacccggccaggttcttatcgactcaagcgcgaagacggtactcttgtcgacaactcttggaacattgaacatcttcgtcgtttctacgcttaa

SEQ ID NO: 47489 - DNA, 6006 bp, Oryza sativa
  Clone ID: PAT_MRT4530_50252C.1
atgggttccatctccggcatcgacgacctcgtcttcccacccgggcagacgtttcggttcggcagcctcgacttcgtcaccaacatcttcggcaagatctctctccttgactcggagtcggaccagtcgggagagaaccagatttcggccccgtttggactcccaaacgcggctgaaagttacttcaagaccatctcgaccgagtcggcttcaaaccactcgggcgagatcgcatcttcaccaacgtcaccagatcaagatgatggggtttacccaccgatcctgatgaagctccccgacgatttggcggccgtctccatcacgccagcgtctctttcccgtaggcctaggcggaagtcggcttcaacaccgatttcgcctagcttcagggaagttggcgtcatcctccaaccactcggcacggtttcgacggatcagctagatggcgactacagctctcccaccgtcgactcgcgccccaccgacatcgtggagtacgacgagtttacctctcgctaccacgacccggatctcgacgacttcgacggaagcctagatgacaactacacccctctctattttggcgtcttcatggccaataacgagacggaggagcaacgccaagcccgggagaccgaagcgcgtcgcgagactgagcgccgccgactggaagaggagcatcaagcacaagaacaagaacggttacggcatgagcagcaggagcgtgagcggaccgcgaaggaggctgaggatcgacggcagcgagctttggaagcagggcgccgggcgcgtgatctcatcggccagcaagatgttgaagggacgccggtttttcgcacccctcaacagaatgcggttgccgcgatcaccctccttgacaccctactcagggaaaacgagctcaatcaatccgatcacgtcgtcaacatcttgaaccagacgaagactgtgattgcggcttcggtcccagttaactccgaaagcgtccacaggccgactggcagccgagtcccccacttccgatctcatgactaccgtcatccaagcctcagcatcaccggcgcaggatccaatcgcaggagcaggggccacgacgagcggtctgttcactcacctcccgaccaccatagggagcgccgagtggaacggcctcgctcaccacctcgtcgccgccccgtcgatcttcgcgatacaatcatacagcgccgcgcagctcgaggctatcatcactcgccggaccgccacgacgacgaccttgacggagtagcagccttcaccgacgacctgcgtcgagtggactggccagccggcttcaagccgactggaatagagaagtacgatggtaccactaacccagaatcgtggcttaccgtctacggtctcgcaatccgcgcagcaggaggagacagcaaggccatggcgaactatttaccagtggctttagcggattccgcccgatcttggctccatggattgccccgtggtacaatcggatcttgggccgagttacgtgaccacttcatcgccaactttcaaggcaccttcgagcgtcccggcacacaatacgacctctacaacgtcattcagaagtccggagaatcccttcgagattacatccggcgattttctgaacagcgtaacaagatctccgacatcaccgacgacgtcatcatcgtcgcattcaccaaagggattcgccacgaagaattggttggcaaattcgggcgtaagcctcccaggactgtcaagctcatgtttgaaaaagccaacgagtacgccaaagctgaagacgccgtcaccacgtcaaagcagtcgggtcccagttggaagccaaaaaaggatacgccggcttcgggaggaggtggaagtaacaatcataaggaccgcaagcgtaagcctgcagaacttgttgcaaccgccagtcactcttctcgacagcgttcgcgcgtcaacacgttcgacaagatcatgaactcccaatgcccgcaccatcctaactccaaccacgtggccaaagattgtttcgtctacaagcaattcgcggatcaatacaccaagactacacggaagaactccgacgaagaacaaagcacgtcgaggaagaaggacgacggcgacaccccggcaggttttcaagaccaccgcaaggagctcaaccatatcttcggcggccccctggcttatgagtctaaacggaagcaaaagttgaccgaacgggagatcaatgctgttcagcccgacacgccccaatatcttcgatggtcagagattgcaatcaagtttgaccgctcggatcatcctgaccgagtggtccacccggggcggtaccccctggtactagacccagtggtccgtaatgtcaagcttcgcagaaccctcatcgacggtggcagtgcactcaatatccttttcgccaagaccttggatgatatgcagattcctcgctccgagttaaaaccaagcaatgcgccttttcacggcgtaattccaggattatccgcaactccactcggccagatcaccctcccggtcacttttggcactcgggaaaactttcgcacagagaatatcagcttcgaagtcgccgatttcgagacagcataccatgccatactcggacgcccggcattagccaagttcatggccgtcccgcactacacttacatgatgatgaagatgcctggtccccgaggagtcttatccctacggagtgacatcaagcaagccgtcacatgcgacaaggagagttgcgacatggcccaaacccgcgagatagcgtctgctcgagaggatatccgactggctgcagccacggcggacgaaggagaagtgcccgctaccaagacttcaaaaagtggagaaagcgaagccaagactaagaagattcccctagatccctctgatcctactaaaactgctaacaataaagatatctttgcgtggaaaccatctgatatgcccggtattcctagagaggtgattgagcactccttacatgtcaaagaagacgccaagcctatcaaacaacgactccgccgattcgcacaagacaggaaggacgcgatcaaggaggaattaaccaagctgttagcagcaggcttcattaaagaagtccttcatcccgactggctggcaaacccagttctagttcggaagaaaacagggcaatggcgcatgtgtgttgattacactgacctcaacaaatcctgccctaaagatccttttgggttgcctcgcattgaccaggtagttgactcgaccgccggctgtgagcttctcagttttttggattgctactcggggtatcaccagatccgactgaaggaatccgactgcttgaagacttcattcatcacgcccttcggggcatactgctacgtcaccatgccatttggactcaaaaacgcaggagcaacttatcaacgtatgatccagagatgcttctcaacgcagattggccgcgacgttgaagcctatgtggatgatgtagtcgtcaagaccaagcaaaaggatgatttgatctcggatctggaagaaaccttcgcgagcatccgtgctttcaggatgaaattaaaccctgaaaagtgcaccttcggagtaccgtcagggaagctgcttggttttatggtgtctcatagaggcatccaagccaacccggagaaagttactgctatcctcaacatgaaaccgccaagtacccagaaagatgttcagaagctgactggatgcatggcggcgctcagccgatttgtttcaagacttggcgagcgggggatgcccttctttaagctactaaagaaaacagatgatttccagtggggacctgaagcacagaaggccttcgaagatttcaagaaactcctcaccgagccaccggtcctagcctcaccacacccgcaggagccgttgttgctgtatgtatctgccacctcccaggttgtgagcactgtcttggtcgttgagcgtgaggaagaaggccatgtccagaaagtccagcgaccgatttattttgtcagcgaggtcctagccgactccaaaacgaggaagctatctcactactttcaaggtcacccggtaacggtggtcacatcatttccactcggtgatatactgcacaaccgcgaagcaaacgaacggattgcaaagtgggctttggagttgatgtctttggacatatcattcaagccccgaatttcaatcaagtcccaagcgttagctgattttgtcgccgaatggaccgagttccaagaggatacccccgcggagaagatggagcactggaccatgcattttgacgggtcaaaaagactttccggcactggagcaggagtggttctaatttcaccaactggagaaagattaagctatgtactttggatacatttttcggcgtcccacaacgttgccgagtatgaggccctccttcatgggctgcggattgcaatttccctagggataaagcgtctaatagttagaggcgattcacagctggttgtcaaccaggttatgaaagagtggtcctgccttgatgacaatatgatggcatatcgacaagaggtacgcaaattggaagacaagttcgatggactcgagctaagtcatgttcttcgacataataatgaagccgccgacagacttgccaattttggatccaagcgcgaggtggcgccttccgatgttttcgtcgaacacctttatacgccgacggtacctcacaaagatactgctcaaattgcgggcactcatgacgtagctatgattgaagccgactggcgagagcccctcatacgatttttgacttctcaagaactccctcaagacaaagatgaagccgagcggatttcaaggcggagcaaactttatgttatgcatgaagctgagttatacaagaaaagcccttcaggaattctgcaacgctgcgtatctttagaggaagggagacaattgctgaaagacatacattctgggatatgtggaaatcacgctgctgcacgcaccattgtcggcaaagcttaccggcagggttttttctggcctactgcagtgtccgacgccgacaaaattgtgcgcacgtgcgaaggttgccaattttttgccagacaaattcatttaccagctcaagagttgcaaactatcccgctgtcttggccgtttgcggtttgggggctcgacatggttggtccgtttaaaaaggcagtcggtggttacacgcatctctttgtggccattgataaattttccaagtggattgaagctaaaccggttgtcacaatcacagcagataatgctcgagacttcttcatcaatattgtgcatagatttggagtgcccaatcggattatcactgataatggcacacaattcactggcggagtttttaaagacttttgtgaggactttggaattaagatttgctatgcctcagtggcacaccccatgagcaatggacaggtggagcgagccaatggcatgatacttcaagggattaaaacgcgtgtctttgaccggctaaaaccctatgccggcaaatgggtgcaacagctgccatcggtgctttggtctttgcgaactacacccagtcgggccacaggccagtcaccttttttccttgtctatggggcagaagcaatgttgccgagtgaagttgaattcgaatctttgcgctttcgaactttccgtgaagaacgctacgaagaggacagagtggatgacttgcaccggttggaagaagtccgtgaagcagctttgattcggtcggctcgatacttacaagggttgcggcgttatcataatcgcaatgttcgatcccgtgcctttttagtcggtgacctggttttgaggaaaattcaaactacacgggatcggcacaagttatctcctttatgggaggggccatttatcatctctgacgtcacccggccaggttcctatcgactcaagcgagaagatggtactctcgtcgacaactcttggaacattgaacatcttcgtcgtttctacgcttaa

SEQ ID NO: 47490 - DNA, 292 bp, Oryza sativa
  unsure (1)..(292): unsure at all n locations
  Clone ID: PAT_MRT4530_50253C.1
gtcggcgatgaggcgggcggcggcgtcggtggaagggaagggcgctgcggggatgacgcaggcgaaggacgggtcgtcgtcgtcgtcggcgagggaggtgtcgtgggtgcccgaccccntgacgggccactaccggccctccaacttcgccggcgggccgaccgccaagctcntccgcgncgaccacctcgtccntnagctacgtccgngcgtgatgcgngatcctctncgtcgtccgaccgacgacgacggcatncatccatatatatctggtccgagtcaactacttaat

SEQ ID NO: 47491 - DNA, 6042 bp, Oryza sativa
  Clone ID: PAT_MRT4530_50254C.1
atgggttccgtctccggcatcgacgacctcgtcttccctcccgggcagacgttttggttcggcagcctcgacttcgtcaccaacaacttcggcaagatttctctcctcgactcggaatcagaccagtcgggagagaaccggctttcggtctcgttcggattcccgaacgcggctgaaagctacttcaagaccatctcaaccgagtcggcttcaaaccactcggccgagatcgcatcttctccaacaacaccagatcaagatgatggggcttacccaccagtcctgatgaagctccccgacgatttagcggccgtctccactaccacagcgtcttcatcccgtaggcctaggcggaagtcggcttcaacaccgatttcgcctagcttcagggaagtcggcgtcatcctccaaccactcggcacggtttcgacggatcaactggatgactacaacagctctcccaccatcgactcacgtcctactgacatcgtggagtacgacgaatttagttctcgctacaacgacttcaacgacttcgacgacttcgacggaagcctagatgacaactacactcctctctactttggcgttttcatggccaataatgagacggaggagcaacgccaagcccgggagaccgaagaacgtcaccgactggaggaggagcatcaagcacaagaacaagaacggctacggcgtgagcagcaggaccgtgagcggaccgcgaaggaggctgaggatcgacgtcagcgagctttggaagcagggcgccgagcgcgtgatctcatcggccaacaagacgtcgaagggacaccggttttccgcacccctcaacagaatgcggttgccgcgatcacccttctcgacaccctcctcaaccaaaacgagctcaatcgatccgaccacgtcgtcaacatcttgaaccagacgaagaccatgattgcggcctcggtcccagttaactccgaaagcgtccacacgccgactggcagccgagttccccacttccgatctcatgactaccgtcatccaagcctcagcatcaccggcgcaggatccaaccgcaggagcaggggtcacgacgagcggtctgttcactcacctcccgaccttcatagggagcgccgagtggaacggcctcgctcaccacctcgtcgccgccccatcgatcttcgcgacacaatcatacagcgccgagcagctcgaggctaccatcactcgccggaccgccacgacgacgaccttgacggagtagcagccttcaccgacgacctgcgtcgagtggattggccagccggcttcaaaccgactggaatagagaagtatgacggcaccactaaccccgaatcgtggcttaccgtctacggtctcgcaatccgcgcagcaggaggagataacaaggccatggcgaactatttaccagtggctttagcggattccgcccgatcttggctccatggattgccccgcggtacaattggatcttgggccgaactacgcgaccacttcatcgccaacttccaaggcaccttcgagcgtcccggcacacaatatgatctctacaacgtcattcagaagtccggagaatcccttcgagattacatccggcgattttctgaacaacgtaacaagatctccgacattaccgacgacgtcatcatcgccgcgttcaccaaagggattcgccacgaagaactagtcggcaagtttgggcgtaagcctcccaggacagtcaagctcatgtttgaaaaagccaacgagtacgccaaagctgaagacgccgtcaccgcatcaaagcagtcgggtcccagttggaagcaaaacaagggtacgccggctacgggaggaggtggaagtaacaatcataaggatcgcaagcgtaagcctgcggaacttgttgcaaccgccagtcactcttctcgacagcgttcgcgcgtcaacacgttcgacaagatcatgaactcccaatgcccgcaccatcctaactccaaccacgtggccaaagattgtttcgtctacaagcaattcgcggatcaatacaccaagactgcacggaagaactccgacgaagaacaaagcacgtcaaggaagaaagacgacggcgacaccccggcaggttttcaagatcaccgcaaggagctcaaccatatcttcggcggccccctggcttatgagtctaaacggaagcagaagttgactgaacgggagatcaatgctgttcagcccgacacgccccaatatcttcgatggtcagagattgcaatcaagtttgaccgctcggatcatcctgaccgagtggtccacccggggcggtaccccctggtactagacccagtggtccgtaatgtcaagcttcgcagaaccctcatcgacggtggcagcgcactcaatatcctcttcgccaagaccttggatgatatgcagatccctcgctccgagctaaaaccaagcaatgcgccttttcacggagtgattccaggattatccgcaactccactcggccagatcaccctcccggtcactttcggcactcgggaaaactttcgcacagagaatatcagcttcgaagtcgccaatttcgagacagcttaccatgccatactcggacgcccggcgttagccaagttcatggccgtcccgcactacacttacatgatgatgaagatgcctggtccccgaggagtcctatccctacggagcgacatcaagcaagccgtcacatgcgacaaggagagttgcgacatggcccaaactcgcgagatggcgtctgcccgagaggatatccgactggctgcagccacggcgagcgaaggagaagtgcccgctaccaagatttcaaagagtggagaaagcgaagccaaaactaagaagattcccctagatccctctgatcctactaaaactgctaacaataaagatatctttgcgtggaaaccatctgatatgcccggtattcctagagaggtgattgagcactccttacatgtcaaagaagatgcaacgcctatcaaacaacgactccgccgatttgcacaagacaggaaagacgcgatcaaggaggaattaaccaagctgttagcggcaggcttcatcaaagaagtccttcatcccgactggctggctaacccggttctagttcggaagaaaacagggcaatggcgcatgtgtgttgattataccgacctcaacaagtcttgtcccaaagatccttttgggttgcctcgcattgaccaggtagttgactcaaccgccggctgtgagcttctcagttttctggattgctactcggggtatcatcagatccgactgaaggaatccgactgcttgaagacttcattcatcacgccctttggagcttattgctatgtcaccatgccgttcggactaaaaaacgcaggagcaacttatcaacgtatgatccaaagatgcttctcaacgcagatcggccgcaacgttgaagcctatgtggatgatgtagtcgtcaagaccaagcaaaaggatgatttgatcttggatctagaagaaaccttcgcgagcatccgtgttttcaggatgaaattgaaccctgaaaagtgcaccttcggagtaccgtcagggaagctgcttggctttatggtgtctcataggggcatccaagccaacccggagaaagtcactgctatcctcaacatgaaaccgccaagtacccagaaagatgttcagaagctgactggatgcatggcggcgctcagccgatttgtttcaagacttggcgagcgggggatgcccttcttcaagctactgaagaaaacagatgatttccagtggggacccgaagcacagaaggcctttgaagatttcaaaaaactcctcaccgagccaccagtcctagcctcaccacacccgcaggagccgttgttgctgtatgtatcagccacctcccaggttgtgagcacagtcttggtcgttgagcgcgaggaagaaggccatgtccaaaaagtccagcgaccgatttattttgtcagtgaggtcctagccgactccaaaacgaggtaccctcaagttcagaagctgttatatggtattctaattactaccaggaagctatctcactactttcaaggtcactcggtaacggtggtcacatcatttccactcggtgacatactgcacaatcgcgaagcaaacggacgtattgctaagtgggctttggagttgatgtctttggacatatcattcaagcccagaatttcaatcaagtcccaagtgttagttgattttgtcgccgaatggaccgagtgccaggaggatacccccgcggagaacaaggagcactggaccatgcattttgacggatccaaacgactttcgggcactggggcaggagtggttttgatttccccaactggagaaagattgagctacgtgctttggatacatttttcggcgtcccacaatgttgccgagtatgaggccctccttcatgggctgcggattgcaatttccctagggataaagcgtctaattgttcgaggcgattcacagctggtcgtcaaccaggttatgaaagagtggtcctgccttgacgacaacatgatggcatatcgacaagaggtacgcaaattggaagacaagttcgatggactcgagctcagtcacgttcttcgacacaacaatgaagccgccgacagacttgccaattttggatccaagcgcgagacggcgccctcagatgttttcgtcgaacacctttatacaccgaccgtacctcataaagatactactcaagatgccgacactcatgacgtagctatggttgaagccgactggcgagagcccttcatacgatttttaacttctcaagagcttcctcaagataaagatgaagccgagcggatttcaaggcggagcaaactttatgttatgcatgaatctgagttatacaagaaaagcccttcaggaattctgcaacgctgcgtatctttagaggaagggagacaattgctgaaagacatacattctgggatatgcggaaaccacgctgctgcacgcaccattgtcggcaaagcttaccggcagggttttttctggcctactgcagtgtccgacgccgacaaaattgtgcgcacatgtgaaggttgccaatttttcgccagacaaattcacttaccagctcaagagttgcaaactatcccgctgtcttggccgtttgcggtttgggggctcgacatggttggcccgtttaaaaaggcagtcggcggctacacgcatctctttgtggccattgacaaattctccaagtggatcgaagctaaaccggttgtcacaatcacagcggataatgctcgagacttcttcatcaacattgtgcatagatttggagtgcccaatcggatcatcaccgataatggcacacagttcactggcggagtttttaaagacttttgtgaagacttcggaatcaagatttgctacgcctcagtggcacaccccatgagcaatggacaggtggagcgagccaatggcatgatacttcaagggattaaagcgcgtgtttttgaccggctaaaaccctatgccggcaaatgggtacaacagttgccatcagtactttggtctttgcgaactacacctagtcgggccacaggccagtcaccttttttccttgtctatggggcagaagcaatgttgccgagtgaagttgaattcgagtctttgcgctttcgaaatttccgtgaagaaagttacgaggaggaccgagtggatgacttgcaccgattggaagaagcccgcgaagcagctttgattcggtcggctcgatatttacaagggttgcggcgctatcataatcgcaatgttcgatctcgtgcctttttagtcggtgacctggttttgcggaaaattcaaactacacgagatcggcacaagttatctcctctatgggaagggccatttattatctctgaagtcacccggccaggttcttatcgactcaagcgcgaagacggtactcttgtcgacaactcttggaatattgagcatcttcgtcgtttctacgcttaa

SEQ ID NO: 47492 - DNA, 2571 bp, Oryza sativa
  Clone ID: PAT_MRT4530_50255C.1
ccgctacacttttctgctcaacataagcttcaagtgctgactcttgcatataataatcttactggaactatcccttcttcctttgccaatatcacaggacttagaaaacttgatttcacagctaacaatatcaagggaaacatcccaaatgagttttcaaacttcctcatgatggagattcttcttttgggtggaaatatgttgacaggtaggtttccacaagccatcttgaatctttctactctcactaatcttcaccttagttttaatcatctaagtggggagctaccatccaatttcctttactctctacccaatctacaagtacttgcattggactacaatttttttcaaggccatatccccagctcattgggaaacgactccaacatacgtgtactggacataacaagtaataatttcactggagttgtaccaagttccattggcaaactaagcaaactgtattggttaaatctttaatccaatcaactccaagcacataaaagggaagattgggagtttatgaacagcttagccaactgcactaggctacaaagtttctcgatggcttataaccgtctagaaggccatctaccgagttcgttaagcaacttttccgctcatctccaacgacttcatttaggaggaaatgcaatatcagagtcttttccctctggcatagaacacctctcaaacttgattgctttatcagtaggaactaatgactttactggtacccttccagaatggcttggaaatcttaaacagttgcaaatattaagtttatatgacaactatttcacagggtttattccatcatccctttcgaatctgtctcaactggtagctctcacactacaatttaacaagctggatgggcagataccaagcttaggaaaccagctgcaaatgcttcaaatattcaatgttttgtacaataatcttcatggtgtcataccaaatgcgatcttcagtcttccgtcattaatacaagttgacttatcttacaacaacctacatggacaacttcctattgacattggcaatgcaaaacaactagtatctttaaagctttcatcaaataagctatctggagatattctgaatgctttgggtgattgtgaaagtcttgaagtcatcaggttagatagaaataattttagcgggagcatccccatttcattaggcaacataagtagcctaagagttctcaatttatctctcaataacttaacagggtcaataccggtatctcttagcaatctacagtatcttgagaaactaaacctatcattcaaccatcttaagggcgaaatcccagcaaaaggaattttcaagaatgctacagctttccagattgatggaaatcaggggctttgtggtgggccaccagccttacacctaaccacatgtcctattgtgccattagtatcatctaagcacaataacttaattttactgaaagtgatgatcccactagcctgcatggtgtcacttgctacagtcatatctattatttttatttggagggcaaaactgaagagagaatcagtatcgttgccattttttggtagcaatttccccagaatttcatacaatgctcttttcaaagcaacagagggtttctcaacatccagtttaattggcagagggagatatggttctgtctttgtagggaaactttttcaagaaaacaacgttgttgctgtgaaagttttcagcctagagacaaggggagcaggaaagagcttcatcgcagaatgtaatgccttaagaaatgtgcggcatcgcaatatagttcctatcctcactgcatgctctagtattgattctaaaggcaatgatttcaaagctctagtgtatgagttcatgtcacaaggggacttatataatttactatatacaacaagacatgatagcaactcttcaaagttgaaccacatttcattggctcagaggacaagcattgtgctagatgtatcaagtgcattagagtacttgcaccataacaaccaaggaactattgttcactgtgatctgaaccctagcaacatccttctagataaaaatatgattgctcatgttggagactttggccttgcaagattcaaaatcgattcttcgtcaccttctctaggtgattcaaacttaacatcttcactcgcaacaaggggaaccattggatatattgcaccagaatgctcagagggcggtcaagtttcaactgcctcagatgtattcagctttggagttgttctcttggaactatttattcggagaaggccaatagacgacatgtttaaggatggattgagcattgcaaagcatgtagagatgaacttccctgacaggatactagagattgttgatccccaggtgcaacacgagctggacctttgccaagaaacaccaatggcagtaaaggagaaaggcatacactgcctgcgcagtgtgctgaatattggactctgctgcaccaacccaacaccgagtgaacgcatcagcatgcaggaggcggctgccaagctacacggaatcaatgattcataccttagaggaaactagcta

SEQ ID NO: 47493 - DNA, 5967 bp, Oryza sativa
  Clone ID: PAT_MRT4530_50256C.1
atgggtcctttctccggcatcgacgacctcgtcttcccgcccgggcagacgtttcggttcggcagcctcgacttcatcaccgacaacttcggcaagatttctctcctcgactcggaatcaaaccagtcgggagagaaccggatttcggtcccgtttggattcccgaacgcggctgaaagctacttcaagaccatctcaaccgagtcggcttcaaaccactcggccgagattgcatcttctccaatgacaccagatcaagatgatggggcttacccaccggtcctgatgaagctccccgacgatttagcggccgtctccaccacgacagcgtcttcatcccgcaggcctaggcggaagtcggcttcaacaccgatttcgcctagcttcagggaagtcggcgttatcctccaaccactcggcacggtttcgacggatcagctagatgaccactacagccctcccaccgtcgactcgcgccccaccgacatcgtggagtacgacgaatttagttctcgctacaacgacttccacgacttcgacgacttcgacggaagcctagatgacgactacacccctctctactttggcgttttcatggccaataatgagacggaggagcaacgccaagcccgggagaccgaagagcgtcgccgactggaggaggagcaccaagcacaagaacaagaacggctacggcgtgagcagcaggaccgtgagcggatcgcgaaggaggctgaggaccgacgtcagcgagctttggaagcagggcgccgagcgcgtgatctcatcggccagcaagatgtcgaagggacaccggttttccgcacccctcaacagaatgcggttgccgcgatcacccttctcgacaccctcctcaaccaaaacgagctcaatcgatccgaccacgtcgtcaacatcttgaaccagacgaagaccatgatcgcggcttcggtcccagttaactccgaaagcgtccacacgccgactggcagccgagtcccccacttccgatctcatgattaccgtcatccaagcctcagcatcaccggcgcaggatccaaccgcaggagcaggggccacgacgagcggtctgttcactcacctcccgaccttcatagggagcgccgagtggaacggcctcgctcaccacctcgtcgccgccccatcgatcttcgcgacacaatcatacagcgccgagcagctcgaggctaccatcactcgccagaccgccacgacgacgaccttgacggagtagcagccttcaccgacgacctgcgtcgagtggattggccagccggcttcaaaccgactggaatagagaagtatgacggcaccactaaccctgaatcgtggcttaccgtctacggtctcgcaatccgcgcagcaggaggtgacaacaaggccatggcgaactatttaccagtggctttagcagattccgcccgatcttggctccatggattgccccgtggtacaattggatcttgggccgaactacgcgaccacttcatcgccaacttccaaggcaccttcgagcgtcccggcacacaatatgatctctacaacgtcattcagaagtccggagaatcccttcgagattacatccggcgattttctgaacaacgtaacaagatctctgacatcaccgacgacgtcatcatcgccgcgttcaccaaagggattcgtcacgaagaactagtcggcaagtttgggcgtaaacctcccagaacagtcaagctcatgtttgaaaaagccaacgagtacgccaaagccgaagacgccgtcaccgcatcgaagcaatcgggtcccagttggaaaccgaaaaatacgccggccacgggaggaggtggaagtaacaatcataaggaccgcaagcgtaagcctgaggaacttgttgcaaccgccgctcactcttctcgacagcgttcgcgcgtcaacaccttcgacaagatcatgaactcccaatgcccgcatcatccaaactccaaccacgtggccaaagagtgcttcatctacaagcagttcgcggagcagtacaccaagtctactcggaagaactccgacgaggaacaaagcacgtcaaggaagaaggatgacggcgacaccccggctggttttcaagatcaccgcaaggagctcaaccatatctttggcggccccctagcttatgaatctaaacggaagcagaagttaactgaacgggagatcaacgctgttcagcccgacacgccccagtatcttcgatggtcagagattgcaatcaagtttgaccgctcggatcatcccgaccgagtggtccacccggggcggtaccccctggtactagacccagtggtccgtaacgtcaagcttcgcagaaccctcattgatggcggcagtgcactcaatatcctcttcgccaagactttggatgatatgcagatccctcgctccgagttaaaatcaagcaatgcgccttttcatggagtaattccaggattatccgcaactccactcggccagatcactcttccggtcacttttggcactcgggaaaacttccgcacagagaatatcagctttgaagttgccgatttcgagacagcataccatgccatactcggacgcccggcgttagccaagttcatggccgtcccgcactacacgtacatgatgatgaagatgcctggtccccgaggagtcctgaccctacggagcgacatcaagcaagctgtcacatgcgacaaggagagttgcgacatggcccaaacccgcgagatagcgtctgcccgagaggaaatccgactggctgcaaccacggaaagcgcgctcatcacctttcttcaaaataataaagatatctttgcgtggaaaccttcggatatgcccggtattcccagagaggtgattgagcactccttacatgtcaaagaagacgccaagcctattaaacaacgactccgccgatttgcacaagacaggaaggacgcgatcaaggaggaattgaccaagttgttagcagcaggcttcatcaaagaagtccttcatcccgactggctggcaaacccggttctagttcggaagaaaacagggcaatggcgcatgtgtgttgattacactgacctcaacaagtcctgccctaaagatccttttgggttgcctcgcattgaccaggtagttgactcaaccgccggctgcgagcttcttagttttctggattgctactcggggtatcatcagatccgactgaaggaatccgaatccgactgcttgaagacttcattcatcacgccttttggggcatactgctacgtcaccatgccgtttggattaaaaaacgcaggagcaacctatcagcgcatgatccagagatgcttttcaacacagatcggccgcaacgttgaagcctatgtggatgacgtagtcgtcaagaccaagcaaaaggatgatctgatcttggatctagaagaaaccttcgcgagcatccgcgccttcaggatgaaattaaaccctgaaaagtgcaccttcggagtaccgtcagggaagctgcttggttttatggtgtctcataggggcgtccaagccaacccggagaaagttaccgctatcctcaacatgaaaccgccaagcacccagaaagatgttcagaagctgactggatgcatggcggcgctcagccgattcgtttcaagacttggcgagcgggggatgcccttcttcaagctactgaagaaaacagataatttccaatggggacccgaagcacagaaggccttcgaagatctcaaacaactcctcaccaagccgccggtcttagcttcaccacacccgcaggagccgttgttgctgtatgtatcagccacctcccaggtcgtgagcacagtcttggttgtcgaacgtgaggaagaaggccatgtccagaaagttcagcgaccaatctacttcgtcagcgaggtcctggccgactccaaagcgaggtaccctcaggttcagaagctgttatatggtattttaattactaccaggaagctgtctcattactttcaaggtcactcggtaacggtggtcacatcatttccactcggcgatgtactgcacaaccgcgaagcaaatgggcggattgctaagtgggctttggagttgatgtctttggacatatcattcaagccccgcacttcaatcaagtctcaagcgttagctgattttgtcgccgagtggaccgagtgccaagaggatacccccgtggagaaaatagagcactggaccatgcattttgacgggtcaaaaagactttcgggcactggagccggagtggttttaatttccccgactggagaaagactaagttatgtgctttggatacatttttcggcgtctcataacgtcgccgagtatgaggcgctccttcatgggctacggattgcaatttccctagggataaagcgtctaattgttcgtggtgattcacagctggttgtcaaccaagttatgaaagagtggtcctgcattgacgacaatatgatggcatatcgacaagaggtgcgcaaattggaagacaagttcgatggactcgagctcagtcacgttcttcgacacaacaatgaagccgccgacagacttgccaattttggatccaagcgcgagacggcgccctcagatgttttcgtcgaacacctttatacaccgaccgtacctcataaagataccactcaagatgcagacactcgtgacatagctatggttgaagccgactggcgagagcccttcatacgatttttaacttctcaagagctccctcaagacaaagatgaagccgagcggatttcaaggcggagcaaactttacgttttgcacgaatctgagttatacaagaaaagcccttcaggaattctgcaacgctgcgtttctttagaggaagggagacaattgctgaaagacatacattctgggatatgcggaaaccatgcggctgcgcgcaccattgtcggcaaagcttaccgccagggttttttctggcctactgcagtgtccgacgccgacaaaattgtgcgcacatgtgaaggttgccaattttttgccagacaaattcacttaccagctcaagagttgcaaactatcccgctgtcttggccgtttgcggtttgggggctcgacatggttggcccgtttaaaaaggcagtcggcggttacacgcatctctttgtggcctttgataaattttccaagtggattgaagctaaaccggttgtcacaatcacagcagataatgctcgcgacttcttcatccacattgtgcatagatttggagtgcccaatcggataatcactgataatggcacacaattcactggcggagtttttaaagacttttgtgaggactttggaatcaagatttgctatgcctccgtggcacaccccatgagcaatggacaggtggagcgagccaatggcatgatacttcaagggattaaagcacgtgtttttgaccggttaaaaccctatgccggcaaatgggtgcaacagttgccatcagtactttggtctttgcgaactacacccagtcgagccacaggccagtcaccttttttccttgtctatggggcagaagcaatgttgccgagtgaagttgaattcgaatctttgcgcttccgtaatttccgtgaagaacgctatgaagatgaccgagtggacgacttgcaccgactggaagaggtccgcgaagcagctttgattcagtcagctcggtacttacaagggttgcgacgttatcataatcgcaatgttcgatctcgtgcctttctagtcggcgacctggttttacggaaaattcaaaccacacgagatcggcacaagttatctcctctatgggaagggccgtttattatctctgaagttacccggccaggttcatatcgactcaagcgcgaagacggcactctcgtcgacaactcttggaacattgaacatcttcgtcgtttctacgcttaa

SEQ ID NO: 47494 - DNA, 292 bp, Oryza sativa
  Clone ID: PAT_MRT4530_50257C.1
tttatcggagtgctagccgataagttatctagatgttgcatcggcttataaggattgcatccgattggtttatactggattatattattattatttatcatcatcagccgatcgcctttatatcattatctacattggacatatagccgattgttcaaaaccctatcgctatcagctgagtcaaactgactggcactcccgcatctcgtcaacctttggacctgcactggagttaagcagatctcgcaggccagtgtgtgtttttcgcatcaacaatatgacaaggtgaaaa

SEQ ID NO: 47495 - DNA, 261 bp, Oryza sativa
  Clone ID: PAT_MRT4530_50258C.1
cccacgcgtgcggcagcatccccagatagcaagccaagaatggcccatgaatctcaagaggctaccacgccgaagacggcaaacattgcggactcaggacatatacaaccactgaggctgccggatacatcagaatctctaaacaaagtcaagcactccgctgatacaaataacgtggcgccgccttcggctataagctctaaagccactcataccctgtgaacacgagttctgactggtatgaatccgatgagagggcac

SEQ ID NO: 47496 - DNA, 1135 bp, Oryza sativa
  Clone ID: PAT_MRT4530_50259C.1
atgggcggtccctcttacgccgcggtgaatccggcagctggacaaccagacaccccggccgacccaactccatcacgcccaccctcgccaccggtgcctaggaaagggtcgagctatacttcagatcaagcagttatccactcccgcttgtggtaagaatgggctgacggcagcgaggggggacggctcggtaggcgggccccgcatgtcagtggcacaaagggcggccggtctaccgtggacagggaccacctgggtaatccaccgccggtccacgggaccgacggtccagatcagccgggaggccgatcggacggcgtgggcacggcgaggcacggctcggctcggcacaaagccggccggccggccatggcggggtgacggcggcgcgcggccatcggcgacgaccggcggcgtgggagacggcggcggccgtcgcgaaggcggcggcgctgccaaggcatcggcacacacgggagaagaaaggagggggaggggcttctcaccgcgggttggccggcgtgggaggaagacgacggcgaacgacggcggctagcggtgaacggcagggtgcgcgggatggacgaggcggtcctcgacctcgcggggccgatggtggcgacggagtggcgtggccggcagcgaagctagcggcggcgattgcgcggctcggcggcggctagagcagcggcgacgcgcagtcggagagccgcggcagcggcggagcttggcgagatcagcgcgggcgcgattttgccggcgacgtggggagtggagggagagagaggggtgaattcgaattcgaatcccgcccatttttgggcgcgcgcgagagcgggaagatgtgttggaggtgggcggcgtgggtgcggggtgcgggtgcaggaggcggggaaggtgggtggcgtggggagtggcggtttcggcggcagttggcgccggggcgtgggcggctggaggtaggggatgacctgacaggtgggccccacctctcagcgttccgaagagaggaggagggggcacgggccggcccaacgaagaggaggccgagcgcgggaggcgaatgggccgacggcccaagaagaaaaagaaggaaaagaaaaggaagaaaaaggaaaaagactttccccgggat

SEQ ID NO: 47497 - DNA, 210 bp, Oryza sativa
  Clone ID: PAT_MRT4530_5025C.1
tgccgaccgcggtggaacgatcggggcgaggtgacgcaagaggccgccagtgccgcgcgccgtgagtattgacctcgagtgccggagcccgacgggccgagcagctccgggtcttgctcggactcgcgactgcagcaatatattactttcaatgacatgatagttaattacgcatgcagatatctctaatacatgagagcatggttctct

SEQ ID NO: 47498 - DNA, 5916 bp, Oryza sativa
  Clone ID: PAT_MRT4530_50260C.1
atgggttccgtctccggcatcgacgacctcgtcttccctcccgggcagacgttttggttcggcagcctcgacttcgtcaccaacaacttcggcaagatttctctcctcgactcggaatcagaccagtcgggagagaaccggctttcggtctcgttcggattcccgaacgcggctgaaagctacttcaagaccatctcaaccgagtcggcttcaaaccactcggccgagatcgcatcttctccaacaacaccagatcaagatgatggggcttacccaccagtcctgatgaagctccccgacgatttagcggccgtctccactaccacagcgtcttcatcccgtaggcctaggcggaagtcggcttcaacaccgatttcgcctagcttcagggaagtcggcgtcatcctccaaccactcggcacggtttcgacggatcaactggatgactacaacagctctcccaccatcgactcacgtcctactgacatcgtggagtacgacgaatttagttctcgctacaacgacttcaacgacttcgacgacttcgacggaagcctagatgacaactacactcctctctactttggcgttttcatggccaataatgagacggaggagcaacgccaagcccgggagaccgaagaacgtcaccgactggaggaggagcatcaagcacaagaacaagaacggctacggcgtgagcagcaggaccgtgagcggaccgcgaaggaggctgaggatcgacgtcagcgagctttggaagcagggcgccgagcgcgtgatctcatcggccaacaagacgtcgaagggacaccggttttccgcacccctcaacagaatgcggttgccgcgatcacccttctcgacaccctcctcaaccaaaacgagctcaatcgatccgaccacgtcgtcaacatcttgaaccagacgaagaccatgattgcggcctcggtcccagttaactccgaaagcgtccacacgccgactggcagccgagttccccacttccgatctcatgactaccgtcatccaagcctcagcatcaccggcgcaggatccaaccgcaggagcaggggtcacgacgagcggtctgttcactcacctcccgaccttcatagggagcgccgagtggaacggcctcgctcaccacctcgtcgccgccccatcgatcttcgcgacacaatcatacagcgccgagcagctcgaggctaccatcactcgccggaccgccacgacgacgaccttgacggagtagcagccttcaccgacgacctgcgtcgagtggattggccagccggcttcaaaccgactggaatagagaagtatgacggcaccactaaccccgaatcgtggcttaccgtctacggtctcgcaatccgcgcagcaggaggagataacaaggccatggcgaactatttaccagtggctttagcggattccgcccgatcttggctccatggattgccccgcggtacaattggatcttgggccgaactacgcgaccacttcatcgccaacttccaaggcaccttcgagcgtcccggcacacaatatgatctctacaacgtcattcagaagtccggagaatcccttcgagattacatccggcgattttctgaacaacgtaacaagatctccgacattaccgacgacgtcatcatcgccgcgttcaccaaagggattcgccacgaagaactagtcggcaagtttgggcgtaagcctcccaggacagtcaagctcatgtttgaaaaagccaacgagtacgccaaagctgaagacgccgtcaccgcatcaaagcagtcgggtcccagttggaagcaaaacaagggtacgccggctacgggaggaggtggaagtaacaatcataaggatcgcaagcattgtttcgtctacaagcaattcgcggatcaatacaccaagactgcacggaagaactccgacgaagaacaaagcacgtcaaggaagaaagacgacggcgacaccccggcaggttttcaagatcaccgcaaggagctcaaccatatcttcggcggccccctggcttatgagtctaaacggaagcagaagttgactgaacgggagatcaatgctgttcagcccgacacgccccaatatcttcgatggtcagagattgcaatcaagtttgaccgctcggatcatcctgaccgagtggtccacccggggcggtaccccctggtactagacccagtggtccgtaatgtcaagcttcgcagaaccctcatcgacggtggcagcgcactcaatatcctcttcgccaagaccttggatgatatgcagatccctcgctccgagctaaaaccaagcaatgcgccttttcacggagtgattccaggattatccgcaactccactcggccagatcaccctcccggtcactttcggcactcgggaaaactttcgcacagagaatatcagcttcgaagtcgccaatttcgagacagcttaccatgccatactcggacgcccggcgttagccaagttcatggccgtcccgcactacacttacatgatgatgaagatgcctggtccccgaggagtcctatccctacggagcgacatcaagcaagccgtcacatgcgacaaggagagttgcgacatggcccaaactcgcgagatggcgtctgcccgagaggatatccgactggctgcagccacggcgagcgaaggagaagtgcccgctaccaagatttcaaagagtggagaaagcgaagccaaaactaagaagattcccctagatccctctgatcctactaaaactgctaacaataaagatatctttgcgtggaaaccatctgatatgcccggtattcctagagaggtgattgagcactccttacatgtcaaagaagatgcaacgcctatcaaacaacgactccgccgatttgcacaagacaggaaagacgcgatcaaggaggaattaaccaagctgttagcggcaggcttcatcaaagaagtccttcatcccgactggctggctaacccggttctagttcggaagaaaacagggcaatggcgcatgtgtgttgattataccgacctcaacaagtcttgtcccaaagatccttttgggttgcctcgcattgaccaggtagttgactcaaccgccggctgtgagcttctcagttttctggattgctactcggggtatcatcagatccgactgaaggaatccgactgcttgaagacttcattcatcacgccctttggagcttattgctatgtcaccatgccgttcggactaaaaaacgcaggagcaacttatcaacgtatgatccaaagatgcttctcaacgcagatcggccgcaacgttgaagcctatgtggatgatgtagtcgtcaagaccaagcaaaaggatgatttgatcttggatctagaagaaaccttcgcgagcatccgtgttttcaggatgaaattgaaccctgaaaagtgcaccttcggagtaccgtcagggaagctgcttggctttatggtgtctcataggggcatccaagccaacccggagaaagtcactgctatcctcaacatgaaaccgccaagtacccagaaagatgttcagaagctgactggatgcatggcggcgctcagccgatttgtttcaagacttggcgagcgggggatgcccttcttcaagctactgaagaaaacagatgatttccagtggggacccgaagcacagaaggcctttgaagatttcaaaaaactcctcaccgagccaccagtcctagcctcaccacacccgcaggagccgttgttgctgtatgtatcagccacctcccaggttgtgagcacagtcttggtcgttgagcgcgaggaagaaggccatgtccaaaaagtccagcgaccgatttattttgtcagtgaggtcctagccgactccaaaacgaggtaccctcaagttcagaagctgttatatggtattctaattactaccaggaagctatctcactactttcaaggtcactcggtaacggtggtcacatcatttccactcggtgacatactgcacaatcgcgaagcaaacggacgtattgctaagtgggctttggagttgatgtctttggacatatcattcaagcccagaatttcaatcaagtcccaagtgttagttgattttgtcgccgaatggaccgagtgccaggaggatacccccgcggagaacaaggagcactggaccatgcattttgacggatccaaacgactttcgggcactggggcaggagtggttttgatttccccaactggagaaagattgagctacgtgctttggatacatttttcggcgtcccacaatgttgccgagtatgaggccctccttcatgggctgcggattgcaatttccctagggataaagcgtctaattgttcgaggcgattcacagctggtcgtcaaccaggttatgaaagagtggtcctgccttgacgacaacatgatggcatatcgacaagaggtacgcaaattggaagacaagttcgatggactcgagctcagtcacgttcttcgacacaacaatgaagccgccgacagacttgccaattttggatccaagcgcgagacggcgccctcagatgttttcgtcgaacacctttatacaccgaccgtacctcataaagatactactcaagatgccgacactcatgacgtagctatggttgaagccgactggcgagagcccttcatacgatttttaacttctcaagagcttcctcaagataaagatgaagccgagcggatttcaaggcggagcaaactttatgttatgcatgaatctgagttatacaagaaaagcccttcaggaattctgcaacgctgcgtatctttagaggaagggagacaattgctgaaagacatacattctgggatatgcggaaaccacgctgctgcacgcaccattgtcggcaaagcttaccggcagggttttttctggcctactgcagtgtccgacgccgacaaaattgtgcgcacatgtgaaggttgccaatttttcgccagacaaattcacttaccagctcaagagttgcaaactatcccgctgtcttggccgtttgcggtttgggggctcgacatggttggcccgtttaaaaaggcagtcggcggctacacgcatctctttgtggccattgacaaattctccaagtggatcgaagctaaaccggttgtcacaatcacagcggataatgctcgagacttcttcatcaacattgtgcatagatttggagtgcccaatcggatcatcaccgataatggcacacagttcactggcggagtttttaaagacttttgtgaagacttcggaatcaagatttgctacgcctcagtggcacaccccatgagcaatggacaggtggagcgagccaatggcatgatacttcaagggattaaagcgcgtgtttttgaccggctaaaaccctatgccggcaaatgggtacaacagttgccatcagtactttggtctttgcgaactacacctagtcgggccacaggccagtcaccttttttccttgtctatggggcagaagcaatgttgccgagtgaagttgaattcgagtctttgcgctttcgaaatttccgtgaagaaagttacgaggaggaccgagtggatgacttgcaccgattggaagaagcccgcgaagcagctttgattcggtcggctcgatatttacaagggttgcggcgctatcataatcgcaatgttcgatctcgtgcctttttagtcggtgacctggttttgcggaaaattcaaactacacgagatcggcacaagttatctcctctatgggaagggccatttattatctctgaagtcacccggccaggttcttatcgactcaagcgcgaagacggtactcttgtcgacaactcttggaatattgagcatcttcgtcgtttctacgcttaa

SEQ ID NO: 47499 - DNA, 741 bp, Oryza sativa
  Clone ID: PAT_MRT4530_50261C.1
atggagtttgacatgctgaactccaacccggaggcgcagctcgagctgatgaacacaatgctacagctggagcagctgagcgcattccctgaccaccacggcatggtggtgccgtgctctcccacttcgccatgcatgggagcgcaaggtggtcatcatcacttctcctcggtgaatcatcagccagctcacggcgtcgtgtcgtcaggtggcgccaacaccggcgacgggtaccgcgaccagtactacacccagctgcttcccgccgccgcgtacagcaacgcggcaggcggtggccgcggctcggagtaccacacgacgacgacgacgcggccggcttccggcggcggcggggacggcggcgtggggccggcggcgatgagggagatgatcttccacatcgcggcgctgcagccggtgaacatcgacccggagacggtgcggccgccgaagcgccggaacgtgcgcatctcgacggacccgcagagcgtggcggcgcggatgcggcgggagcgcatcagcgagcgcatccgcatcctgcagcggctcgtccccggcggcaccaagatggacaccgcctccatgctcgacgaggccatccactacgtcaagttcctcaagactcaggtgcagtcgctggagcgcgccgccgccgccaacggccaccgcccgccgccgcccaccgccacctccgccgccgccgccaccgtggcctaccctggcctgaacggccagtggtag

SEQ ID NO: 47500 - DNA, 5979 bp, Oryza sativa
  Clone ID: PAT_MRT4530_50262C.1
atgggtcccgtctccggcatcgacgaccccgtcttcccacccgggcaggcgtttcggttcggcagcctcgacttcgtcaccaacaacttcggcaagatttctctccttgactcggaatcggaccagtcgggagagaaccggatctcagtcccgtttggattcccaaacgcggctgaaagctacttcaagaccatctcaatcgagtcggcttcaaaccactcggctgagatcgcatcttctccaacatcaccagatcaagatgatggggcttacccaccgatactgatgaaactccccgacgatttggcggccgtctccatcacgacagcgtctccttcccgtaggcctaggcggaagtcggcttcaacaccgatttcgcctagcttcagagaagttggcgtcatcctccaaccactcggctcggtttcgacggatcagctggatgactacaacagctcttccaccgtcgactcgcgtcccactgacatcgtggagtacgacgagtttagctctcgctacaactacgcggatctcgacgacttcgacggaagcctagatgacaattacacccctctctactttggcgtcttcatggccaataacgagacggaggagcaacgccaagcccgggagaccgaagagcgccgccgactggaggaggagcatcaagcacaagaacaagaacggttacggcgtgagcagcaggagagtgagcggaccgcgaaggaggctgaggaccgacggcagcgagctttggaagcagggcgccgggcgcgtgatctcatcggccagcaagatgttgaagggacgccggtttttcgcacccctcaacagaatgcggttgccgcgatcaccctcctcgacaccctactcagggaaaacgagctcaatcaatctgatcacgtcgtcaacatcttgaaccagacgaagaccatgattgcagcttcggtcccagttaactccgagagcgtccacacgccgactggcagccgagtcccccacttccgatctcatgactaccgtcatccaagcctcagcatcaccggcacaggatccaatcgcaggagcaggggacacgacgagcggtccgttcactcacctcccgatcatcatagggagcgccgagtggaacggccccgctcaccacctcgtcgccaccccttcgatcttcgcgacacaatcatacagcgccgagcagctcgaggctatcatcactcgccggaccgccacgacgacgaccttgatggagtagcagccttcaccgacgacctgcgtcgagtggattggccagccggcttcaagccgactggaatagagaagtacgatggtaccactaacccagaatcgtggcttaccgtctatggtctcgcaatccgcgcagtaggaggagacagtaaggctatggcgaactatttaccagtggctttagaggattccgcccgatcttggctccatggattgccccgtggtacgattggatcttgggccgagttacgcgaccacttcatcgccaacttccaaggcaccttcgagcgtcccggcacacaatacgacctctacaacgtcattcagaagtccggggaatcccttcgagattacatccggcgattttctgaacaacgtaacaagatctccgacatcaccgacgacgtcatcatcgccgcattcaccaaagggattcgccacgaagaattggtcggcaagttcgggcgtaagcctcccaggacagtcaagctcatgtttgaaaaagccaacgagtacgccaaagctgaagacgccgtcatcgcatcaaagcagtctggtcccagttggaagccaaaaaaggatacgccggctacgggaggaggtggaagtaacaatcataaggaccgcaagcgtaagcctgcagaacttgttgcaaccgccagtcactcttctcgacagcgttcgcgcgtcaacacgttcgacaagatcatgaactcccaatgcccgcaccatcctaactccaaccacgtggccaaagattgtttcatctacaagcaatttgcggatcaatacaccaagactacacggaagaactccgacgaagaacaaagcacgtcgaagaagaaagacgacggcgacgccccggcaggatttcaagaccaccgcacggagctcaaccatatcttcggcggccctctggcttatgagtctaaaaggaagcaaaagttgaccgaacgggagatcaatgctgttcagcccgacacgccccaatatcttcgatggtcagagatcgcaatcaagtttgaccgcttggatcatcctgaccgagtggtccacccggggcggtaccccctggtactagacccagtggtccgtaatgtcaagcttcgcagaaccctcatcgacggtggcagtgcactcaacatcctcttcgccaagaccctggatgatatgcagattcctcgctccgagctaaaaccaagcaatgcgccttttcacggagtaattccaggattatccgcaactccactcggccagatcaccctcccggtcacttttggcactcgggaaaatttccgcacagagaacatcagctttgaagtcgctgatttcgagacagcataccatgccatactcggacgcccggcgttagccaagttcatggccgtcccgcactacacttacatgatgatgaagatgcctggtccccgaggagtcctatccctacggagcgacatcaagcaagccgtcacatgcgacaaggagagttgcgacatggcccaaatccgcgagatggcgtctgcccgagaggatatccgactggctgcagccacggcgagcgaaggagaaatacctgctaccaagacttcaaaaagtggagaaagcgaagccaagactaagaagattcacctagattcctctgatcctactaaaactgctaacaataaagatatctttgcgtggaaaccatctgatatgcccggtattcctagagaggtgattgagcattccttacatgtcaaagaagatgccaagcctatcaaacaacgactccgccgatttgcacaagacaggaaagacgcgatcaaggaggaattaaccaagctgttagcagcaggcttcatcaaagaagtccttcatcccgactggctggcaaacccagttctagttcggaagaaaacagggcaatggcgcatgtgtgttgattataccgacctcaacaaatcctgccctaaagatccttttgggttgcctcgcattgaccaggtagtcgactcgaccgccggctgtgagcttctcagttttttggattgctactcggggtatcatcagatccgactgaaagaatccgactgcttgaagacttcattcatcacgccctttggggcatactgctacgtcaccatgccgttcggactgaaaaacgcaggagcaacttatcaacgcatgatccagagatgcttctcaacacagattggccgcaacgttgaagcctatgtggatgatgtagtcgtcaagaccaagcaaaaggatgatttgatctcggatctagaagaaaccttcgcgagcatccgtgctttcaggatgaaattaaaccctgaaaagtgcaccttcggagtaccgtcagggaagctgcttggttttatggtgtctcataggggcatccaagccaacccggagaaagttaccgctatccttaacatgaaaccgccaagtacccagaaagatgttcagaagctgactggatgcatggcggcgctcagccgatttgtttcaagacttggcgagcgggggatgcccttctttaagctactgaagaaaacagatgatttccagtggggacccgaagcacagaaggccttcgaagatttcaagaaattcctcaccgagccaccagttgtgagcacagttttggtcgttgagcgcgaggaagaaggccatgtccagaaagtccagcgaccaatttactttgtcagcgaggtcctagccgactccaaaacgaggtaccctcaggttcagaagctgttgtatggtattctaattactaccaggaagctatctcactactttcaaggtcactcggtgacggtggtcacatcgtttccactcggtgatatactgcacaatcgcgaagcaaatggacggattgctaagtgggctttggagttgatgtctttggacatatcattcaagccccgaatttcaatcaagtcccaagcgttagctgattttgtcgctgaatggaccgagtgccaggaggatacccccgcagagaagatggagcactggaccatgcattttgacggatcaaagcgactttcaggcactggagcaggagtggttttgatttctccaactggagaaagattaagctatgtgctttggatacatttttcggcgtcccacaacgtcgccgagtatgaggccctccttcatggactgcggattgcaatttccctagggataaagcgtctaatagttcgtggcgattcacagctggttgtcaaccaggttatgaaagagtggtcctgccttgacgacaatatgatggcatatcgacaagaggtacgcaaattggaagacaagttcgatggactcgagctcagtcacgttcttcgacacaacaatgaagccgccgacagacttgccaattttggatccaagcgcgagatggcgccctctgatgttttcgtcgaacacctttatgcgccgacagtacctcacaaagatactactcaagttgcgggcactcatgacgtggctatggttgaagccgactggcgagagcccctcatacgatttttgacttctcaagaactccctcaagacaaagatgaagccgagcggatttcaaggcggagcaaactttatgttatgcatgaagctgagttatacaagaaaagcccttcaggaattctgcaacgctgcgtatctttagaggaagggagacaattgctgaaagacatacattctgggatatgcggaaaccacgctgctgcacgcaccattgtcggcaaagcttaccggcagggttttttctggcctactgcagtgtccgacgccgacaaaattgtgcgcacgtgcgaaggttgccaattttttgccagacaaattcatttaccagctcaagagttgcaaactattccgctgtcttggccgtttgcggtttgggggctcgacatggttggcccgtttaaaaaggcagtcggcggttacacgcatctctttgtggccattgacaaattctccaagtggattgaagctaaaccggttgtcacaatcacggcggataacgctcgagacttcttcatcaacattgtgcacagatttggagtgcccaatcggatcatcactgataatggcacacaattcactggcggagtttttaaagacttttgcgaggactttggaattaagatttgctatgcttcagtagcacaccccatgagcaatggacaggtggagcgagccaatggcatgatacttcaagggattaaagcgcgtgtctttgaccggctaaaaccctatgctggcaaatgggtgcaacagctgccatcggtgctttggtctttgcgaactacacccagtcgggccacaggccaatcaccttttttccttgtctatggggcagaagcaatgttgccgagtgaagttgaattcgaatctttgcgctttcgaaatttccgtgaagaacgttacgaagaggaccgagtggatgacttgcatcgattggaagaagtccgcgaagcagctttgattcgctcggctcgatacttacaagggttgcggcgttatcataatcgcaatgttcgatcccgtgcctttttagtcggcgacctggttttgcggaaaattcaaactacacgggatcggcacaagttatctcctttatgggaggggccatttatcatctctgaagtcacccggccaggctcttatcgactcaagcgcgaagacggtactctcgtcgacaactcttggaacattgaacatcttcgtcgtttctacgcttaa

SEQ ID NO: 47501 - DNA, 197 bp, Oryza sativa
  Clone ID: PAT_MRT4530_50263C.1
cgcactctggccgagccacgtatttctaatgggcgccaacgaggcttactgcatcctcggccggtcgctcggcaaggttcacgacaacggtgctaccccccattggctagcatccgatcctcctcgacggcgaccatgaggtctacgggaccctcaaggtgaagcagatcaagaacgcgcagatcttcatgtacatg

SEQ ID NO: 47502 - DNA, 336 bp, Oryza sativa
  Clone ID: PAT_MRT4530_50264C.1
atgaggttcttcctcaagctcgctcctcggtgttccgtgctgcttctcctcttgctggtgacggcgtcgcgggggcttaacatcggcgacctgcttggcagcacgccggcgaaggaccagggatgtagccggacgtgcgaatcccagttttgcacaaacgactacctgaacacgatgtgcaacgagaacctgctgagctgcatcgaccgggtgagcggggcgacgttcccggggaacaagtgcaacgtcggccagacggcgtccgtcatcaggggggtcatcgagacggccgtgttcgccggcaagatcctccacaagcgcgacgacggccaatag

SEQ ID NO: 47503 - DNA, 901 bp, Oryza sativa
  Clone ID: PAT_MRT4530_50265C.1
cacctctccacccgtttctttctcggcccatccaacacgcgctcttgcttgaacgcgcaaagagaaacacgacgggcgaggcgagcgagatgaggttcttcctcaagctcgctcctcggtgttccgtgctgcttctcctcttgctggtgacggcgtcgcgggggcttaacatcggcgacctgcttggcagcacgccggcgaaggaccagggatgtagccggacgtgcgaatcccagttttgcacaattgcacctctgctgaggtacggcaagtactgcgggatcctctacagcgggtgccccggcgagaggccatgcgacgcgctcgacgcctgctgcatggtgcacgaccactgcgtcgacacccacaacgacgactacctgaacacgatgtgcaacgagaacctgctgagctgcatcgaccgggtgagcggggcgacgttcccggggaacaagtgcaacgtcggccagacggcgtccgtcatcaggggggtcatcgagacggccgtgttcgccggcaagatcctccacaagcgcgacgacggccaatagctagccaccacgtttcgcacatacacacgctgtacagtgaatcagtgatagtacaaagaagcctagaggtaataaaaccgcgcggcggcgtccaccggtggccgtggcgtggcggtgcggcaaccagaacgcggcatgcgcgcgcttgctggcagctggaccacctgtggttcgtaggcgtaggcattggacctcggttgttggtgcggcaatggcgttggccactggcgacggggaggagtaacattatgctctgttagtcaataagacggaacatgttacaaaaaaaaaaaagaaattattaaatggaacatggttggttattggtaaaaaaaaaaaaaaaaaaaaaa

SEQ ID NO: 47504 - DNA, 437 bp, Oryza sativa
  Clone ID: PAT_MRT4530_50266C.1
tgcatctaggtggttaaggctctaaggagagcctgtgccccttgtcagagacaggttcagaggagtgctaatgtttgtttttggcacttagtgctacctcctgtcatttctaacatagtgatggtaccccaaagaaggctttggaaatgccagacactgcctatgtatttcattcattaaccccaatggacccatagatatattttattgtcttgggtcggccactcatctagatgtccattgcttccccaatgtcactaccatggttaggtccaggatcactcctttctgctcccttccctccttccccacctctcttccctctctctgtgtgtacagagagaaaccttaatgctttttaatgtactattatcggacatggtgattgtaataataaagtagtactgtgacacttttaggacaaaaaaaaaaaaaaa

SEQ ID NO: 47505 - DNA, 480 bp, Oryza sativa
  Clone ID: PAT_MRT4530_50267C.1
atgggaacggtggagcaggcaagcgaggcgggcggcggcggaacgaagcgacagcgggtggagacctcggtgaggcgcggaacttggcacccgacgcagggctacatcgtcttcgatctccggcgaagggataagtccaatgttccgtcggcccaggcaattgtatcgtttacgtcggcgtcgttcgaggctgcatcaggtatcatcggggtttcagccggcggggagatcgtggctgtcgtgagggcggcgctgcggtggtcggccacaccccagcgtcgccaacggggttggggagtgaggagggccattgagactatggaatgtcgttgtcgcgagcaaccccgctcggtggcccaaccggcgaacatcttccaggagctcgcccatcgctgctccgcccttctccttatcgaattgtcacgcaagcgccacgtcaatgccatgtgggacgaggatctagtcaaaggagccatgtag

SEQ ID NO: 47506 - DNA, 338 bp, Oryza sativa
  Clone ID: PAT_MRT4530_50268C.1
cggacgcgtgggaccgacgtcgacgccgacgcagactcctcaagggtgctcccatcctctccttcgagctagcttactccttattcaaccatgggtaaggagaagacgcacataaacattgtggtcattggccacgtctactccggcaggtggaccaccacgggccatctgatctacaagctcgtaggtatccgcaagcgtgtgactgagaggttcgagaaggaagcctgttgagacgaacaagaggtccttcaaggacgccttggtgcttcgaaagctcaaggccgagcctgcgagacgtatccccagcgatctccccctgcgcgagtttcacacca

SEQ ID NO: 47507 - DNA, 243 bp, Oryza sativa
  Clone ID: PAT_MRT4530_50269C.1
aagccgccgcgccgctgccttgaagccgccgcgccgccgccttgaagccgccgcgccgcgccttgcgtaactatagaacccgagggagttgcggatccaagcgaaggccaagacccgcaagactttgagcaaggcaagtcatcactattctttgaacatgttgatcccaatcgcgaaattgttttgtttataaataaaattgcatgcaattatgaacatcctacttgtgattataccatgcct

SEQ ID NO: 47508 - DNA, 494 bp, Oryza sativa
  Clone ID: PAT_MRT4530_5026C.1
cattccgaaagaaagcaacaagcagttaaaaccccaaaaccaaagcaaactcagggggggggaacatcccggacaaaaaacaccaaacacgggagggagggaaaaagggcttctcgactcgagagagccacgggacacaaaaacgactcgactcgaggaaaaaaggattctgacccggatagctaaggaaaacgggccacgaggggccccaccaatcagttcctccagttcccgccggagcccccgccgaacccgccgccacggttgccaccgaagccgccgccgccgccgccacggccgccgccgaagccgccgccgccaccgaacccgccctcacggggcccgaagccgccgccgccacctcctcggtagccgccgcctccacgaccgccgccgtagccgccaccgccgccgcggaagcccccgcctccgccgccggagcgggggaacggggcctcattgacggggaggttggggccgccgggctccttgcc

SEQ ID NO: 47509 - DNA, 813 bp, Oryza sativa
  Clone ID: PAT_MRT4530_50270C.1
atgggcgggcggtcggaagccgtggcggtggcggcggggacggcggtcggaagcggcggcggtggcggcagcggtggcagtggcggtggcgacgacggtcgggagcggagaaggaggaggcggcggtggtcgggagcggtggttgggacggcagtggcggtggggacagctgaaacagcagacggcgcctgcggtggtcatggagtggagacggtagtggcggcggtgtggaagcagcaacagcagctggccgccccggcgagctccctccacagcgctcggccaccttgcgagctttctccccaacacgcggccgaccgcgcgcgacctcccagtgacatcctctccccgtgggcggcggtggtggcgagggaggcatcggacggcgacggtggcggcgaatcggaggggaaaacgtggcggtggcagcaggccggcgagatcctctccccatgggcggcggcagtgggggaggagctcgccaggcgccgggaggtctccactctcaaccgccatcccaaccgtcaccgccgccttctccgttctcgaccgctatcccaaccaccaccgccgccgcctccttcttcgctcccgaccgccatccccaccgccaccgccgccgcctccttctctgctcccgaccgccgttgccaccgccactgctcccgactgccgtcccaaccgccacagccgccgcctccgctgtcgcttccgaccgccgtccccagcgccaccgccacggcccaaagctatggcccaagtggcccaaagattgtgtccgccactaatggccacaccacaatcatggattag

SEQ ID NO: 47510 - DNA, 135 bp, Oryza sativa
  Clone ID: PAT_MRT4530_50271C.1
atgtcgcgagtggcggcgaagcctggcgacctcttctcgaaatttggaatgcctggtgatcatattagtttggaggaggtcgcggagtatgaaaatgtgataaccaaggagtttagaaggatagaaattctataa

SEQ ID NO: 47511 - DNA, 586 bp, Oryza sativa
  Clone ID: PAT_MRT4530_50272C.1
atggccggggacctcgcccggggagtgggcgacgacgatactggcgcagtcctgcccgccggctccgagacgaggcgctccatattcagctgggatgacaagttcgtcaaagcgcaagcattggtcaccaaggcactaaaacctatcctccttctgattcgttcttgttcatggaagctcccggccgatggtagtcacaccgagatgaagaccaacctagaccagttcatctgcaacctcatgcagcactccggcggcaatcgaaagatggggcagagaacgaagatgtctagaggttgtggggtgacacgtgtcgtagctgagtcggtcgacccaccctgcctaatgggtagatccgcccttgacgtgaccctggcgtccctcgtcctcgctgtgcacgtcgaccacctgatggcgacgagggcggcctcgctccagtgcgatggcggcggcggccgccggcgcagttcactgcgtccgctcggtcacaggtggactacatcctcggcgcttgacgacgacgacgacgcaggcgcagccggacctccctcatacgatgatgacgacacctcctgttgcatctacg

SEQ ID NO: 47512 - DNA, 387 bp, Oryza sativa
  Clone ID: PAT_MRT4530_50273C.1
aaactaataggcagaactgattctatgaggaatagatctttatggagcatgtggctaagattaaaatcatcctgcttcttgactgccaataagggtttcatcggggtttcagccggtgagttatcttgacgttgcatcggctcataaggattgcatccgattggtttctactggattatattgctatattatattatcatcagccgattgcctttatatcattatctacattgcacatatagctgattgcttaaaccctatcgctatcggctggatcaaactgactggcatgcccgcatctcaataacctttagacctgcactggagttaagcagatctcccaggccagtgtgttcgattttttcatcaacactatcagaagctagc

SEQ ID NO: 47513 - DNA, 1260 bp, Oryza sativa
  unsure (1)..(1260): unsure at all n locations
  Clone ID: PAT_MRT4530_50274C.1
acagtgcaattctatttgtctttatagctgaattaagcagtggttttatttttttcagtcacatcacttttttttcttacaagtggcatagtaatacttatagattacacagaaaatgattatagacacatatggagtgaattacaacttcagctgaactaattgtacaagccagtcatgggtcaacaatagaaacatgtaatgcatatttggaagtccgtcatcacatatatagggattccttccatcatatagacaagccgctctcaatatagcatctcggagtcttttctgttcagcttgtttgtaggggagggggctcggaggatggagagcacgatgtaggccggcatctttaggatcagatgactctgtgcactgtagggtatgtctgtgttatagacggtgacgtgtacagagaagataggcctattcattgtgcattcccacacaatcgctgggacacgatcacctccacaccgtcggtttcgcctccaggcccctacttcagtagcatacaaggaattgtagtgcacctcactcagaagcttaaccaaagctatacaaaaggaaccaagggaatgatcaaacaccactatttttcattgggatttaccaaacccatgcactaaatggccaatgccatgaaccataatgcagatgtttgccagtcaggaaattgctgcatctttgtccagatgtctatgactggatggttcaattctttagcaactgtcaggcatgcctgtgcataagtgccagtagcctcattggttctttcaggtagttttgaagggtcatcttctcccatacatgtcccttgaagtaggcgcagatggcgcggaggttgctctggtactcgtcgagcggcacgtgctggtgcacctgcttccaatccggcagcgacgtgtcgttggcgcccaagaacaccgtgacagccaccgggtctgccgncccccacggcggncggcacccctccatcgccctcgccagcacccgcagcgcccaccgcgtgttgtagccgctgaacccgcgcagcaccacgtcggcctttccaagaaacgatgacgtacgcatgtcgggatgggacggcggccggagaggagggggtaaggagggagggtatcagatccacgcagatcggatgcacttcgcggggaatcgatcgggaggaagcagaaggatcggacccgggacgggggaagcacggatttggaagggctgcgggagagaagggtgagcgccgatccggacgcgtgg

SEQ ID NO: 47514 - DNA, 717 bp, Oryza sativa
  Clone ID: PAT_MRT4530_50275C.1
tcagatttcaaaggctttcaaagggtcctttgggtcgatatcatggaagagaggaagatctggttgaagactcccttggctgaaaccaatgctttccagtgtctccagcacacagtcaaacaaaattttgtttcccaatggggtgaagtgcagtccatcacataatgcagatgtttgccagtcaggaaattgctgcatctttgtccagatgtctatgactggatggttcaattctttagcaactgtcaggcatgcctgtgcataagtgccagcagcttcattggttctttcaggtagttttgaagggtcatcttctccatacatgtcccggattctcgccggttcatagattggtggaggcgtgatgagtataattttagtggagggccattgctccttgaagtaggcgcagatggagcggaggttgctctggtactcgtcgagcggcacgtgctggtgcacctgcttccgttccggcagcgacgcgtcgttggcgccgaagaacaccgtgacggccgccgggtccgcggcggcggccgcgccctccatcgccctcgccagcacccgcagcgcccaccgcgtgttgtagccgctgaacccgcgcagcaccacgtcggccttgcgggcgaagtggtcggcgagggcggcgccccagccgccgtcggcgaaggagagctcggtgatggagtcgccgaagagcaccagccgcggcctcat

SEQ ID NO: 47515 - DNA, 1101 bp, Oryza sativa
  Clone ID: PAT_MRT4530_50276C.1
atggcgatgggtcgatgggatgcgtcgattcaggtcgaagttaatatgtgcagtcatgagaccttaccaattcttattggtggtgattttaatattcttcgtagccctaatgagaaaaataatgataattttgatgatatatggcccttcttgtttaattctattatcgatgggttgtgtctaagggagttacaaatgtctggtaggaatttcacttgggctaacaatttagcaaacccaacctatgagaagctggataggattttagtgtcaacagagtgggagcaaaagttttctttatcttctgttgttgctcttaatagagatatttcggatcatactcctttgcttttaaatacaaaatcttcttcgtgtactaatgctcagcatagttttaaatttgaactcggttggcttatacgtgatggttttgttgatatggatggtgatcaattaataagtggtgatgccaatttaaagtcgaatattaccacttattataaaggtctttttggacctcctcatgattctgatcttcagttagatgagaataatgttgctgacattccccaagtctctcatttggtgaatgaagctttaactaaggaattttctgaaaatgaggttaaggagactattttccaaatggagcacaacaaagcaccgggtctagatggatttcctgattttcatgctgggaatttgcttttatattctcttaactttggtactattattcttttgcttaagtgcgtagaggctatgaaaattcaacaatatagacctatatgcttacttaatgttagctttaagatttttaccaaagttgctactaagagaattatgggtgttgctcaaaagagggctaaagagactggacttctgaatggggtaattcctcatctggttgatgatggaagctttctaataaagattggaaaggtattgaagaaagaattaagaaaaagcttagtagttggaaaggcaatcatttgtctgttggagatagaattttcatcagaatggtcattttcagggcaacccactggctccgaacgtgagcacagctacaaaggtgtgatgaagataaggagtgcctga

SEQ ID NO: 47516 - DNA, 428 bp, Oryza sativa
  Clone ID: PAT_MRT4530_50277C.1
ttttttttttttttttttttttttttttttttttttttttttttttttttttttttttttttttccccccaaaaaacacacttttccatttttttttaaaggggaacagaacaaaatttcattccagatttagacagatggtatatgatttttcggacccctgggctgaaggctgactaaagaggggcaacttttgggggggtttttgaaaggcacccaattaacaaatttacctcatttttttggacagggtcccaaaagccctgctagagggggggggcacacaaaattttttaaaacactgacaataatgggccaatttggagggggggaatcttttttgggggttttttcctcccgggaatccgacaagggctcacaacattggcagggcctgggggccccactttcccaagggggcccttttc

SEQ ID NO: 47517 - DNA, 338 bp, Oryza sativa
  unsure (1)..(338): unsure at all n locations
  Clone ID: PAT_MRT4530_50278C.1
ttgattcggcctctctctctccgcgcgcgcanagcangcagccgccgatggacctccccctggtggacctcgcgccgtacctcgancgcgccgtcgccgggggcggcgcggcgggggaggaggcggtgcgcgcgctgtggancgngtaagcgccanntgcgggacacgggggcgctgctggtnaaggacccgcgctgccccgccgccgacaacnaccgtttcctcgacgtcgtgagccactactttngcccgattccgccgacttcaagtgcctccaggagcgccccaaacttcactataaggttggttttnaaaacttaaaggcgttgaaggtacct

SEQ ID NO: 47518 - DNA, 645 bp, Oryza sativa
  unsure (1)..(645): unsure at all n locations
  Clone ID: PAT_MRT4530_50279C.1
agtatatggactaaattcccacgtacccactctggaataaccacactgtttaccgatgacaatggaaagagtaactaggtccatacggatacgtcacggtggatacaagacttcggctgccaccactccaacggacactggctcaacccacgagcgctatcattactccgacgagagaacaagtagggcctctcgattttagatgagactcaatatccctactagtacaaggatcatgacggacccgctcttaggatcccgccggacatgccgtctggactgctcccaacatgtcctactggaaggtgacaatctcctctcgtgcgtccatcctctcactctgtctctcgtcntcaatcntcntcnatgacatcggantttngacgttttaagttcctccntgttccttnaactcatcctccnanngnggtcccccctgngnncgccccncccccnattctccgccccacgcttnttttttccnacaaagcctgttgacctgctacacaggaccttgnntttcgcctaggnatccnctcccccgcngcntctaaacgaaaaatnttcccgggtncccttacncctcnngnccctgattaatnaggacccctggtgtggggtgncgctcccnttcctgggaggncc

SEQ ID NO: 47519 - DNA, 395 bp, Oryza sativa
  Clone ID: PAT_MRT4530_5027C.1
aaccaaacccgggcggggggaatacctttggtaaaccaaaccggtgggagaagattgcctttcgcttaacaaagcgagaggggggcaatcccaggcaccacaccccaccggggcgtggcccaacccgggaagaccgggacccgggggggggcccgacaattctataaagaggacgggtgagagaatggcgtaacctggaaaggggcgcgttctgggcgggaggaaaattcgctcaaaattgcacaccgcataaaatacgggaccataaagaagtaggacaagggtgggttcagaaagaaaaaacctaaaagacttggggcgcggtgagcggcctgtcctcaattaaaaaacctggcgctcccgcgacggtaaaaaaacggaaaacgccgggggcg

SEQ ID NO: 47520 - DNA, 264 bp, Oryza sativa
  Clone ID: PAT_MRT4530_50280C.1
atggcttatcacaatgcagagctactagtgaaattggaaacaaacgatgagcttatgagccagaaagaagcaaaactgtccggcctgaagcagaagctaggagtaactcttatcaagaagcatcaccgttggggccaatcagagtggatatgtattttgcaacgagggaggggaggcccccgcacgggaggattgcatttcgtacgacggagcgacgtggacgcgaacgtttccccgcaagattcgattgctcgtcgacagtga

SEQ ID NO: 47521 - DNA, 1845 bp, Oryza sativa
  Clone ID: PAT_MRT4530_50281C.1
atgccgctcctccacgcggccaacctccgcgtcctcctcgccggcgccgccttcgcgcacctctcctcccccgccgccaccgcgcgcgcctcctccccgtccgcccctccccctccggctcccccgccgccgccgcgcgtccgggccttcgcctcctaccgcgcctcgccgcctcccccgccgccgccccaaccatcctcgccgtcgccatcccgcgccctcgcctccgcggccgccgcgtgcgagcagggggcgaagcccgcgatctgcacggcggatgagctgcactacgtgcccgtgcccggcacagagtggcggctcgcgctctggcggtaccgcccgccgcctgaggcgcccaagaggaatcacccgctgatgctgctctcgggagtggccaccaatgcgattggatttgacctgtctcctggggcttcatttgcacgtcatatgtccatgcaagggtttgatacatggattgtcgaagtgcgtggtgcaggcctgagcatgcgtggatctgaactagctgtagctgacaccacatctgacatgtctcgaagttctgcattggatgagattactacacagaaattaaatggcgctggacctgccaaggatgattccacttgtctagctcaaaatttcgaagttccagtagtagaagataaatttgaagttccagtagtagaagataaggatgtaatagagagtaatgcattagaagaaccacagctggtgacaaagttatcaaatactttggcacgattgggtgatacattctcaggttatgtaaaagatagtcgactgagaagtatcgctgatggcttttttaatcaagtgtcagaacttgttcctgatgcctcattaactagtagtcttgaggaagtctcagaaaaaattttgggcttactggaattgccacaaacatcagcaatatcagatcaaataagccatttaagtctacgtcttgtgaatattcttggggaaggtcaacagaatatatcacctcggctatttggttggcaagaacgcctgtctgcaacaatagaagatctacagaaacaattggagctcattattagctatgattgggactttgaccattatttggaggaggatgtacctgccgcgatgaattatattaaacagcaaagcccaacaaaggatggcaaactgcttgccattggtcattcaatggggggaatattattatatgcaatggtttcaaagtgtggatgtgaaggtgctgagccagagctggtagcaattgttactttggcctcatcagttgactacacaacatctaactcatcactcaagttgctattgcctcttgcagacccagctgagatgttacgtgttcctgctatccctgtaggaacattactgtctaccacttaccctatatcgtctcgtgcaccctatattctgtcattgctgcgctctcaaatttcatcaaaggacatgatggatcctgatctgctttcgaagcttgtcttgaataacttctgcacggtgccagcaaaggttttactacagctgacaactgcattccgtgatggtgggctgcgcaacagggctggtacctttttcttcaagcagcatctgcacaaaatcaaagtgccaatacttgcccttgctggagatgaggatctgatttgccccccggaagctgtttatgaaacggtgaagttaattcctcagcatttggtgacatataaggtttttggaaagcccgaaggccctcattatgcgcattatgacttggttggagggcgaaaggctgtccacgaagtgtacccttgtataatagagttcctctcccagcatgatgaagtgtcttcctaa

SEQ ID NO: 47522 - DNA, 381 bp, Oryza sativa
  Clone ID: PAT_MRT4530_50282C.1
atggccgacgacggcggctatggaagggctcatcggcacgcgacgaacggcgggctccgatggcggaattcgacggaggaggggtggacgaggtggccctcggtggtgcgaacccgaagacgacgacgacgcggctcggcggcggcgctagcggcggcgagcggcggccggaggagtggaaaaggcggcggcggcgggtgtagcagcgcgggagcgatagagggcacgagagggagcggtggaaagaggaaaaaggtggaggggagtgcggggaagctttattggggctcgggagtggcggacgtggccggggtgctcccgatttcgccggcgacgtgggaggtcgagagagagagagagtgggaggggattcaaaattga

SEQ ID NO: 47523 - DNA, 494 bp, Oryza sativa
  Clone ID: PAT_MRT4530_50283C.1
gcaaatttgctgctttttaataatggaataaatatccccaccgctgcactttaaggatgcagcaaaaaaaaaaaaaaaaaaaaaaaaaaaaaaaaaaaaaaaaaaaaaaaaaaaaaaaaaaaaaaaaaaaaaaaaaaaaaaaaaaaaaaaaaaaaaaaaaaaaaaaaaaaaaaaaaaaaaaaaaaaaaaaaaaagaaaaaaaaaaaaagggggggggggttttaagggatcaaggttaactgccggggggtgggaaagaaaaaattttttttagggggaacttaaaaaaaattaaggggggggggttaaaaacggtggggggggggaaacccttggggttcccaatttaaatggcttggaagaaaatccctttttcccaagttggggtaaaacgaaaagggccgttacattttgtcttttcaaaagttgggaaagccgaatagggaaaggggaacccccttttttggggccttaaggcgggggggggggggggg

SEQ ID NO: 47524 - DNA, 2253 bp, Oryza sativa
  Clone ID: PAT_MRT4530_50284C.1
ggggagtttgctgtctgacacaatttctaactgagtttgttgtttttttttttcaagtactatcgacatgtgagctacaaaatcatcctaaagattgaataatatagctagtggtaatgtgaaaaaaatgagataaaaggtggactggtgtctggtggagtactcgagtatcttccccgtcccctcccttgccgcacgaggacgagaaatctcccgtctctcagtcgtctcccccgcttccttgcgccaagacgagtcgcggctgagcaggagaggggcgccgatctccatccggcgagcagagcaggggaggggatcctggtatagattgttgattgcttgtgcgtgaacacaactaaagcagtaattcttaccgtgtcagcgtgatctgggactgtggccaattgtaccataagtggaaacacagctgcgaagattgtcggtggtcttcgctgataatatattgggcaggctaagtttcaagttcagtttgctgaattcagcgagcctagatgtcgtttcgcagcattgttcgtgatgttagggatagttttggtagcctgtcgaggcgaagctttgaggtcaccctggctggtctatcggggcttaccggccaccatagaggcaagtctcagagtacggttcacgagctctgtgatgcagatctcataatccaggagagtcgttgggctagcctccctcctgagctcctccgcgatgtgatccggaggctggaggctagtgagagcacctggccgtcacgcaaggatgtcgtgtcctgtgctgccgtctgtaaggcatggagggagatgtgtaaagagattgtgctgagcccggagttttgcgggaagcttaccttcccgctctctctaaagcagcctggccctcgagatggaatgattcaatgtttcataaagcgggataaatctaaatcaacttatcatctctacttgtgcctgagtactgctgtacttgcggatagtggcaagttcctcttgtccgctaaaaggcaccgcaaaacaacctgcacagaatatgttatctcaatggatgcagacaacatttcaagatcaagcagcacctatattggaaaactaaggtcaaacttccttggcacaaaatttataatctatgacacacagccctcttataatggggctgtaatccctcctgttggacggagcagccgaagattcaactccaagaaagtgtctcctaagatgccgtctggtagttataacatagctcaggtgacatatgagcttaatgttcttggcaccaggggccctaggcggatgcactgtgtcatgcactccatacctgcctcctcagtcgagcctggtggcattgtccctggccagcccgagcagattgttccccgagctttcgaggagtcatttcgcagcaccacctccttttctaagtcatccatcatggatcggtccatggatttcagtagttcccgtgatttcagcagtgctcgcttttcagacattgctggaggcaccataaatggtgatgaagaggggcaaaataaggagaggccactagtgcttcgcaacaaggcccctaggtggcatgagcagctccaatgctggtgccttaatttccgtgggcgtgtaaccattgcgtcggtaaagaatttccagttgattgctgcaccagcacagcctcccgcaggggctccaactccgtcacaacctgctccaccagagcaggacaagattattctacagtttggtaaggtagcaaaagatatgttcacaatggattaccgctatccgctctcaactttccaggcatttgcaatatgtttaagtagcttcgacacaaaactggcctgcgaatgagggaaacagtgagctctaatggaggcagaactggaaatgcaacagagagcaacttgagaaatgtaatgcccaagggctctagatcatgtttgcattttgttgtgtcgtcttggctgtatttctgcttgtagcctggaactggatttctcagcctgtatgtttcacctggtagcaccatgataggtttcctttgggacagcggttcatgcattgcatttttccatttgtgtggtgtacatgcggttccggatttaagctgaaaggatccgttcatgtctttgttaagctttgcatggatgccgtgttctggtaaagaaaagggaaagattcagtgcttccaaaaaaaaaaaaaaaaaaaaaaaacaagactagttctctctccccctctccagttccctcgtgc

SEQ ID NO: 47525 - DNA, 1747 bp, Oryza sativa
  Clone ID: PAT_MRT4530_50285C.1
caggtgatggctcagaacacgaaggaggcggacatcacggagcaggattcgctgcttctgacaaggaatttgctccgtattgctagatacaacatcagctacatcagaggtctattccctgagaagtacttcaatgataagtcggttccggcacaagagatgaagattaagaagctaattcccatggatgctgcgtcgaggaggttgattaattggatggaaaaaggtgtctatgacgcactacagaagaaatatctcaagacccttctcttctgcatatgtgagaaggaggaaggcccaatgatcgaggagtacgcattctcatttagctaccccaacatgagcggtgatgaagttgcaataaacttgagccgcacagagagcaagaaaaacagtgctacatttaagccaaatgcagcagaagtcactcctgatcagatgaggagctctgcttgtaagatgataagaacactggtttcacttatgaggaccttggaccaaattccagaggagaggaccattctaatgaagctgctatactacgatgatgtcacacctgaagattatgagccacccttttttaagtgttgtgctgacaacgaggccattaatatatggaacaagaaccccttgaagatggaagttggaaatgtcaatagcaagcatctcgtgttagctttgaaggtcaagagtgtccttgacccttgcgatgataacaatgtcaacagtgaagatgataatatgagcttggataatgagtctgaccaagataatgatttttctgacaatgaggtgacctaagagaccatataattgagcatttttgttaatgaaactcaagatcctgctcatgaggaagagctaacagctcaattaagagagtggatatgctcaagagacactgaaagtcttgaggtttcggacgtccttattaatttccctgacatatcaattgtaatgcctactgatattatggagaggttacttaaagacggtttattatccagggcaaaaaatgatagttattctgttaatagaactaaaaatagcaatggtgatctcatgtatatgaaggtgtatctctgtcgcttacccttggcaatatgaaggtcatcatgtcatttctcctcataaatatcgttgctacaggcactgtaccatgcacttccaatggattacgtgtcagtaggcaagcttcatggcaagctagatggggaggccagccagaacatggtttgtaagttaattgaaaaaaatggtgcaagacggatatgtcaagaattcagccaaccgaagactaggcaaagttgtcattcattctgaagtcaccaacagaaagctccttgagataaaaaggattctggaaatcaatatagctgactatagtactaacatgacattgtccaatatgtctctctttataggccatgaaatgagagatggctcaacgatgggttgcctccagtccgtcggatctgacctcacccgcacccgggagcttccggagccgcagcaaaacttgtccatgcagagcgagcagggagcttccacggtggataagggacccaagcaggactccaacaagccgcaaggggagccggtttcccttgccactcatacctagttgacaaaaccggacacgaggggaccgtgttcgcaaggggagcaggttgcccttgccactcatacccagttgacaaaaccggacacgaggggaccgtgttcgcaaggggagccggttgccctt

SEQ ID NO: 47526 - DNA, 2006 bp, Oryza sativa
  Clone ID: PAT_MRT4530_50286C.1
atggtgggttctcgcttcgatttcgcgttgcgcttgctggtgatggctcagaagacgaaggaggcggagatcacggagcaggattcgctgcttctgattttaaccgatttctcgtgcggatttaggcgtgtttggagcatgagtcctgggatttttgtttcacttcctctggtgctctccgcccgttcaaaagcttctgggtatctcagattggagttggtttctggtgtgtgtttgaatgggactggtaccctatttgattcaacatgtgctaaaacaaggaatttgctccgcattgctatatacaacatcagctacatcagaggtctattccctgagaagtacttcaatgataagtcggttccggcactagagatgaagattaagaagctaatgcccatggatactgagtcgaggaggttgattgattggatggaaaaaggtgtctatgatgcactacagaagaaatatctcaagacccttctcttctgcatctgtgagaaggaggaaggcccaatgattgaggagtatgcattctcatttagctaccccaacacgagcggtgatgaagttgcaatgaacttgagccgcacagggagcaagaaaaacagtgctacatttaaatcaaatgcagcagaagtcactcctgatcagatgaggagctctgcttgtaagatgataagaacactggtttcacttatgaggaccttggaccaaatgccagaggagaggaccattctaatgaagctgctatactacgatgatgtcacacctgaagattacgagccacccttttttaagtgttgcgctgacaacgaggccataaatatatggaacaagaaccccttgaagatggaagttggaaatgtcaatagcaagcatctcgtgttagctttgaaggtcaagagtgtccttgacccttgtgatgataacaatgtcaacagtgaagatgataatatgagcttggataatgaatctgaccaagataatgatttttctgacactgaggttcgcccatctgaagcagagcgttacattgttgctccaaatgatgggacttgcaaaggtcaaaatggtacaatctcagaagatgatactcaagatcctgttcacgaggaagagctaacagctcaagtaagagagtggatatgctcaagagacactgaaagtcttgaggtttcagatgtccttgttaatttccccgacatatcaatggaaatggttgaagatattatggagaggctacttaaagatggtttactatccagagcaaaaaaggatagttattctgttaataaggcactgtaccatgcacttccaatggattacgtgtcagtaggcaagcttcatggcaagctagatggggaggccagccagaacatggttcgcaaagctgtcattcattctgaagtcaccaacagaaagctccttgagataaaaaggattctggaagtcgatatagccgaacaaatggccattgataccaatgctgaacctggcgagcctgagcgcaaagacaccacctgagtggccatgaaatgagagatggatcgacgatgggttgcctccagtccgtcggatctgacctcacccgcacccgggagcttccggagccgcagcagaacgtgtccatgcagagcgggcaggaagcttccacggtggataaggatccaagcaggactcctacaagcgtgcgcgagcaggcgtccgtttgttccctggagagtggggttctcgggcagaaggtcagaaagtctttggctggtgctggcgggacgcagtgctcgcaggacaagcgattcaggaaggccagcacggtgaaggagccgatcctccagtacgtcaagcgccagaagtcccaagttcaagttcaagttcactcgtcactgcagccagctgagccccgtgtctctcgacgcaacagtgaaggagacagcaggggcggcttggctgccgtgccgtatggcggaagcctcccgaggggaccgcggctcctctccgcctga

SEQ ID NO: 47527 - DNA, 334 bp, Oryza sativa
  Clone ID: PAT_MRT4530_50287C.1
ctttgttgttcctactgggtggaaattttttggcaatgggagggatgcttgaatgtgctcaatatgtggtgaacaaagcttcggcactgggtctgaccacattcgtgagaaagatggcatctgggctgtgcttgcatggctttctattattgctttcaagaataaggacatccttggaggagataagcttgtcactgtatgaagatattgcccggcagcactggtccacatatggtcgccatgattacacacgcctatgactatgaaaatgcctatgctggggctgctaaggagtctatggtgatcctagaaagcatgcgaggatcactttctg

SEQ ID NO: 47528 - DNA, 1349 bp, Oryza sativa
  Clone ID: PAT_MRT4530_50288C.1
aacagctcaagtaagagagtggatatgctcaagagacactgaaagtcttgaggtttcagatgtccttgttaatttccccgacatatcaatggaaatggttgaaggtagtggtgtgaaaaacttatgtgtgcttaccaggcattctttcttcactctcactaaagccttgaaatacttgactaatgactcacttttcagatattatggagaggctacttaaagatggtttactatccagagcaaaaaaggatagttattctgttaataaggtcaaccaaacattttcttcatgtgctatattttagttttaccctgtggcatattgtactgtccatcactagcatcatagagtggcttcagattgctgatcctacaacaccacacataaagaaagaggtcatcatgcaaaatgtctcacctactgaaggaactaaaaatagcaatggtgatctgatgtatatgaaggcactgtaccatgcacttccaatggattatgtgtcagtaggcaaacttcatggcaagctagatggggaggccagccagaacatggttcgtaagttgattgaaaaaatggtgcaagacggatatgtcaagaattcagccaaccgaagactaggcaaagctgtcattcattctgaagtcaccaacagaaagctccttgagataaaaaagattctggaagtcgatatagccgaacaaatggccattgataccaatgcagaacctggtgagcctgagcgcaaagacccacctgagtggccatgaaatgagagatggatcgacgatgggttgcctccagtccgtcggatctgacctcacccgcacccgggagcttccggagccgcagcagaacgtgtccatgcagagcgggcaggaagcttccacggtggataaggatccaagcaggactcctacaagcgtgcgcgaggcgtccgtttgttccctggagagtggggttctcgggcagaaggtcagaaagtctttggctggtgctggcgggacgcagtgctcgcaggacaagcgattcaggaaggccagcacggtgaaggagccgatcctccagtacgtcaagcgccagaagtcccaagttcaagttcaagttcagtgagggttcgtgtcgcaagcgtcaggagcaactaacatcgtagttcaggtgcagaagaccacaagtagatatatccatcctattcctagttccggtgctcaagtttgtgcagatagtcagagagcactcacgcacacgtagatatctgtccatgccgctgtcccaaatggcaaatggagatagacgctactatgtgctaacacacactcaaattaagcattcaaaacgcatctcacgtttgttg

SEQ ID NO: 47529 - DNA, 346 bp, Oryza sativa
  Clone ID: PAT_MRT4530_50289C.1
ggcgaggaaggtgctgcgggcgacgcagatggaggcggcgcgggcgaggctgcgggcgtcgggcgcgggcaccgtgccgtacgccgagttcctcggctctgctgcgacgccgcggcgcggagtcgggcctccgcgcgcgcgcgctgacagtcggatcgcatcgtctggaagacgcttctaggccgaaggtgcaagcacagaagcatacgatcagacgaccatgctgaggcacaggagatgagcagagccaagcaacacgacgacctcaggggggttgtggtgatctggcaacggtatagtaattgggttagggagacatgtagactcagtagcgtacttctcgcaa

SEQ ID NO: 47530 - DNA, 163 bp, Oryza sativa
  Clone ID: PAT_MRT4530_5028C.1
tcgtccacgcgtccgaccatgcgtacgcacacgcgtacggacagtaccaaatggcatgcattgactgtccatgcggctaacgatagactattaccttctctaccagagacaagtaagtgtgcgaagagtgagaactcagataatcctgatctgtatcactatg

SEQ ID NO: 47531 - DNA, 171 bp, Oryza sativa
  Clone ID: PAT_MRT4530_50290C.1
gagttcttcacgcatgaagaagccgtactgtactaccatcacccactccagcaaaaagctgtcaggatacaagatgcaaaggaccagaccaagcaaaaatgcattctcagcataggaaaatcataccatatcaagtacaaggagtgccctcagacggtctccaaaacttag

SEQ ID NO: 47532 - DNA, 520 bp, Oryza sativa
  Clone ID: PAT_MRT4530_50291C.1
ttgtttttttttttttttttgtttttttttttttttttttttttttttttttttttttttttttttttttttttttttggaaaaaaactttaaggggggcttaattcacattccacaaaaagggggcccccatcccccaattcatgggggaaacctagaaaaacaaacccaaaaggggcaaaggctttaaaccccatttcttggaaaaatttgcccccggcggtaaacaaccaaaagggcacccgcgtctcaaagtttcaacaaaaaaccctggcccagaccctggggggggggccttccgggtttccttaaccatagttaaaacggaacatggggttctgcccaaaaaaggtgcccccagggggaagcagctggaacatctgggaaaacctgggggggggctcgccggggcccgggcggggggacccggaaaccaaaaccagcatgcccccctggggcccccacgggtggcaacccacggggttgaagccggggggcactcccccaaggggggggagcc

SEQ ID NO: 47533 - DNA, 310 bp, Oryza sativa
  unsure (1)..(310): unsure at all n locations
  Clone ID: PAT_MRT4530_50292C.1
ggacgtgcntttcgaccgccaaaaaaaggggcaccaccaccaccaccaccaccgcatcgctccacgccaaaacgggagcggattcggcggtggcggtggcagtcgcagggaggggggggcatgtcgacgcggtccaagtcggtgccggtgcccgcggggggcggcgcggcgacggtgccgctcgccgtgctgctgcggcgggaggtggtcagcgagaagaccgcggcggaggccccgagctgcaggtcgggctcttcagccaggccaagaagggggaggactacaccttcctcaagcccgactncgagcg

SEQ ID NO: 47534 - DNA, 186 bp, Oryza sativa
  Clone ID: PAT_MRT4530_50293C.1
atggcggaggcagcggcagagctgacgaacgctttggaatatggaggggtggtgccgtgcaaggccgatttcagagttcagaagaggtgcagtgtgaaggaggtctctgccatgcccagcttcggcagaattggaaatgcaaactgctaccttctgaagaaaagagaagaacgaagagggggataa

SEQ ID NO: 47535 - DNA, 2367 bp, Oryza sativa
  Clone ID: PAT_MRT4530_50294C.1
atgattaagcaggaggtgtcagcatcggcacagaatcaacctggattcaatcctcaagttctgatgagacaacaacctcaacacatagggcagaacattcctagagtttctcctaaacaagttgcagctatgtttggccctaatcagtcagttgttcagccgatcttgcagacaccaacaaggcagcaagtaccaatcccacagcagcaacctgtcaatgcccaatttacccctgatcaacaagcttttatggccaatcagttgcctcaaagtcacataaggggtaataccaactaccaatttcaacctcattcacctcaaagctgggccaatttggaaaaacagtttcataaattcttctacagtgggattcatgagatgaaactatctgatctgacggcaatcaagcaaaaacatgaagaatctgtccaatattatattcaaaggttcagagatgtcagaaatagatgctatagtttggccttaacagactctcagctagctgatttggctttccagggcttattatcaccaatcaaggaaagattttcgcctcaagactttaagagtttggctcacttggctcagaaaatagcaacgcatgaacagaggttccaagaggccaagaaagcatttaaaaagattaagctccctgctggtcatgtgattccatcggctgatgaattaggaaagagaaaatattgcaagtggcataatacaggatctcacagtaccaatgaatgcaaagtttttagacagcagattcaattggccattgagctaaggttttgctggaatgaagggatgagactgccatcagaagaagttgctgaggaggttgcaaatccacaatggtgtccttctggtattttttccaagagtcagaagagaagggttcaaagaatgaggaacatggagcaatttcaagaaaatcaacaagatataggtcgacggctgaaaagagcaaaaacaaaacaagtttggcgtgttaaaagcaaagtggtgtcagccgatgagattaaagccgatgaagcagagagattggctaaaggaaaggctattgcttcttcatcggttaacatggtgtttgtgttacctgcagaatttggaattgatcaaaggcatgcagacatcatggaggaatcttgtgctcaaatgattttgtcaccagaacaagctatctttgagaagccagaagggacagagaatcggcactttaagccattgtgtgttaagggatttgttaatggcaagccgatgtctaaaatgttagttgatggtggagctgctgtaaatttgatgccatatgttacattcaagaaatcgggcaggagtgcagatgatctcatcaagactaagatggttcttaaggattttggtggcaatcatacagagactaaaggagttttgaacgtagagttgacagtcggtagcaagattgttcctaccacattttttgtcatcgatgggaagggttcatatagcctgctgcttggaagggactggattcatgctaattgttgtattccttcaaccatgcatcacagtttgattcaatggcaaggtgacaagattgaggtttctaatatagttctagttatcaagaaaaatggcaaacttagggtttgtattgacttcagagatttgaataaagctacatctaaggatgaatacccaatgccgattgccgatcagttggtagatgctgcttcagggcacaagattataagttttatcgatggcaatgctggatataatcaaatttttatggttgtaatgacttttggattaaaaagtgctggagctacatatcaaagagttatgaattacatttttcatgatttgatcggcttgttggtagaaatttatatcgatgatgtagtggtgaagtccaaggaagtcaaaggtcatatagctgatttgagaaaagtttttgagagaacaagaaaatatggcttgaagatgaagcccacaaagtgttcttttggtgtatcggctggacaatttttaggttttcttgtgcatgagaggggtattgaaatgccacaaaggagtattaatgctattcagaagatcaaacctccagaagacaagaaacaattgcaatctttgatcggcaagatgaattttattagaaggtttatttctaatttgtctgggagattagagccatttacatccttgctcagacttaaagccgatcaggaatttgcattgggggcagagcagcaaaaggccttggatagtattaaagaatatctaagttcccctccagttttaatttctccacaaaaaaggggtgcctttcaggttgtatctatcggccgatgtgaagtcaatcggctcaattttgactcaagagtttga

SEQ ID NO: 47536 - DNA, 706 bp, Oryza sativa
  unsure (1)..(706): unsure at all n locations
  Clone ID: PAT_MRT4530_50295C.1
ccacgcgtccggttatgtgtttgtgagtgaaggttgcctatggcttactgggatcagcagctcgattgcgtacaactggtcgaggcccaatatgaagactagcgtcaagatcatccatgcaaggtttgtgcctttgtctcatctatcttagcttcaggctcgtgtcttaccatgattaagaatacacggattattcatcttgagaacgctttgtaggcattgtgatttgtgaacattagcacaataagataaaaggattttgaaccttgccatgataattaaaaggtcgattgaacataatgtttgcacaatagaaaagtgattctgttgcacatgccttccagattgattctgagttatgaagtgacttgagcaacttcgatttcaactgaaaccagacagaattgctccaattgggtcatcgatgagcctgtaggaaggtttcaacgtatagtgtagcattgttcaacagactatagacagtttggctaccatttaccattgccagctgtagttgaatatggagctatggatccttcttttattccattggcatggtttggaagaactttacttccagttaattgtagagagtgtactttggttttttttattgggactacaagctagtgattattagcaggcagccggngaccactagagatatcaaaccacgtaggatattattatagtccacggggttcat

SEQ ID NO: 47537 - DNA, 681 bp, Oryza sativa
  Clone ID: PAT_MRT4530_50296C.1
atgtcgtcttggattctccccagctgcttcttcccccgccgctctgccgccgccatcgccgccgccgtcgtcccggtggcgactaaggaggagttgctcgagctggagaggcggctgtgggacatcgcccccgcggcggcgtacgagctgcagaagcggcggcactggacgccggagcaggtggcgcgggaggccgagaagaatcggtggatcgccgagaagaagcgccggatcgagaaggaatccaagcggcagcagcggaggaggaactccggcgactccgccgccgccaccaccaccgtcctcctcgacggcgctggcgtcaatcttgacaaggtgctcggcgaggacttcgagaggaagcggttctacgaggagatccggctgcaagccgagacccgccgccgtgccacgccggaggaagagccctccaccgccgcggtcgtcgtgacggaggaggacgacgaggagagcgacgacgacgacgtccccgcccgcggcgaggagggctacctcgagaggcgccgggaaatcctgggacgctactgcctcacgccggcgcacgatcccgcgggcagccgagcagacatcaagatcggcgaggaggatggaggcagctggtcgccgtttttgatcgctcgcaacctcggccgccggatcaccctccgggcggcggactga

SEQ ID NO: 47538 - DNA, 477 bp, Oryza sativa
  Clone ID: PAT_MRT4530_50297C.1
ttctgctaccacattttctacgaaggcttgcttaacaaacttcgacattggtgaactatggagccgaagcaactctgctctacccagatgttcagtacacccgcattaatgaattcctaaaacgctatctgtaacggagtatacaaaaattttataaatatttatgttggtttacggttaaaaaaaaaaaaaaaaaaaaaaaaaaaaaaaaaaaaaaaaaaaaaaaaaaaaaaaaaaaaaaaaaaaaaaaaaaaaaaaaaaaaaaaaaaaaaaaaaaaaaaaaaaaaaaaaaaaaaagggggggggggtttttttgaaaaaaaacatttttttgcagggggggggggggaaaaaaatttttttttttggggggcaaaaaaaaattaattgcgcgccccgttttaaaaagctggcgtggaaaaaaaaaggggtgcccccctaaattttcgctgggggaaaacacccttttttcccagg

SEQ ID NO: 47539 - DNA, 415 bp, Oryza sativa
  unsure (1)..(415): unsure at all n locations
  Clone ID: PAT_MRT4530_50298C.1
gcaaggtgaggaataatagttgatccatgcctattattccacggggacggggtcaccacggggaaaaaatcaccgcacggtgatcggggctggtgaaaatataccnccgtagtggttgacgggggtgggacggtgaaattttttcacggcggtgacggggacgcggatgtgacccccgaggtgaattcatcattgccatctctatttgcagggtatcctgttaaattatagtcaactgacagacccgagaaccaaatcatttttccagcttacatatcgtaactatcccagccttaagtcaaataagttgacagccncaatgcaacttagctctatctggaggatcaagagtatctcttacctaagactgtcaaataaattgatatcactcatggatgataaaaaaaaaaaaaaa

SEQ ID NO: 47540 - DNA, 1947 bp, Oryza sativa
  Clone ID: PAT_MRT4530_50299C.1
acgcgcgcttgtctctctttatatagtgtcacagtgtattgaggcagaaattgatccaaaccgaaaccaaaagtgaaaaaagaaagtaccaagacgaatataatcaacacaagagtacagtagtgtagcaatggcggcggcggcggccggcggcaagatcaagacggtggtggtgctggtgatggagaaccgctccttcgaccacatgctgggctggatgaagtctctcaacccggagatcgacggcgtcaccggcgacgagatcaaccacctcgacgccgccgacccgacctccagggccatccgcttcggcgacggcgccgagtacgtcgaccctgacccgggccactccatgcaggccatctacgagcaggtgtacggcacgccgttcgtcgacgcgcgcgccacgcccatcacccctcccggcgtcccctcgccgccgatggccggcttcgcgcagcaggcggagaaggagaagcccggcatggcggacaccgtcatgaacggcttccggccggaggccgtgccggtgtaccgcgagctggtgcggcagttcgccgtgtgcgaccgctggttcgcgtccaacccggcgtcgacgcagcccaaccggctgttcgtccactcagcgacgtcgcacgggctcgtcagcaacgacaccaagctgctcgtcgccggcctcccgcagcgcaccatctttgactccctccacgacgccggcttctccttcggcatctactaccagtacccgccgtccacgctcttctaccggagcttgcgccagctcaagtacgccggcaacttccaccccttcgacctcgcgttccggcggcactgcgccgagggcaagctccccaactacgtcgtcgtcgagcagcgctacttcgacctcaagatgctccccggcaacgacgaccacccctcgcacgacgtctccgagggccagcgattcgtcaaggaggtgtacgaggcgctgcgtggcgggccgcagtgggaggaggcgctcctcgtcgtcacctacgacgagcacggcggcttctacgaccacgtcccgacgccggtggacgtgcccagccccgacggcatcgtcagcgccgcgccattcttcttcgagttcaaccgcctcggcgtccgcgtcccggcgctcttcatctcgccgtggatcgagccgggcacggtggtgcaccggccgtcggggccgtacccgacgtcggagttcgagcactcctccatcccggccaccgtgaagaagctcttcaacctcaagagcttcctgaccaaccgcgacgcctgggcgggcaccttcgacgtcgtcctcacgcgcgacgcgccgcgcaccgactgccccgccaccctgccggagccggtgaagatgaggccggcgacggaggcggcggagcaggcggcgctgacggagttccaggaggagctggtgcagctgggggcggtgctcaacggcgaccacgccgacgaggacgtgtacccgcgcaagctggtggaggggatgacggtggcggaggcggccagctactgcaacgccgccttcaaggcatggatggacgagtgcgaccgctgcaggaagtgcggcgaggacgggtcccacatccccacggtggtgaagccgccgccgccgccgtcgacgtcgtcctcaggctctagctcctttgcttccaagttgctgtcttgctttgcgtgtggtcgtcctaacaagaattagtcagtgaagatggctgattaattgcttattcatttcgcttgttgattactgtatagattattaatttggttgtgcagggaggagtacagtactaaggccggattttacagagtgattatgggtggtgtgtagattattgatgtgatgattgtattacgaatgttggtttactgatcctgctgatctggccagaaaagaactctggaagttcagctcaatcagattcgtcatag

SEQ ID NO: 47541 - DNA, 697 bp, Oryza sativa
  unsure (1)..(697): unsure at all n locations
  Clone ID: PAT_MRT4530_5029C.1
cccaggaataatgttctggtttggcacggtttgtattataagcattgatacaacttgagttgagaatacatgccagaaaatcggcaaacaaataatatacggcacaaacctgacattatatatcatcaatgcataattgattatatcatacggctgaccattaacttgcaagataaaattgcactggaaagtggaaacaaatcgaatttcttcagtttcgtggccgtgggatgttgggcgttggcagccccccagcatatgctttggagatgtcctgcgagtctcggccatctagacatctagtgacatggatgctgacttgtcttggccacacagtgacgcggctgctgatgaagtgatgaggtgctcacctgctgccacgagattacgcgtggactgcgttggtgggctagatgtacatatatggtgcacagcaaacagcaaggttgaagggagcagcatcagcgatatccagcctccagtttccagcctccattccctcatcctcagccagccatccctgcgctgccacgtggcataaccatatctaaattcatgaaaccaccaccaagctttctcccgagcatcccatttgttatgacagatccccagaagcaatatgctgatgcagtgattgaagttctgccaacccagcttattcctgatgacaatgaaggaaagcgnacgcgtggggtcg

SEQ ID NO: 47542 - DNA, 519 bp, Oryza sativa
  Clone ID: PAT_MRT4530_502C.1
atggcttccatgtcggcttcggtttgtgtctcggggtcaaggttgacttgggcttgcgcagcggcgagcgcagttggggccactgccggctacgatggggcggcttggggcaccagcaattggcttgtcgaaaggatctccgtcctggtctggagtgccctcgccaccgcagccaccttcgccatgtcagccgcgttcggcacctgcacagaggcagtaggggccgaaggcggtagtgatggcgcaggtgcggaagcagatggcgctcctccatcttcggcgacaggcgccgaaggctctgctccctcttcggcggccatatccgtcccggcgtcgctttcctttcgcctcgtaaccttctccttcacaaccttcttcggtggcattcgctctcagtggtttcgctcggaggtccccacggtcggcgccagctgttgtcgaaacgacaaccgcatacgtcaaagacgtggtcacccaacagtggttggaaaagaagggaatttacatggttgcccttag

SEQ ID NO: 47543 - DNA, 585 bp, Oryza sativa
  Clone ID: PAT_MRT4530_50300C.1
actcaagaagaatattatattgaattcagagtaataaacaaaataaaagaaataggagaagattaccgacaactccggaattcttctgactcctactctactctcttcctattctaatatacaatatagtacaatagagcctcttataattcaggtcaagcttgaaagtgtgtgtgtgaaatgagggagtgaagcctttatatagagttaggtatgacggttggcgaaggggtaatgtctgaactgccccgcaaccgtcattggggagtgatctggagcgtccacgccaaaccccaggatcaacggtgatcaggggggttcggccgaacctaggctaggccctcctggtctagcccttggcccatcttctcccctggacctcctttatccatttctcggagttttgagttgattcactgatgtttcgatgaagttcataacccctccttgctgatgtttcgatgaagttcataacccctccttgcatggatacataattctcctcactttgtctgattttcctcccaaacttcagggtttatcatctgcatacaaatatacaccaacacttgtggaatatgtgag

SEQ ID NO: 47544 - DNA, 574 bp, Oryza sativa
  Clone ID: PAT_MRT4530_50301C.1
tttgaactactgtgaatagttcaaatttgttatgcttctattatgattgggtgcgtgtgtaattatagcttccacttcaaacttggccgagcttttaatctgatttaagtgaactatgcaaattgcctcaagctctaaattctaatgttgtttagtgcttatcacttctgaaatctggtgggctaacttgtatcaaacattcagattctgagtcacttgagatctttgtaaagtgatgggccagattgagactgatgtgaatgtttaaactaattgtagaacgctaattttttgcatcctgatttggctcagaagtattagctttctaggtcttcatgtagaattaggtgcacaatcagatcacactatcattgtttgtagacaaaaaaaattcaaactaatcctaaatgattaaacataatcatgttaggaccctatattgccattgatatgagttctggaggtggtttttggcctgataataacctttccactataatcgcctatgaacaggattaatttcataagataaccgatgaagttgttgagagtttgaatgaggagggcaatgtct

SEQ ID NO: 47545 - DNA, 788 bp, Oryza sativa
  Clone ID: PAT_MRT4530_50302C.1
tttttagctatagttacatcttttttcaccatatgcggcgctcagctgatgtgatgcaggagaaggcggcgccggacgggcccacttcgccgcccaacccacctggatcgccaccggcttgtccaccgccccctgcgaccccgccaggcaggcctacaccttcggcctccgcaccatggtctgcctccccctcgccaccggtgtcctcgagctcggttccaccgacgtcatcttccagaccggggatagcatccccaggatccgcgccctcttcaacctcagcgcagctgcttcctcctggcccccccaccccgacgccgccgccgatccctccgtgctctggctcaccgacgcgccccagcacgctcacggagaatcccagccgccaggctcagcagggccccttccgccgggagctcaacttctctgatttcgcgtccaacggcggtgccgcggcaccgcctttcttcatgccggagaccagcgagatcctaaacttcggcaacgacaacaccagtggtcggaggaatccgtccccggcgctctgccaccgcccgcacgccgccgctgcgtctctcccccacgcctccgccgaccagagtgcatctttggaaggaataaaagttatttacatggaaattaagaaaacaatgaaggggacaaggtacatgaaaataaaaagactaggagctaatctcgcaactgatgatggtccaagcaaccagagccacaatggtgtcaaatccccgtctatgttccttgcattgcttcatcgtgctgtcacatag

SEQ ID NO: 47546 - DNA, 2067 bp, Oryza sativa
  Clone ID: PAT_MRT4530_50303C.1
atggaggcgttcatggcctccgccgacctcccggccttcccgtggggggcggcctccaccccgccgccgccgccgccgccgcctcaccaccaccaccaacagcagcagcagcaggtcctgccgccgcctgcagcagctccggcggcggcggcgttcaaccaggacacgctgcagcagcggctgcagtcgatcatcgaggggtctcgggagacgtggacgtacgccatcttctggcagtcctccatcgacgtctccaccggcgcctccctcctcggctggggcgacggctactacaagggctgcgacgacgacaagcgcaagcagcgctcctccacccccgccgccgccgccgagcaggagcaccgcaagcgcgtcctccgcgagctcaactccctcatcgccggcgcaggcgccgcccccgacgaggccgtcgaggaggaggtcaccgacaccgagtggttcttcctcgtctccatgacccagtccttccccaacggcctcggcctccccggccaggccctcttcgccgcccagcccacctggatcgccaccggcttgtcctccgccccctgtgaccgcgccaggcaggcctacaccttcggcctccgcaccatggtctgcctccccctcgccaccggcgtcctcgagctcggctccaccgacgtcatcttccagaccggggacagcatccccaggatccgcgccctcttcaacctcagcgccgccgccgcctcctcctggcccccccaccccgacgccgcctccgccgatccctccgtgctctggctcgccgacgcgccccccatggacatgaaggactccatctccgccgcagacatctccgtctccaagccaccacccccgccgccgcaccagatccagcacttcgagaacgggagcaccagcacgctcacggagaatcccagcccgtcggtgcacgcgccgacgccctcgcagccggccgcgccgccccagcggcagcagcagcagcagcagagcagccaggctcagcagggccccttccgccgggagctcaacttctccgacttcgcgtccaacggcggcgccgcggccccgcctttcttcaagcccgagaccggcgagatcctaaacttcggcaacgacagcagcagtggccggaggaatccgtcgccggcgcccccggccgccaccgccagcctcaccaccgcgccggggagcctgttctcgcagcacacgccgacgctgacggcggcggcgaacgacgccaagagcaacaaccagaagaggtccatggaggccacctcccgcgccagcaacaccaacaaccacccggcggcgacggcgaacgaggggatgctgtccttctcgtcggcgccgacgacgcggccgtcgacggggacgggcgccccggccaagtcggagtcggaccactcggacctggaggcgtcggtgcgggaggtggagagcagccgcgtggtggcgccgccgccggaggcggagaagcggccgcggaagcgcgggcggaagccggcgaacgggcgggaggagccgctgaaccacgtggaggcggagcggcagcggcgggagaagctcaaccagcgcttctacgcgctgcgcgccgtggtgcccaacgtgtccaagatggacaaggcgtcgctgctgggcgacgccatctcctacatcaacgagctccgggggaagctcacggcgctggagacggacaaggagacgctgcagtcgcagatggagtcgctcaagaaggagcgggacgcgcggccgccggcgccgtcgggcggcggcggagacggcggggcgcggtgccacgcggtggagatcgaggccaagatccttgggctggaggccatgatccgcgtgcagtgccacaagcggaaccacccggcggcgcggctgatgacggcgctgcgggagctggacctggacgtgtaccatgccagcgtctccgtggtcaaggacctcatgatccagcaggtggccgtcaagatggccagccgcgtctactcgcaggaccagctcaacgccgcgctctacacccgcatcgccgagcctggcaccgccgcccggtaa

SEQ ID NO: 47547 - DNA, 502 bp, Oryza sativa
  Clone ID: PAT_MRT4530_50304C.1
aggacaacagagtgacagatcaccggttgaagatgaactttgaactcactggtttcctcatgggagatatcgagtcggctgtgcagtcctgttcttcaatggagcagaaggaactcctggaggagatggccacatctgtgggcgcacgaaggtatgatcagcgcgatcgatctgtctgcagtcctccttccacctgagtaccagaccatcagatagaaatcatccaatggacattgtgttgaaacgggtggtgatcaatggacaaatgtacatgaagaaatccgaagatacatatacatatgcttccgttgctcatgagcatgactaatgtcagaaaacacactgatgcattttcagttcctcttacagttacaaattttgagttagttggatatatgcaatgtgtacatctcaacagttggcatagctacaatatgcattatgcacaattcaacctggttaatagatgggaatgaattatggtgatttgtcaaaaaaaaaa

SEQ ID NO: 47548 - DNA, 993 bp, Oryza sativa
  Clone ID: PAT_MRT4530_50305C.1
atgtcgtacctgcagaagccatcctactacaccatctcgctcgtcgtcgtcctcctcctcccgttcaccatcctcttcgcgagcttcctcctccccttctccgcttacctgcgcggcccgccgccgatcgccgccggctccgtcgtggccggcggctgccgccatggcgcggcagacggtggcggcggcggcggcggtggtggtggtgttcgtccggagatcagcatcctcgtcggcgtgcacacgatggccaagaagcactcgcggcggcacctggtgcgcatggcgtacgcggtgcagcagacggcggcgctccgcggcgcggcgcgcgtggacgtccggttcgcgctgtgcgcgcggccgatgccgcaggagcaccgcgcgttcgtggcgctggaggcccgcgcctacggcgacgtgatgttgatcgactgcgacgagagccctgacaaggggaagacgtacgactacttcgccggcctgccggcgatgctgtcctccggcggcggcggcggcggcggtggcgaggggcggccgtacgactacgtgatgaaggtggacgacgacacgtacctccggctggacgagctggcggagacgctccggcgagcgccgagggaggacatgtactacggcgccgggctgccgttcctcgacaaggagtcgccgccgttcatgctcggcatgggctacgtgctgtcctgggatctcgtcgagtggatcgccggctccgacatggccaaagcgctagccataggtgcagaagatgtgacaacagggacatggctgaacatgggcaacaaggccaagaatagggtgaacattttccctaggatgtatgacttcaagggtgtcaagccagaggacttcttggaggacactattggtgtgcaccagctaaagcaagacctgagatgggcacaaaccttggagcacttcaatgtcacctgccttgatccctccagcaagatgaccaactcactactctcctag

SEQ ID NO: 47549 - DNA, 159 bp, Oryza sativa
  Clone ID: PAT_MRT4530_50306C.1
atgccacatggtcttggcgaggctgcagcctgcaggagtgaggctctgccaacctctgagatggctcagcagtcagcagcagcaaccagggaatccaatttcggacagcagacggcggcgctgcatatgctgcggtggtgccgcgctctcggcttttga

SEQ ID NO: 47550 - DNA, 201 bp, Oryza sativa
  Clone ID: PAT_MRT4530_50307C.1
atggcggatatgcacacgtacctgcgtcgcgactcgacgcgatcgagcgtgtggtggagggtgtccaactcttgcggcagaaggaggcattatattggtatctctaatatcgaaatccgtgcacaactcttgcaggggctcatgccacgtggctcaacaggtttcgccggaaagctctcctgcctggcgcttgcgaattga

SEQ ID NO: 47551 - DNA, 867 bp, Oryza sativa
  Clone ID: PAT_MRT4530_50308C.1
atggtgggcggcggcagggagaggaacggcggcgtcaggcagtacaaccgatccaaggtgccgcggctacgctggacgcctgacctgcaccactgcttcgtccatgccattcacaagctcggcggccaggacaaggctacaccgaagcgagttttgcagctgatgggagtgggaggactcaccatatctcatgtcaaaagccatcttcagatgtacaggaacatgaggaatgatcttggaatgcaagggatacaggtgcaacaggtggatcaggagcacacatatggaggtggtgtggaagtttggactgatatgcagcagtgtgatcatgatgagtgtgatgtcccttgctgcagctgccactccccaaagcctagaaaggagccactgcttcacctccaactgaaaagcagtggcatgaatattgacgaaccaggcacgcgcgcacgcattgccgcgcccaatgtacgcagctgcagggacgacgccgcagcatctgcgacggagacgcgacgacgacgtggtgggaggccggaggaggtagacgacgacgcgaacgcgagcacgagccccagaattagccagctgcagctgctgcgtctcagaggccatggaatacgtgagagcgacatgtcaccgtcgacgagcctgcagtgctactatgtacgcagccagaggacgacgacgatgccgccgggcgctgctgctgcagcagccggcggcgatggcggatcacagtgctacgccgcacctcggtacagctcttcctccaagctgaaattcttgggcctggtctcgtcgacgacgtcgtcgtcgtcgggaagccggatcagcctcgacttgtcgctctccacgcttgactcgtag

SEQ ID NO: 47552 - DNA, 411 bp, Oryza sativa
  Clone ID: PAT_MRT4530_50309C.1
ccacgaccgccggtggcagatgccgcggcaagaatgatctactgctgttgacggacgtctacagcagggtgctggagctgtcgtactcggcagacaccgacgtctcggagttcgaaggccacgacgcgtgacacttcgtgtggtccgccgatcacgtgctagctgtcgaggtgcgcgtgcgcaaccgaagaatccacccctatggtgctagtgtggtggtgcaggtcttgataggatgctgacacaagcacggcgaccactatgacatgaatctcgacaagctgaagtaccggctgctcaatgccaactgtcctgagatggatgtagtccattacttgaacggacagctctaaaatacagagcccaatgatctcggcggcggcgaaggtgacaacgacggcgcggaggatg

SEQ ID NO: 47553 - DNA, 336 bp, Oryza sativa
  Clone ID: PAT_MRT4530_5030C.1
gtaaactggttataacctcacagagtagacaactgcataccattctgctgtccgtaacataattatacgttggtacagaaccatgcttctatacatagtgcgctacaacacaccgcatctctacggtatgatctgtcgggattgtatgactgagatcagtacaacgcaccataccttagtgccggccacatcacctcactacgaggacgcgctgtggagaggctatctgcaggtatactcagattgcggactcttaatagcccagttcctgactcctctagtactgtttactcaaaagagtgaggaggctcacagtgctcccgtgtcgtctggcct

SEQ ID NO: 47554 - DNA, 295 bp, Oryza sativa
  unsure (1)..(295): unsure at all n locations
  Clone ID: PAT_MRT4530_50310C.1
ctcgttttatctatgtcccctaaanagtcattttttttaaaaaaaggaatgatgagatagattaatataaaatgtatcnctcaaacatgcaagttatcaactagttatcaacttntncaggttttaaaaaaaaaacaaatataactncgagngnncgataactattttcagtttaatttgttccttttgttgtaacttgtanaagtntaatttgagcttgtatgtttgtggagtaatatatttcatattaatctaaaaaaaaaaaaaaaaaaaaaaaaaaaaaaaaaaaaaaaaa

SEQ ID NO: 47555 - DNA, 1406 bp, Oryza sativa
  Clone ID: PAT_MRT4530_50311C.1
atggtgggcggcggcagggagaggaacggcggcgtcaggcagtacaaccgatccaaggtgccgcggctacgctggacgcctgacctgcaccactgcttcgtccatgccattcacaagctcggcggccaggacaaggctacaccgaagcgagttttgcagctgatgggagtgggaggactcaccatatctcatgtcaaaagccatcttcagatgtacaggaacatgaggaatgatcttggaatgcaagggatacaggtgcaacaggtggatcaggagcacacatatggaggtggtgtggaagtttggactgatatgcagcagtgtgatcatgatgagtgtgatgtcccttgctgcagctgccactccccaaagcctagaaaggagccactgcttcacctccaactgaaaagcagtggcatgaatattgacgaaccaggcacgcgcgcacgcattgccgcgcccaatgtacgcagctgcagggacgacgccgcagcatctgcgacggagacgcgacgacgacgtggtgggaggccggaggaggtagacgacgacgcgaacgcgagcacgagccccagaattagccagctgcagctgctgcgtctcagaggccatggaatacgtgagagcgacatgtcaccgtcgacgagcctgcagtgctactatgtacgcagccagaggacgacgacgatgccgccgggcgctgctgctgcagcagccggcggcgatggcggatcacagtgctacgccgcacctcggtacagctcttcctccaagctgaaattcttggggttcgtggtgacatcggggcctcctcctcctcgtcttcctcctcctgctgcctgctgctgcggcagcgatgacaacatcccttttcaggtcggcacgtttgccccacaccgcgtcgcgccgccaacggcgagctgcggcggcggcggcggcggcggccgcgcggaggcgcgcccctcgtcgtcgtatcgctcggtgtggttcgaaccggccgccgccgccgccgcgagcaacaacggcgtggcgccggacggcgagcacgacgacggctgctcgctctcgctctcgctggcgttggacacgggatgcgccggcgccggcggcagcctggtctcgtcgacgacgtcgtcgtcgtcgggaagccggatcagcctcgacttgtcgctctccacgcttgactcgtagagcgtgcgtgcgtgcgtggcagcgtgagatgtttgggcctttgtgggctttgtgggccgttttgtcgccttaactttcttcaatggaagcaaccaaggcaccaagcaacagcttagcctttttgaagtggcaaattcaagcttcagtaccgtaggtctgtggctagcttttatgagcccaaatttagtgggcatgttcttctccattctcttcat

SEQ ID NO: 47556 - DNA, 434 bp, Oryza sativa
  unsure (1)..(434): unsure at all n locations
  Clone ID: PAT_MRT4530_50312C.1
gtacaatcttattctttagcaaaatcaagatcattttctggcgtcagcgagcatccaaaaccaaagggtttttctcggcaacaaacaaataatagggttttgggataatatgaattgacctatcccccaaaaattccaattatttaatatgaataattaggaataattaggattaattaatgagtttacttttatgtgtcgaattcctcggtacaatattcttagaacaaacctctctgatatataaaaaaagggtttttggtatactgtgacctaaatattcttttcctatcaatgaacttttcgtaatagaatccgtataataaataaaaaaaggggattctattatgaaaagtagagtattcctgcaataagacttacaacttctacctatcttatcctatnggtnnggggngggggggggnnntttaaaa

SEQ ID NO: 47557 - DNA, 2375 bp, Oryza sativa
  Clone ID: PAT_MRT4530_50313C.1
gcagattaccactctctcctcttcccgatccccccaacacccaaaccctaaccctcgaagcgacgcaacccaccggcggcgatggggcagggcactcccggcgggatggggaagcagggcggcctccccggcgatcgcaagccgggcgacggcggcgccggcgacaagaaggaccgcaagttcgagccccccgccgcgccgtcccgcgtcggccggaagcagcggaagcagaaggggcccgaggcggcggcgcgcctgcccgccgtggcgccgctctccaagtgccgcctccgcttgctcaagctggagcgggtcaaggactacctcctcatggaggaggagttcgtcgtcagccaggagcggctgcgacccagcgaggacaagacggaggaggaccgatccaaggtcgatgacctccggggcacccccatgagcgttggctcgcttgaggagatcatcgatgagagccacgccatcgtctcgtcgtccgtcgggccggaatactatgttggcatattatcattcgtcgacaaggaccagctcgagccagggtgtgccattctgatgcataacaaggttctctctgtggttggaattttgcaagatgaggttgaccctatcttttctgtcatgaaagttgaaaaggcacctttcggagtcttatgcggacatcgggttgtctggatgcccaaattcaagatttcaaagaggctgttgagcttcccttgactcctcctgagctatatgaggacatttgaataaagcctcccaagggagtaatattatatgggcgaccgggcacaggcaaaactctacttgcaaaggcggttgctaattctacatcagcaacatttttgcgtgttgttgggagtgagttgatccaaaagtaccttggtgatggccccaagcttgtaagagaattgtttagggtggctgatgatctttctccgtcaattgtctttattgacgagattgatgctgtcggaacaaagaggtatgatgctcattcaggtggggagcgtgaaattcagagaactatgttggagttgcttaatcagctggatggttttgactcgcaggggagatgttaaaggttattttagcaacaaatcgcattgaaagtcttgacccagctttgcttcgacctggtcggatagacagaaagattgaatttccgttaccagatattaaaaccaggaggcggatcttccagatacacacatctaagatgacattggcagatgatgttaacctagaagagtttgtgatgaccaaggatgagttttctggtgctgacatcaaagcaatatgtacggaggccggattgctcgctttaagggagcgcagaatgaaggtgacacatgccgatttcaagaaggccaaagagaaggtcatgttcaagaagaaggaaggtgtaccggaagggctttatatgtgagacatccaccactcatcagcaccagaattacctccaggacacggttaagtgtaatagagaactggtagagctggtgtttggttcaatgttcggagaatgtttgcttacacccttcttattcagcaatgtcgaactaaagaaccccctgaacaatgtatggctaccaggaatgcatgcagttacggttcaatgttaaatgctttttgatcaaaaaaaaaaaaaaaaaaaaaaaaaaaaaaagcagttctgattatggaccggttgtcaaattgcactttttgattaaggcgaattaggtgatcagaaataattcaggaagtttcgctccatctaatgagggatttcagagacccccattctatgaagcccattttcatatgactctgaatctgagaaaaggacacattcatatcatttcgaggttggaataaaggagtcgcttttgtgaacaacttcaacattggaaggttctggccggccattggaccacaatgcgctctgtatgttcctgcgccgatcctcaaacctggagataatgtcattgtgatctttgaactgcatagtccaaaccctgagctcaccatcaagttagtgaaggatccagatttcacatgcggccagtgaagttggagcatagattattcccattcggtatgatttgtataggtttctgtggcattgtcgcccaattccggtgaaggaacatttccttctcttccgctgtgattccacaaaaatgacggaattctacagtgcatactattcacttaggtatatgcagtgcaggattagaaatgtggtaccaacaaaataaaagggatggcacatgatgacatgaacagcagatactgtaccaagtatcaaatcatgtataaatcaacattcagatcttgttagttctgcatttgagctaaaccatcaaaaaaaaaaaaaaaaa

SEQ ID NO: 47558 - DNA, 731 bp, Oryza sativa
  Clone ID: PAT_MRT4530_50314C.1
atggcggcgcggtggatgaggatgggaggaccagcatcatcaccgcatcacgtcctcgtcggcctccacgcccaacgccgcagcggccgcccatgcgggaccgcttcgccgccgccacctcggctcggcggcctcttcccagctaccgatcggcttgccaagagaagaatggattggcaggggcagaagctcgcggagatgctgatgcagctgctgctggtggcgtcggcggtggcggcgttcgtggtgggctacgccatggcggacttccagctcatgctgctcgtctacgccggcggggtcgtcctcaccgcgctcgtcaccgtcccgaactggcccttcttcaaccgccacccgctcaagtggctcgacgccgccgaggccgaccgccacccgcgcccgcaggtcagcgccaccccttccaccgtgggtaagaagaaggccggcaagaacaagtagtagccttcaggttcagggtagcagatgttcttgattgatcggttaatctgtggacacttgttcttatgatgatattataattgctcaacttttgattatggggatgctacatacttgtggtacatagcatgttgctgagaagtgagaattagcttgcttgctggtcacctgttatctgctttaattgcccagaaaatcggtatgtggtaatagtcttagacaagagcatgactgcatgagcttttgaactaattattgcaactgtgacattg

SEQ ID NO: 47559 - DNA, 176 bp, Oryza sativa
  Clone ID: PAT_MRT4530_50315C.1
gaagggggttcaaccggtggcaaggcggcagttaaaccggtggcgtgtgagcggttcgaccgggggcaacagaactacgtcgagatttccatcgatttgaggcccaagcggagacaaggccgtccgtcgaccgcggagcccggtggaggtcgatacgccgacggtcgccactggag

SEQ ID NO: 47560 - DNA, 1638 bp, Oryza sativa
  Clone ID: PAT_MRT4530_50316C.1
ctagtggatccccgggctgcaggtttttttttatgactgtaacagcagctaatcatgaattaaaacagttgtgcgtgtatgattgcaatggaaatgagacaacactgtagtctatcgtactgtcgtgtgtttcatttacaacggctgaaaaatttctcacatagccgcaaactttacagacaccattagcagcttgagctctccctataccccctctctggatgattatacagacatgatacaaattcctctccgataccatcttcaagcaatcacaaagtttaaaatatgaacaaaaaagggcttcaattctggaaaacatgtcaatattttgcttgaaccgtgttacattgttagcgtatcagggagtgaagttggagctccaagaatcttgccaccaacgtcaggaaagcattcgtgttctggcaatggaccaaccttaccgtcagcctctaccttgactgggtatttgaggaggtgcccttgtaacgttataagttgttctgcggtgaaccttctccagttctcttctgctatttcattgacataatttacacactccaaacttgatggatccttgaagaggtcatcaaccatcccaagatgctctgcccagagggaagttctatacccgtatacctgaccgcgaggatgacccccctttgtagaccatgtgtggtgaggctggtatgcgcccatggcaatttcagtatctctggaacagcccaaagatctttggttgatgtttgctgaccccagaataacatattcatcatctacaatcatcccctttgcatgaacatagatcataaaacgccggtattttctagccaaggccgctgcacttttatcgttagattcagggctgccatttgatgatgatgattcttctcgattgcccagacaatagaagttcaagtaatcttgagggtgtgcattcttaatattcatggccttgagctcttgtgcaattatacgatacatcatctccattgtctgtgcctgaaagaaaagaatttcttgtacagaagctgctgtagggactccttcaggccacatcggtatgactacataaactgcaaaccgttcaccagccctaatcttgcttgcaattttgagggccaattcaataggtaccagattgtcagcacctgaattaacataggacggccaagcatatgatgacccaaggaaatattgattttcaatataaatgaaatgctgggcggatctgattgcccggacataagcagtgtggatgctcttatcaattatcaggtccttccggcaaataagattctgctttgaagcttctttgcaatcactaggaaaccctttaagcgaaccagagtctattgaccggaatacctgaacatgccaattttcaggatcttcttcttttgaaacccgcaaactaatatcatcatttcggatagtgtgggaagggctaagtatccatgagatccgctccaactttatcagggcatcatctttccaatgagacacttttctaaatcgttcacgccatttcgttgcctttctccagcgttgctcaaaatttttcaagacgtcatatgcagctggaccatcaatcctacagtgaaggtcatgccatggttgtctaggccccccctttgc

SEQ ID NO: 47561 - DNA, 387 bp, Oryza sativa
  Clone ID: PAT_MRT4530_50317C.1
atgttcaaggaaatcaagaatttgtttaatatatttggctttgttcaaaagattgctaccattcagaagacatatggttatcagcacagtttcctgaacatcattgaggaattgaaaatgtacattcttaatcctgttactttattagaaaatgcttgctctgtcacctatacttatttcttcatgctcattatctgggatgaggtgttgatttctggatttgggcataagggccatgctgtgggagatattcgtggtgtccgattcgaggttgtcaagttctattcaaggagaagtcgaggtcttagatattcttggttagcaagctttgaatatattatacatgtctggatgggagtatgtttaagtagcgtttatgttccttaa

SEQ ID NO: 47562 - DNA, 199 bp, Oryza sativa
  unsure (1)..(199): unsure at all n locations
  Clone ID: PAT_MRT4530_50318C.1
ccctcgcgtaccattctcagagatcttgtgatgagcctggatacatggttggaatcattctaataggtaatgaacggagttggccttctgatcctgaaactgaattaatctgaacgccnatttcttccttttactctaactctgggcgtgaagctactcattanaactacatttncanntttcntactatcatccaacc

SEQ ID NO: 47563 - DNA, 329 bp, Oryza sativa
  Clone ID: PAT_MRT4530_50319C.1
cccacgcgtacgtcaatacgatacattgcatactaagtgtgatcatcctagagctctacttctagttttccttttttatttcataaaagagaatactactgagtagagctatactccagcgtacactacggtctcctactcatagctgatacccaagctactatccttgtatcggccactgagagggacaagagggcacttagcccggtactacttggggcacgacatgtcagagggcgtgacataacccaagtgtggacctaggggtgcgtggagttttttccggagtggtgtcctttacggggacgcatacgagggcggggcggatc

SEQ ID NO: 47564 - DNA, 4581 bp, Oryza sativa
  Clone ID: PAT_MRT4530_5031C.1
ctattggtagctggctgctcgaacggcaactcgttcacgatgttcctctagtagattcacatcgtcgtatcgctgctcctcctgaccctcatcggaataattctgtactcgtgtactttgatgtcgtagctcggtggggagcatggcctctgagccatacacgaggaagaagtgtgtctccttgttggacgttgtcggtgtggtacgcacggcccatagtaccgatggaagttcctcgacccacttcttgtcgtgtaacatgagcctgtcgtagacacgggtcttgattccttgtagtactatgttgtttccccgctcgacttgtccattgctctgagggtgagaaaccgtggcgaagcagatcttgactcccagcctgatgcagtaatcctggaaatcggcactgatgaactgggagccgttgtctgttatgatacggtggggcaatccgaatctgcagaatatccctttgatgaatttgatggcgttgtcggccttgatttccgctgtgggtatcgcttcaatccacttggtgaatttgtcgatcgccacgaataggaacctgtagccgccctgtcctcgtgggaaaggcccgagtatatctagcccccagcacaagaacggccaagtgagagggatagtctggagtgcttgcgctggcagctttgtgtgtttactgtcgaattgacaagcttcacaccgcggcggcatgtgacccacagatcccttcaattcatgtatgtcgaggaggaggtgtctgccgtcgtcggacgagacgcattttaggagtaccccgtttggtgccttcttgtatagatcattgccgatcatacagtagacttttgctttgcgggatattttctcagcttctgcgtcgtcctcgggcaactcttcgctgcttatgaatttaatgagtgaggtgcgccagtcgtccgtggtctcgatatcggcaacggcgcgctctgcctctgtagcccccgagctgatgtcgggggcgaccgggctatctttgccgcttgcctctttcactgatggcctcatcaggaagtccagaaaggtgccaggttcaagtggttctcgtctggacgcacgtcgtgctagatcatccggttcgatgttgtctttgcggtatacatgccggacctcgatctcatcaaaccttttctccagcttcctgacttctgcgagatacttggataactcggggttagaccatttataatctttgtgcacctggttcgcgactagttcggagtcccctttcacgatcaatcgcttgactccaagtgcagctacagctcttatcccggcgagtagtccttcgtactcggctgtgttattggttgccctgaagtttaggtggattgcatgcgcgtagagcagcttttgcatttgtggatatcttgtctttgcgtcgtggagagcttcgctaacgtagtagactggtcgttgtactttttctctctcgacaacaatgacggtgctaacggaatatggtgtggcggcaatatagaggaataattcttcattaggttggggagcaacaagtacaggtggatttgataggtagcgcttgagtgcaatgaatgcctcttcggcctcctgtgtccatacgaatttgtcttgctttttaagcagagcgaagaaaggttgtcctcgttctcccatcctagcgacgaacctgcttagtgccgccatgcatccgtttagcttttgtacttccttgagttttgtgggcaacttcatgttctcgattgccttgatcttctcgggatttgcttctattcctctgccagagacgaggaaaccgagcagcttgcccgacggtactccgaacgtgcacttctctggattgagcatgaggcgatattgtcggaggttgtcgaacgtttcccgcagatcgtcaatcaatgagttgcttgtcttagtcttgacaacaatgtcgtcgacgtaggcctcgacattatttccaagctggtcgctaagtgcaccctgtaccgtgcgctggaaagtattccctgcggttattagtctgaacggcatcttaacgtagcaaaataccccgaacggcgtgatgaatgttgtcttctcctcatcctcttttgccatgctgatttggtgggaaccggagtaagcgtcgaggaagctcaacaactcgcaaccggctgttgagtccaccaattggtctattcgagggagaggaaagtgatccttggggcacgccttgttgaggtcggtgaaatcgacatacattctccacttcccgttggccttccgtaccatgactgggttggcaagccactctggatggagtacctctctgatgaaaccggctttgagaagtttgtcgagctcttctcgtatggcttgttttcgatctggtgcaaatctccacagtttttgctttactggcttggcatcgggtcgcaccatgagtttgtgctcaatcaccaacctgggtacccccggcatgtcggacggttttttgggtggctcagtcgtggcgggtgggctaggcgtgtgctcgaccatgtcgaggctccgcttgtcgcattgtactgccagctttgcgttcccttgaatagtgattgttcccttcggttccggcatcttgagcacttgatacgcgtagtgagatgcggccatgaacttcgctagtgcagttctcccgatgatggcattatatgctgtatcaaattcagcgacatcaaaggtgatctgcaacatgatcttgcccaatggtttggacgaagactggggagtgattccatggaagggttgatcggtgggtgtcaactcgcttcgtgggattcccatcgcgtccaaggcgctggcgaagagaaggttgattgagctgccactgtcgatgagaactcgtgtgaccttgatattacgaatagtgggttcgaccacgatcggatatcgccctgggatgacagcagtcttagggtggtcctcttctgagaattctatcttctgctcggaccacttcatcttgggtgcagctccctgccacgtcgaacagacttcacgttccagtttcttgtattctcgctttgagcagtacgctgtagagcctccgaaaatgtgtgagacatggagatcggagtctgggtatgctgagtccgattcctgagtagccgcctccgcatccttctcgaccacgcgtactctcttgcctttttccaatgccatgtgcttctcgagcgactttttgaaaacaaggcaatcttccaaagaatgtctgtccgtcttgtgtatagggcaccatgctttcttcgcgtcgctactttgtgggtctgggcgcttgggagggttcgcgtattctgctgtgagaacttccgcttgaactttccttttcccactcttgcgatttttcttcttgcttgactcaggtgcgtccttggctggtttcttctcttctccggtcttcattttgtcgttcttgcgtcttagtgcgtcatccgcataagcgcatcggtcgacaattttgaataatctctgagtagtcgtgatgcgcctcgttgccaactcctgagtagtatagcgatctctgacaccggatttgaaagcgcgaattacagaagcgtctgtgatctcggggattgtgtttttgcacctgttaaagcgccgaacataatccctcaacgattcgccagagttctgtgtcaacgcatgtaggtcgtcttcaatcgcgtggcgcttgtaagttccttggaaattggctacgaattgctgccacaagtcattagcatcgccagttggtggctgttctgggtgcgctgcggcagtggcctcttcgaacgtgttgctgaggttcgtcactgattcccgtagtcgttctgtccaatgtgcgagatcgtcgttcagaacgggatcgtagagggtttccctcagtattgcgttgatggctctgatgtgctgggccggagtagtcacttgattccccgcttccgcattggtgtgcgctgacgtgccaacatcgtcaatagccaatacctcacgcggcgtgctcgttgtcgatgatccatagtcttcgagcaggtgcaagactgatggttcatagggatcgatgtcgattaccccaacaaatcgatccgaaattggcgtcgctccttgttccttgtctttatccctgatggggatgtgtgactgctggaccttaggagatgttgtcttcatggcgctgagaaaaaccttgcagctcgagaggtcgtgattctttgtcttgtgaataggacaatagacatcacgagttggagaggtacgctgaattccacgctctttgcaggcacgaatttcagcatggacattgagaaagacccaataggcttgcagggtgtgtttcctggttttgtggataggacaccaggaccttgtcatctcggaagtaaccctcatcggctcatgattcctgtcggaaagacaaggcttggccacactaggatccttctcgggttcggatgtcgtcgatgttccgatctccgcttcggcaggaggatccttcgacatggagtcgccctgggttgcagccactgcgttctcgtttccggccattggcggaccagctgaaatcggcat

SEQ ID NO: 47565 - DNA, 172 bp, Oryza sativa
  Clone ID: PAT_MRT4530_50320C.1
gggtaggagtcaccgctgctgcttgggggcaagagccactaccgtcgctggtcgcaatagccccgccgtcgccggtcgcaatcactgcccctgccgccactctatgtcacagccgccgggagaagtggagactgcacgagtggggaatggggatggaggatttagggtttag

SEQ ID NO: 47566 - DNA, 2679 bp, Oryza sativa
  Clone ID: PAT_MRT4530_50321C.1
atggccggtcagaccgtgtactacgctggtcagaccgtacctaccatagccggtcagaccgtgctctatcctggccagatcgcgcctcctgtggccggtctaactgcatccctgaccaccggtcagaccgggccatgggccggtctgaccggatgcttggacgcgaaggatcgtgctagggagaaccaaaaaccgtatcctgatttttatgacgctctcccatatcctcctgattataaaattcctgaatttaccaagtttagtggtgaggatagtaggactacgtacgagcatgtagatcaattcttagcgcaatgtggtagggctagtagtatgaatacatatttggccaacattgcatatgatggattgcttgattctataaaagagagattgaatggccagatatttcttgatgttgatcatgtgttgaatgaagctctggctcaggaaagccgagtggatgacaatagcttacaagctagtttagatgaaaatacaatatcatgtatagccgaaccaagcgatgattcagattgtgttaataatttgtgcaatgatgccataacaattatagccgaaccaaatgttggttcggattgtcttgctagcttggataatgatgcaacaaccattatggccgaaccaagcaacggttcggagtgtgttactagtttagacaatgatggaatagccgaaccaagtgatgatttggattgtgttgctagcttagagaataatgccattgaagatatagccgaactaaatgacgattcggattgtattataagcgaaagtgaaatagcattgtcacctaagaccgagtcacaaatcggtcatgtggatgttggaaaagatgatgacaatgtcttgcgggataatagtgaaatagaatccaaagtagccatgcatacatatcaaaggccgtatcctgaacatgtagattcggtcccatacccgcaaggatttgaggtgcccaacttcacgaaattcacaggtgagaatgctatgactacaatggagcatatcggctgctttattgatcaatgtggtaaggccggtagcgatgatttgcttaagttgaagttgtttcccctttctttgtcaaactttgcatctacatggtatagtttgcttgctcctagttcaatttctacatggtcacaaatggagcatgagtttcatgattattttaaagatgcaagcttaatggagaaaagaccggttgatgattcatcggtcacttgtgaaactattttggttacatctatgcctaagaccggagttgttagtaatcctctccctattagtcctattgatgttgacaaaaagaaagggaaaaatattattattggggatcctcggcccaagacaattaggatcaataatgcaaaggccgaagatcgtaaggttacaaaggatgagttatctagttctataaagaccaaaaagccgaagctcacttttgagatgcttatggctaagtacaagaaagaattagccggtcaacgatttgataatcaaactagtgattcgaaaagaccaaagtcatctcgtaggaagatatttggtcaatcaccaaagcaatcggagtcatcgccaactccatacaaacctccggttgtgatgccatggtgtccatatccaatgtcattatatggttatccttttatgtattacatgccatggatgcctcaaccacctatgccgtgtcatcaaggatggaagcaatcacctaggacagtaccaagtcattctaactcaaaacaagaccgttttccacaaaagaatcggtccggtagatcaaaggtgaaaaaggtgaagaaggtgtgggtgaggaaagaggccaaagctccggaggtcgttgctatcaaagaggggtctcaagatgttcatgtacctactagagatgtggtggaaaccatacaagtaaaggagatcaaagccgacaccgtgattgtcaaaagcggaggtctgaccgaggcgtctagccggtcagaccgccaaactacggtcggtctgaccgactctcctggtcggtctgaccgatggcttgtggccggtctgaccgggcccagaggccagtttgaccgggggacattagagaagagtaggaaaattgagagcaacacaggagcttccacttcgaccaaaaatatgaagaatcattgcttagctcctgaaaaacaatcacagccgaagtggataccttctggcttatctcgctctcaaaagaggaggctacagcgtcttcgagccataggtcaaaaagaaaaggaggccgaagatgaagagaacaaaacatttgaggtaaatcttggctctcttcggtatttcaagcaagacgacttgtcggttgaagattacaagaccttgatgggaagcaattttgaagacgtcatcgacaagcgttcgaagactttgaaggagatgaagacacttcaagacggtgtttttagagagcaattaatgggagatagcttgaagaaatacttccccagcatttggttcacgtatgttcaccaaaaaggcagggggggcatgtgtttacacccaaatttggcacctatggacgaaatagggaaaattaccaaggtttggatagtgctgggtttccttcacagggccgatcagaccacaggtgtatgggcggttgaccggctagtagggccggtctga

SEQ ID NO: 47567 - DNA, 313 bp, Oryza sativa
  Clone ID: PAT_MRT4530_50322C.1
ccggccgggaaccgcaactccggcgatggcgtcgtacggatcggtggcgtacggcgacggcgacggggagaagccctcggcgtaactcggccagcccctcctctcgtcgaccaatcagccctactacgcttttctcgctgtcgggatatatcttctccatcttcagtactatcaggttttaattctttatctagagatctcgaactgctttaagagttggggtctctctctgttattggcttcgcgtcttgtagatacatatgcttgaataacattttccgcttactctttcctctttttgcacagatctttt

SEQ ID NO: 47568 - DNA, 2193 bp, Oryza sativa
  Clone ID: PAT_MRT4530_50323C.1
atgacgagcaggaacgagatcgacaagatcacatgggaggatcttgatgaggagcaacgtcaagtcatgaataaactcggttctttcttagccgattttatatccaaagagagcctctaccagtgctatcatgctactccacatatccctaaagcttacaatggtcctaatagcggatatcttcatgacactgggtatggccagtataataatattgtgccgcaacaaccacctcttaggctaccaaacccaccaccaaatcgacataagcctgaaaatatggaggagttaactagtatcgttattagggataaatttgggattgaagcgatggatcgtgctaaggagtgccaaaagccgtatcctgattattatgacaatctcccatatccgcatggttatagaatttctgaatttaccaagtttagtgatttggccgacattgcatatgatggattgcttgattctattaaagagagattgaatggccagatatttcttgatgttgatcatgtgttgcatgaagctctggctcaggaaagccaagtggatgacaatagcttaaatgctagtttagatgatagtgcaatatcatgtgtagccgaaccaagcgatggttcggattgtgctaataatttgtgcaatgatgccgtaacgagtatagctgaactaagtgctggttcggattgtgttactagtttagacaatgatggaataaccgaaccaagtgatggttcggattatgttgctagtttagacaatgacaccattgagagtataactgaactaaatgacggttcggattgtttcacaagcaaaagagaaatagcattgtcacctaagaccgaatcacatatcggtcatgtggatgttggaaaggatgatgacaatatcttgcaggatagtagtgaaatagaatccaaagttgtgatgccatggtatccatatccaatgtcactatatggttatccttttatgtattacatgatgtggatgcatcaaccacctatgccgtgtcatcaagaatggaagcaatcacctaggacagtaccaagtcattctaactcaagacaggaccgtttaccacaaaagaatcggtccggtgtattaaaggtgaaaaaagtgaagaaagtgtgggtgaggaaagaagccaaagctccggaggtcgttactatcaaggaagagtctcaagatgttcaagtacctactggagatgcggcaaaaactatacaagcagagaagactgaagccgacaccgtgattgtcaaaagcggaggtcttcccaaacagctggccggtttgaccgagacagctggctggtctgaccgccaacctgtggctagtctgaccgaccctactggtcggtctgaccgacggcttgtagccggtctgaccgggcctagaggccgatctgaccggggggcattggagaagagtgggaaaattgagagcaacacaggagcttccacttcgaccaaatatatcaagaatcattgtttagctcttggaacacaaccacagccgaagtggataccttctggcttatctcactcgcaaaagaggaggctacaatatcttcgggccataggtcaaaaagaaaaggaggccgaagatgtgaagaacgaaacatgtaataattcagagcctcgaacgacacctaatcgagtgtggagacccaaggagaaagccgattttgcttgggggcaagacattaatatgctcatgaagaaatcaagaaagatgaacggtgatggatacgacatcacatctttgagccgccgtttgtcggatgctaaggcaagtctgaccggtggtagcctgcggcctgaccggttctgcattgccggtctgaccgggcggacaaggcggtctgaccggcattgcgtggccgtcaaaaataagattgaagaacactcaaagaagtggcatgaggtgctttctgaagtattatgggctcattggatatctaaacatggtgctgccaaagtcactccttttgagttggtttatggacaaaaaaccgttttgctagttgaggtaaatcttggctcagacgacttgtcggttgaagattacaagactttgatgggaggtaattgtgaagacgtcatcgataagcgtttgaagactttgaaagagatggagacacttcaagacggtgttttcagagagcaatcaatggggaattcttga

SEQ ID NO: 47569 - DNA, 2973 bp, Oryza sativa
  Clone ID: PAT_MRT4530_50324C.1
atgggtgattatacagccgattacacaggaatcggctatatgcaaaacctagctaacggtatgactggtcatgacaccggtctaaccgcatcctatgccggtccagaccgtgccctattttggccagatcggacctcctatggccggtctgaccgcaccactaaccagggagtttctccaagttttcataccataactagcagtactgattttaattattattcatcacctgttaatactgttagtcatgctattccacatatccctaatgcctacaatgatattaataggggatatcctcccgatactaggtatggccaatataacaatattgtgccacaacaaccaccttttaggccaccaagtccaccaccagatccaccaaagcctgaaactgtggaggattggtttagaaatactatcagggagaatttcacaaaactaaggaatcgtgctagggagtaccaaaagccgtatcctgatttttatgacgctgtcccatatcctcctgattataaaattcctaaatttaccaagtttagtggtgagaatagtaggactacatacgagcatatagatcaattcttagcgcaatgtggtagggctagtagtatgaatacatgtaaattgcgcttattttctttatctttgtccggtactgcttttgcatggtctacttctttaccggaaaattctattttttcatgggctcaattagaacaaaaatttcatgattatttccacactagtgagactgagcttaggttgtctgatttaacatcggttaggcaaaaatacaatgaatctgtcgttgattatattgaaaggtttcgagatattaaaagccgatgttttagtttgaaaataactgacaaagatttggccaacattgcatatgatggattgcttgattctattaaagagaaattgaatggccagatatttcttgatattgatcatgtgttgcatgaagctctggctcaggaaagccgagtggatgacaatagcttacaagctagtttagatgaaaatgcaatatcatgtatagccgaaccaagcgatggttcggattgtgattcggtcccgtacccgcaaggatttgaggagcccaatttcacaaaattcacaggtgaggatgctagaacaacaatggagcatatcggccaatttattgatcaatgtggtaaggccggtaatgatgatttgcttaagttaaaattgtttcctctttctttgtcaaactttgcatctacatgttctattgatgttggcaaaaagaaagggaaaagtgttattattggggatcctcggcccaagaataggatcaaaaatgcgaaggccgaagatcataaagttacaaaagatgagtcatctagttcccaaaagactaaaaagccgaagctcacttttgagatgcttatggctaagtacaagaaaggattagctggtcaacgatttgataaccaaactagtgattcgaaaagaccaagatcatctcgtaggaagagatttggtcaaacatcaaagcaatcgaagccatcaactataccaactccatataaacctccggttgtgatgccatggtatccacatccaatgtcactatttggttatacttttatgtattacatgccatggatacctcaaccacatatgccgtatcatcgaggatggaagcaaccacctaggacaataccaagtcaatataattcaagacaagactgtttcccacaaaagaatcggtccggtagatcaaaggtgaaaagtgtgaagaaggtgtgggtgaggaaagaagccaaagctccggaggtcgttgctatcaaggagaaatctcaagatgttcaagtacctactgaagatgcggcgaaaactatacaagcggagaagactgaaaccaacgccgttgctgtcgacatcggcggtctgaccgagccagctagccagtctaaccgccagactacggccggtctgaccaaccctcctagccgagttttgaaagatcctacacttaaggttgatcggaagattcggcgagggagtgaagcttgtcaatggatcggcaatgttcaattagcgtctaccgctgtgttgaatcctatcattaaactatggccgttccgaggttgggtttgggatttcattggtcaaatttattcttcgtcatcaaaagggtattggttcgtgctaattgcaatggattacttcactaagtgggccgaagccgtgccgctcgagaatattacttgtacggagcaagacgacttgtcggttgaagattacaagaccttgatgaggagcaattttgaagacgtcatcgacaagcgtttgaagattttgaaggacatgaagacacttcaagacggtgtttccagagagcaactaatgggagatagcttgaagaaatacttcttgagcatttggttcacgtatgttcaccaaaaaggcagggggagcatgtgtttacacctaaatttggcacctatggacgaaatagggaaaaattgccaaagtttggaaagtgtcgggtttccttcacaagggccggtcagaccacagcgtttaggtgttgcgatcgtgcttgtcgacttatcacgaaaagttaccaacaacttattgttgctggatcaaacgaaaacttcaactgagccggaggccgaggccccagcattgtctttcacgcctgcactgacttcagctgatggagctcatcaggagccgctcgtcgttgctacgaagaactcaattccgcggattgcacatatgccaatggtgccaacgaggaggctgtcctgtccagagcattttgtcaccacttccgaaggagttcatcagctcagtcgctatagcttggcagactggttcagaaatgagcttgggaatgggatttgggggagctggatatttctggcccttagtttcgtcattcttgggctgaaccgcgagatttggaggcagccgcagatactcaattga

SEQ ID NO: 47570 - DNA, 266 bp, Oryza sativa
  Clone ID: PAT_MRT4530_50325C.1
tttagttacagtcttgctctaccgttagctcagaccacaaccggcggaaaatatacgcgcgccctggtgaaccaggcggaccacactggacagggacatgtgcgccaccaccgctacggcgagctcaggattcagatccgcctggcagagactctaggacccaagaattggggggagcagacaggctcgaggtacatggacaggagggctcctgccactagggggactgatcatgttgcccgaatggtgactctcaggaggtcatt

SEQ ID NO: 47571 - DNA, 2874 bp, Oryza sativa
  Clone ID: PAT_MRT4530_50326C.1
atggccggtcagaccgtgtactacgccggtcagaccatgcctaccataaacggtcagaccgtgtcctatcctggccagatcgcgcctcctgtggccggtctgaccgtaccattgaccaccggtcagactgggcatgggctggtcagactgggtgcttggccggtcatacctcagactggttccctggaaatttctccaggttttcataccacgactagcagtgctgattttaattattattcatcatctgttaatactgttagtcatgctactccacatgtccctaatgcttacaatgatcataatagaggatattctcatgacaccgggtacggccaatatgacaatattgcgccgcaacaaccaccttttaggccatcaaatccaccaccaaatccaccaaggcctgaaatcatggaggtaaggaatcatgctagggtttaccaaatgccgtatcctaatttttatgatgttgtcccatatcctcctgattataaaattcctgaatttgccaagtttagtggtaaggatagtaggaccacatgcgaacatgtaggtcaattcttagcgcaatgtggtagggctagtagtatggatacatgtaaattgcgcttgttttctttatctttgtctggtactgcttttacatggtttacttctttaccatcaaattctatttctgcttgggctcaattagaacaaaaatttcatgattattttcacactaatgaaactgagcttaagttgtctgatttaacattggttagacataaatacaatgaatctgttgttgattatattgaaaggattggagatgttaaaaaccgatgcttcaatttgaaaataactgacaaagatttggccgacattgcatataatggattgcttgattctattaaagagaaattgaatggccagatatttcttgatattgatcatgtgttgcatgaagctctggctcaggaaagccgagtggatgacaatagcttacaagctagtttagatgaaaatgcaatatcatgcatagccgaaccaagcgatggttcggattgtgttaataatttgtgcaatgatgctgtgacaagtatagctgaatcaaatgttggtccggattgtcttactagcttggatgataatgcaacaaccattatagccgaaccaagtattggttcggattttgttactagtttagacaacgatggaatagccgaaccaagtaatggttcggattgtgttgctagcttagagaatagcatcattgaaaatatagccgaactaagtgacggttcaggttatatcacaagcatagcattatcacctaagaccgagtcactaatcggttatgtggatgttggaaaagatgatgacaatgtcttgcgggatagtagtgagatagaacccaaagtagctatgcatacgtatcaaaggccgtatcctgaacatgtagattcggtcccatatccgcaaggatttgaggtgcccaacttcacaaaattcataggtgaggatactagaacaacaaaggagcatatcggccaatttattgaacaatgtggtaaggccggtagtgatgatttgcttaagttaaaattgtttcctctttctttgtcaaactttgcatctacatggtatagtttacttgctcctaattcaatttctacatggtcacaaatggagcatgagtttcatgattattttaaagatgcaagcttgatagagaaaagaccggttgatgatttatcggtcacttgtgagactatttcggttacacctatgcctaagaccggaattgttagtaatcctttccctattagtcctattgatgatgacaaatggaaagggaaaagtgttattattggggatcctcggcctaagaataggatcaaaaatgcgaaggccgaagatcataaagttgcaaaggatgagtcatctagttcccaaaagaccaaaaagccgaagctcacttttgagatgcttatgggtaagtacaagaaaggattagccggtcaacgatttgataatcaaactagtgattcaaaaagaccaagatcatctcgtagggagagatttggtcaaacaccaaagcaatcggagccatcaactataacaactccatacaaacctccggttgtgatgccatggtatccacatccaatgtcaccatttggttatccttttatgtattacatgccatggatgcctcaaccacctatgccgtgtcatcaaggatggaagcaatcacctaggacagtaccaagtaattctaactcaagacaagaccgtttctcacaaaagaatcggtccggtggatcaaaggtgaaaaaggtgtgggtgaggaaagaagccaaagctccggaggtcgttgctatcaaggagaaatctcaagatgttcaagtacctactgaagatgcggcgaaaactatacaagcggagaagactgaagccgacgccgttgctgtcaacatcggtggtctaaccaagctagttggctggtctaaccgccagactacggccggtctgaccgacggcttgtggccgccgaagtggataccttctggcttatctcgctctcaaaagaggaggctacagcgtcttcgggccataggtcaaaaagaaaaggaggccgaagatgtggagaacaagacatgcaataatttagagcctcgaacagcacctaggcaagtgtggagatccaaagagctagacgacttgtcggttggagattacaagaccttgatgggaagcaattttgaagacgtcatcgacaagcgtttgaagactttgaaggagatgaagacactccaagacggtcgaaaacacacagaacgatacagaagaggtccagcactcaatgcttttaagaataacttataa

SEQ ID NO: 47572 - DNA, 1021 bp, Oryza sativa
  Clone ID: PAT_MRT4530_50327C.1
ttttttttttttttttttttttttttttttgcataattatattataatcacattccagccataattaattttctagcccatacaaaagcaagttccaaaatacagtttccaacatatttccatacaaaagcacaaaacatgaatacaaaatgatccatccaccatccaactacacaagtcccagctgactacaaagttcctacaggtagtgccaagttcctgcaccaaaaaattccacctagcagccactaagtttcggcggcgtgcatcttgccagtagccagcaaaaaaattccaccaagcagccgctgcacttccggcctgcatcctgccagcagtcagcaactagtgccaaaaaatcctgcgttccagcaaccaacgcaaaaaaaaatactctggccactaaaagtgccaaccacgcataactgatgctccgggaagcggatgcattcgccgcagacaggaaccttgtgcacgaagcaataaacccttgtcgccatgattttagagtggctgatatatggttactttctctggtcctgcagccgctcctctggacttagtttcaaggattctcctgatgagacagcttcagcctccacggctccacccacaagtctccatcccatctgccccatcagaaaagaacaagaacaaccaggtgcccatcccctttgcccccatttctgcttccttgaaatctagaatcccaggtggaggttgatgtggtcagaagggatgatggcggcgttcctcaggggagctatgtgcaggacccgggttagatggctggagggctggaggtagcgtggatgtaccagtagagggctggaggcagcgtgatcgtggatgctagggaggagaataacaaggagcaggaggaggcgggggcggcgtcgatgaccgcagaagcagccacacccacccacccctcatcctcccagtcccagatctagcgcggcggcgagctgctgcgtgctggtggtggtgggcgagagcggtagccgaatccggacgcgtg

SEQ ID NO: 47573 - DNA, 2499 bp, Oryza sativa
  Clone ID: PAT_MRT4530_50328C.1
atggatcccgccgacgatgacgaggagacgccgacgagccggagcagctcttctctgccagacgacccacggctgcgggaggcaattggggaagaaaccaggcacttacgtctgtgcttgccgttgtttgcttgcttgctcagttgctctcgtgcaataggatgcattcttgatgacttatatatatatgttcatcttgtgttcttcaggctagcggagcaaatgcctacggctgatgctgaaacagtgacctccgaatcaactgcagtaatccagcaggattccaccatggtcaacgtggatgctgctggcttgcatgaacaagacgaattaccgcattggatgtcacaattgtttgagaaattggatttggaggtggatgaggatgtggtggatgaggacatttgttctattgggaatatgactcatgaagaggaagaagcagatctggagaggggtattcattctattttgaagaatcatcctatcatgaagaaattaaataaaggaatacatccagttgttcttgcccttcatgtactactggaggaggaggaggaggaggaggttgtccaggaagaggacatggctaagggtttagctgagctagatgaatatttatcacgtcacacataccataccatagaggaagccacggcgagcttcaccggcgtgatcggccacggcggctctggcgtggtgtacaagggcgtgctcgacgatgagagggcggtggccgtgaaggtgctcaagaacgtgagccgaatgtggggttgctgctctcaaggcaagcacaggattcttgtctctgaatacatagagaatggatcacttgcacataagttgtttggtagggatggatttgatgatgatgtgcttgattggaatcaacggttcaggattgctctgtgtgtggctaaagggctggcttaccttcacagtgagtgttcagaatggattgttccttgtgacatgaagcctgagaacattttgttggataaggatttggagcccaagattacggattttggtttgtctaagttgttaaacagagatggttcagatgcaattttgacacggatcagagggacaagagggtacatggctccagagtgggttactaacctaccggttatagagaaggttgatgtgtatagttatggagtaatactccttgagctagtgaaggggatttggatttcggaatgggtgatccatgggatcaaggtatgtgagatggatattaggatagttgttagggtgacacgtgagaagatggagtccaatgaagaaaaatctatcgaggatcttgtggactatcgattgaacggtgatttcaaccatgtacaagtgaagctgatgcttgagattgctctttcatgcttggaggaagataggagcaagcggccaaacatgaactcagttgtgcaagcactcatttcatttgaagatattgttgtcaaaagacaattgcgtcatatcgaaagacgtggttcactcaacgaaatagaggaaaattgccaaagtttggaaagtgccgagtttccttcacagggccggtcagaccgcaggggatatcctcccgatactaggtatggccaatataacaatattgtgccgcaacaaccaccttttaggccaccaagtccaccaccagatccaccaaagcctgaaactgtggaggattggtttagaaatactattagggagaatttcgcaaagctaaggaatcatgctagggagtaccaaaagccgtatcttgatttttatgatattatcccatatcctcgtggttataaaattcctgaatttactaagtttagtggtgaggaaagtaggaccacatgggagcatattcggtcccgtacctgcaaggatttgaagtgcccaacttcacgaaattcacaggtgaggatgctagaacaacaatggagcatatcggtcaatttattgaacaatgtgacaagaccgtttccccaaaagaatcggtccggtggatcaaaggtgaaaaaggtgaagaaggtgtgggtgaggaaagaagccaaagctccggaggtcgttgctatcaatgaggaatctcaagatgttcatgtacctactggagatgcagcgaaaactatacaaacggagaagactaaagccaataccgttgttgtcgacatcagcggtctgaccgagccagctggccggtctaaccgccagtctacggccggtctgaccgaccttactggccggaggctacagcgtcttcgagccataggtcaaaaagaaaaagaggccgaagatgtggagaacaagacatgcaataatttggagcctcgaaaagcacctaggcaaatgtggagatccaatgagcaagatgacttgtcggttgaagattacaagaccttgatgggaagcaattttgaagacgtcatcgacaagcgtttgaagactttgaaggagatgaagacacttcaagacggtgttttcatagagcaattaatgggaaatacttga

SEQ ID NO: 47574 - DNA, 516 bp, Oryza sativa
  Clone ID: PAT_MRT4530_50329C.1
atgaagccgcctgggagaggaggcgaggaaaggcggtggcggctgctggcttgccgagaagacgggagcagcgccggctatctcggcgaagatgggagaatttcgagggcgatgcgaggggatcgggatgttgcaataaagaaggatcgagtgaggtggtggatgagggagatggggaggggaggaggccgagcgggtgagggtttagggcagcgcggcggcaagaggccggggatggggatctccatggagagtaaggagagaggagatgaggaggaagggggaggaagacgaagaaagcaaagcagcagagagagaacagagacgaaagaagaaaaagtgtgggagcagccaaccattcgtagattcgtgatcgtgcactcggttcgtgacacgcggggcccgtccaccgactactccatccacactcgcatacacctggtctacgtggacctagtcacttcctactgggccacacttgtttgggccatgaaccatgatccgagcccaccaatt

SEQ ID NO: 47575 - DNA, 895 bp, Oryza sativa
  Clone ID: PAT_MRT4530_5032C.1
caccggccggtgccgtgggtcccacgcatcagccgcacccgagggcgcgggcggctgacagccggcccccacgcggcggccactctgcgcgcccgaaggcggccacgccggtgcggccggcgcacggcggagcggcgcccgagaaaggggagggaaagggggaaacgaagcggcggtccacggctcaccccgggtcgacggcgatgacgaaaacggcgaccggagcagaggaaggcggcggcgaagctagggtggatggggtcgacggtgctccggcggtcggcgaccgaaacggagaggtggacgaggtcggcgaggatgcggcgaagccgaaggaggcggcgccgaggtgggaggtggtccggggcgacaacggcggcggaccggagctcggcggcgacggtggagagagatagtgacggcgcgagctcgattccggcggggagagaggcggctagtggcggaaacggtggtggggagctcggggagggtttatatagggttgggagtgagagagggcggccggaggagggggaaatgggcgcgggagacccggccgccattaatggcgccggcgaggttaggggaacggtttccaaacgaatctgagggagagagggagggaaaaatggggggaaagggagagggaatcacggggaataattccccctactttattgcgcacggggacggcgggaggcggcgggaggaaggggatgacgggtgggccccacccgtcagcgagggtggcgggcgggcccgcccgtcagcggcgcgcgcgcggggagaggccggatgggccgtggggagaggagagggagggggagggagatgggccgagccggcccaagaaggagagggagggaaaggggactttttagagtttttcttttta

SEQ ID NO: 47576 - DNA, 2100 bp, Oryza sativa
  Clone ID: PAT_MRT4530_50330C.1
atgagctatatggccggatttaatcaaggaatttcatcatcaactatgacgagcggaaacgggttcaacaatattactacacaatacattaggactgatcaaggcgtcgtgaaagaaaacgtcccgctacctcaagttgtagtttcaccaaagaacctagctaacggtataaccgcatcctatgccagtcagactgtgcctaccatagccggtcagaccgtgccctattctggccagatcagacctcctgtggccggtctgaccacaccactgaccatcgaattcctgaatttaccaagtttagtggaaagccgagtggatgacaatagcttacaagctagtttagatgaaaatgcaatatcatgtatagccgaaccaagcgatggttcggattgtgctaataatttgtgcaatgatgccataataagtatagccgaaccaaaagttggttcggattgtcttgctagcttggataatgatgcaacaaccattatggccgaaccaagcgacggttcggattgttttatgagtttaaacgatgatggaatagccgaatcaagtagtggttcggattgtgttgctagtttagacaatgacatcattgaaaatatagccgaactaagtgacggttcagattatatcacaagcgaaactgaaatagcattgtcatctaagaccgaatcacaaatcggtcatgtggatgttggaaaagataatgataatgtcttgcgggatagtagatttgaggtgcccaacttcacgaaattcacatgtgaggatgctagaacaacaatggagcatatcagccaatttattgatcaatgtgatgcaagcttgatggagcaaagaccaattgatacttcatcggtcacttgtgaaactatttcggttacatctatgcctaagcccgaaattgttagtgatcctctccctgttagttctattgatgttggcaaaaagaaagggaaaagtgttattattggagatccttggcccaagaataggatcaaaaatgcgaaggccgaagatcataaagttgcaaaggatgagtcatctagttcccaaaagaccaaaaagccgaaactcacttttgagatgcttatagctaagtacaagaaaggattagccggatggaaggaatcacctaggacggtgccaaatcattcatctaattcaagacaagaccgtttctcacaaaagaatcggtccggtagatcaaaggtgaaaaaggtgaagaaggtgtgggtgagaaaagaagccaaaactctggaggtcgtcactattaaggaggaatctcaagatgttcaagtacctactggagatgcggcgaaaactatacaagcggagaagactgaagccgacgccgttgctgtcgacatcggtggtctgactaagacagatgtcgacagtctgaccgagacagttggccggtctgaccggggggcattagagaagagtgggaaaattgagagcaatacaggagcttccacttcgaccaaaaatatcaagaatcattgcttagctcctagaaaacaaccacagccgaagtggataccttctggcttatctcgctctcaaaagaggaggctacaatgtcttcgagccataggtcaaaaagaaaaagaggccgaagatgtgaaggacaaagcatgtgaagatttagagtctcgaacagcaagtaagcgagtgtggagacccaaagagccgatgcttgatttcaaaactttggacgaaattggcaaagctattgaccaggggcggtctgaccggtggtaccggcgagggagtgaagcttgtcaacggatcggcaatgttcaattagcgcctaccgctgtgttgaatcctatcattaaactatgggcgttccaaggatgggctttggatttcattgtcaaatttatccttcgtcatcaaaagggcattgttgaggtaaatcttagctctcttcggtatttcgagcaagacgacttgttgattgaagattacaagaccttgatgggaggtaatattgaagacgtcatcgacaagcgtttgaagactttgaaggagatgaagacacttcaagacggtgttttcagagagcaattaatgggaaatact

SEQ ID NO: 47577 - DNA, 1089 bp, Oryza sativa
  Clone ID: PAT_MRT4530_50331C.1
atggcggcaccaatgggggacggaggcgacctggtgatgctgatggaggtatcccagctgaagaagctggccctcctgctgaggaacaacgaggaggcccagatcacgcaggcggtcaagtcccagaacgagcgcgtcaagtacctccacagcgtcaaccacgcgtacaaccacgccgtcgacctcctcgacgacggctcggccaccagggacaagtacgccgccgccgcggcgggcggcggcggcgaggccaaggccagcatcgcggaggacgtcctggagtacgtcaagtacggcctgaacatgagcatgcagaacgtccgcaactgctgcctgcgcgtggactgcatcggaaagatcagggcgcactacgactccctcgtcgccgacctcgccggcctccacgccgacgacgtcgccaacctccggcggctggccaaggacacggccatgttcaaggagtgcatgttcgagcactgcaacaagctccggagcggctccgcccgcgccatgtcaaaggcgttctccatgatgctcaagcaggagggcatcaagttccccgaccttgtcaaacgacacaagaacaagttgggattcgagggcgagttcgagcatctgacggacgcgcagaagctagaggtgtacaacagcatcatcgaggagtccggcagggccaagatgccagtgaaggagatggtctcgacggcggcgggggtggcggtgctcctggcgacggcgggcctcatggtgtgggacatcttcacggcggagcacaccgtcgaggcggtgctccgcaacagcctgaacgcgctggcggaggtgggcgccttcgcggtgcaggtggtggtggagggcgcggtgacggaggcggtcgcggacctcgagctcggcgtctttgtcgtgtcgatggccgggttcgtcgccggcgccgttgccggcctcctgttcgtcgccgtcgccggcgtgctggtggacctcatcatgggaaccgggggcaatgtggcgcctccggtgactgatctcaagttccatactgccaccatgcccgatggcatgcagcttgcctacatcatttctcacaggggctag

SEQ ID NO: 47578 - DNA, 1701 bp, Oryza sativa
  Clone ID: PAT_MRT4530_50332C.1
atggccggtcagaccgtgtactacgccggtcagactgtgcctaccatagccagtcagaccgtgccctatcctggccagatcgcgcctcctgtggccggtctgaccgcactactaaccaccggtcagaccgggccatgggccggtcagaccggttccctgggagattctctaggttttcataccacgactagcaatattgattttaattattattcatcacctgttaatactattagtcatgctactccacatatccctaatgcctataatgatattaataggggatatcctcccgatactaggtatggccaatataacaatattgtgccgcaacaaccaccttttaggccaccaagtccaccaccagatccaccaaggcctgaaactgtggaggattggtttagaaatattatcagggagaatttagcaaagctaaggaatcgcactagggagtaccaaaagccgtatcctgattattatgacattttcccatatcctcgtgattataaaattcctgaatttaccaagtttagtgccgaaccaagcgatggttcggattgtgttaataatttgtgcaatgatgccatagtgattatagccgaatcaaatgttggttcggattgtcttactagcttggatgataatgcaacaatcattatagccgaatcaagtgttggttcggattgtgttactaatttagacaataatggaatagccgaaccaaacgatggttcggattgtgttgctagcttagagaataacatcattgaaaatatagccgaactaaatgacggttcggattgtattacaagcaaaagtgaaatagcattgtcacctaagaccgagtcacaaatcggttacgtggatgctggaaaaaatgatgacaatgtcttgcgggatagtagtgaaatagaatccaaagtagctatacatacatatcaaatgccgtatcctgaacatgtagattcggtcccatacccgcaaggatttgaggtgtctaacttcacgaaatttacaggtgagaatgctatgactacaatggagcatatcggccaatttattgatcaatgtggtaaggccggtagtaatgatttgcttaagttaaaattgtttcctctttctttgtcaaactttgcatcaacatggtatagtttacttgctcctaattcaatttctacatggtcacaaatggagcatgagtttcatgattattttaaagatacaagcttgatggagcaaagaccgattgatacttcatcggtcacttgtgaaactatttcggttacatctatgcctaagaccggaattgttagtgatcctctccctgttagttttattgatgttggcaaaaagaaagggaaaagtgttattattggggatcctcggcccaagaataggatcaaaaatgcgaagaccgaagatcataaagttgcaaaggatgagtcatctagatcccaaaagaccaaaaagccgaagctcacttttgagatgcttatggctaagtacaataaaggattagccgttgaggtaaatcttggctctcttcggtatttcaagcaagacgacttgttagttgaagattacaagaccttgatgggaagcaattttgaagacgtcatcgacaagcgtttgcagactttgaaggagatgaaggcacttcaagatggtgttttcatagagcaattaatgggaaatgtttga

SEQ ID NO: 47579 - DNA, 183 bp, Oryza sativa
  Clone ID: PAT_MRT4530_50333C.1
atgggtcaagaatttgtgcttgaaaagcgtaacgtgaatgttgcaaacagaacgtacagggatgcaccaggggttgtggtgggccaggagagtgacgtgtcggagtggcaccgcgtggggaccaccggggagtcgttgggagggtgggacccacgaagacctacggagtacgagaggagctga

SEQ ID NO: 47580 - DNA, 1419 bp, Oryza sativa
  Clone ID: PAT_MRT4530_50334C.1
atgacgagcgggaacgagttcaacgggattactacacaatacattaggaccgaccaaggcgccatgagaggaaacgtcccgctacctcaagttgtaatttcaccaaagtcatgctactccacaatccctgatgcttataatgatgttgctagggggtatcctcccgatactagacaaggccaatataatcatattgcgccgcaacaaccaccccttaggccatcaaatacaccaccagatctacataggcctaaaaatatgaaggagttgattagtgacattatcagggctacgtttggggttgaagcgaaggatcgtgctagggagaaccaaaagccgtatccttatttttatgacgctgtcccatatcctcctaattataaaattcctgaatttaccaagtttagtggtgtggatagtaggactacatatgagcatgtagatcaattcttagcgcaatgtggtagggctagtagtatggatacatccgaatcaaatgttggtccggattatcttgctaatttggataataatgcaacaatcattatagctgaaccaagcgacggttcggattgtgttactagtttagacaatgatggaatagccgaaccaagtaatggtttagattgtgttgctagcttagagagtaacatcattgaaaatatagccgaactaagtaacggttcgaattgtatcataagcgaaagtgaaatagcattgtcacctaagaccgaatcacaaatcggtcatgtggatattggaaaagatgatgacaatgtcttgcgggatagtggtgaaatagaatccaaagtagctatgcatacatatcaaaggccgtatcctgaacatgtagattcgatcccatacccgcaaggatttaaggtgcccaacttcacgaaattcacagatgagaatgctatgactacaatggagcatatcggccgctttattgatcaatgtggtaaggctggtagcgatgatttgctaaagttgaagttgtttcccctttctttgtcaaactttgcatctacatggtatagtttacttgctcctaattcaatttctacatggttacaaatgaagcatgagtttcatgattatgtcaaagatgcaagcttgatagagcaaagaccgattgatacttcatcggtcacttgtgaaacgatttcggttacatctatgcctaaaaccggaattgttagtaatcctctccctattagtcctattgatgttaacaaaaagaaagggaaaagtgttattattggggatcctcggcccaagactaggatcaataatgcgaaggccgaagatcataaagttgcaaaggatgagtcatctagtttccaaaggaccaaaaagccgaagctcacttttgagatgcttatagctaagtacgagaaaggattagcgggtcaatga

SEQ ID NO: 47581 - DNA, 1680 bp, Oryza sativa
  Clone ID: PAT_MRT4530_50335C.1
atggccggtcagaccgtgtactacgccggtcagaccatgcctaccatagccggtcagaccgtgccctatcctggccagatcgcgcctcctgtggccggtctgaccgcaccactgactaccgccgaactaagtgacggttcggattatatcacaagcgaaagtgaaatagcattggcacctaagaccgaatcacaaatcggtcatgtggatgttggaaaagataatgataatgtcttgcgggatagtattgagatagaatccaaagtggatatgcatacatatcaaaggtcgtatcctgaacacgtagattcggtcccatacccgcaaggatttgaagtgcccaacttcacgaaattcacaggtgaggatgctagaacaacaatggagatatcggccaatttattgaacaatgtggtaaggttacttgctcctaattcaatttttacatggtcacaaatggagcatgagtttcatggttatttcaaagatgcaagcttgatggagagaagaccggttgatgattcatcggtcacttgtgaaactatttcggttacatctatgcctaagaccggaattgttagtgatcctctccctgttagttctattgatgttgacaaaaagaaagggaaaagtgttattattggagatcctcggcccaaaaatagcatcaaaaatgcgaaggccgaagatcataaagttgcaaaggatgagtcatctagtttccaaatgaccaaaaagccgaagctcacttttgagatgcttatggctaagaagagatttggtcaaatatcaaagcaatcggagccatcaactataccaactccatacaaacctccggttgtgatgccatggtatccatatccaatgtcactatatggttatccttttatgtattatatgccctggatgcctcaaccacctatgccgcattatcaggagtggaaggaatcacctaggatagtgccaaatcattcatctgactcaagacaagaccgtttcccacaaaagaatcggtccggtagatctaaggtgaaaaaggtgaagaaggtgtgggtgagaaaagaagccaaagctctggaggtcgttgctgccaaagaggagtctcaagatgttcatgtacctactggagatacggtggaaaccacgcaggcaaaggagatcgaagccgacgccgtgactgccaacattgggggtctaaccgagacagctggccggtctaaccgccagtctacggccggtctgaccgaccttactggccggtctgaccaacggcttgtggccgttgaggtaaatcttagctctcttcggtatttcaagcaagacgccttgtcagttgaagattacaagaccttgatgggaagcaattttgaagacgccatcgacaagcgtttgaagactttgaaggagatgaagacacttcaagacagtgtttttagagagcaattaatgggagatagcttgaagaaatacttcccgagcatttggcaggggggcatgtgtttacactcaaatttggcacctatggacgaaatagggaaaaattgccaaagtttggaaagtgccgggtttccttcactagagccggttagaccacagtttctatcccgagttggacatggagaagggcctatagagggcaagaccaacccctatttaagggacaaggccggttcattgtaa

SEQ ID NO: 47582 - DNA, 225 bp, Oryza sativa
  Clone ID: PAT_MRT4530_50336C.1
atggctggtggtgatgaagctggcattgaagagttgttagagatggggaaaatggcaggggctgggggcacttcttgcagcctatttagggaagagaaggtggggctagccggcgaggttgggcggcagtggcggaggcagtgcggatcacgtgctggtgagcggaagcggcgcgatgacgtgttgggaggtggaagaaggaaaagggttttagagatttgttaa

SEQ ID NO: 47583 - DNA, 978 bp, Oryza sativa
  Clone ID: PAT_MRT4530_50337C.1
atggctagtcacgtcttgttgatccggcaagacatcgcgacgccgtggtggttcatcttgcgggccttcgtcggcgccgcctacgtcggcttcgtcgcgctccgtctcctggcctacctctggctctgcctcccccgcatgcccaagggcgacctccgccgccggtacggcgagtgggccgtcgtcaccgggccaacgtccggtatcggccgtgccatggcgctggagctcgcgcgtcacggcctcaatctcgtgctcgtcggccgtgacccggccatcctccggcagatctccgacacgatcgcgtctctgtcggagttgatcgtggtgaacaatgcaggcgtggcggagcccggcgcggtgtacctgcacgaggcggacgtggaggcgtgggcgaggatggtgcgggtgaatgtgtcagcagtgacagaggtgacggcagcggtgttgccggggatggtggcgcggggcaggggaggcgctgtcgtcaacatcggctcagcggcgtcagagtccatcccgtccttacccctatacaccatgtactcctccaccaaacggtacgtggctcagttctcccggagccttcacgtcgagtatgcaagtaaagggatccatgtgcaatgccagattctgataaaatctggaaagtatgtgcatgcaaatagggaatcaaataggagtatgtatggctcttatgtatgtgcatgcatgcaggcaccgttcctcgtggacacgaggctgatgttcaggttcgaggaggcggcgggcggcgtgtcgctgttcacggtgaccccggacgcgtacgcgcgcgcggcggtggcgtggatcggccgcggcggcgcgctctgcacgccgggcgtccggcaccagctgctgcggcgcatggccgccgccgttccggactccgtccacgactggatcctcctgcacttaaccacctggaacagaaagcgtcgtttcagcggatcagagtga

SEQ ID NO: 47584 - DNA, 371 bp, Oryza sativa
  Clone ID: PAT_MRT4530_50338C.1
gggatacagcgctacacctataacaggggggtttgaatacaagaggtatgtctgctatcatcctcatgactgtccacacggcaaagaactgcatgtacaattccattttaaaaggggaaacgacatgaagaaatggacatattaaaagaattaaaccacatgaagggggtagcggccttatggtcacttaccatatgggatgaccagtgaaactaagcttgaacttatagggattcatgactgatatttgccgaatgaagcaagcctgaccatatgtgcggtctaatcaatgggatgtaccagaaaacctttaggatactggttcattttagggccgtcttgctctttgttgaaataaactgcctgacacc

SEQ ID NO: 47585 - DNA, 4092 bp, Oryza sativa
  Clone ID: PAT_MRT4530_50339C.1
atggctaagaatagtgataacaaccagctgattttggatgggcgcattggattagtgtcatctctatgtcaagtcgaacctattcttcgcaatccagaacgtaagcggaaggccgttgtattggaccaacaattcaaaggtgtcttttgtgctggacaatcaagccaatcaacaagccatgttccagatgtatgcgctggagactttatatcaacctttcacctaccatcaaggcgaacaattaggcgcaggctgagctttgcttctgataatgtgcctatcccaaccggtgacggtctctcatcgggtagcccaacacttcgtgccgttgagaccgtttgtggtttaccgcatccacctcgatgtgttgctgccaagtcgcgtaaaaaacgcaaggtagctatgatttgcaggagagaagaaaggttatatgctgatactctctccctttcatctcggtctgttcggcggcgcaaaatcccaaatgataatattgtacaccaaccacaccatacacaactacgtcaacataacccaacctcagctgctcagccaggtggcgatgatcataggcagccattccccggtcgacaccgccgcactatattttcacctttataccttggaggacctgatcagacttgccgatattgtggtgctctcttttggtatgaggagcgtgcccgtggtcaaggacaggtaacttcacctgtgtacaacaaatgttgtaggggaggaagtgttcgtttacctccatacagaccacctccagaaccattgcttagtttgttgactggacaaaaccatgcattgtctgcccatttctttgataacattagatgttacaactctatatttgctatgacatctatgggcgtcaacatcataaggtctattaacgatggtggaggaccttatgttttcaagattagtgggcagttgtgccatcggataggatctctaattccaagacatggtgcttggccagaatattgtcagctatacatttttgatactgaaaatgaagtccagaataggatgggggttgcttccgttcgtggtagttttcagccaaatgaagatgtcattagatcttttatgaggatgcttgatatgaataacccaattgtgcaagtgttccgaactgctcgggatagattggctaaccaatcagaagaccactactttgtcaggctatttgctgtgcctaatcaacatggtagtgtttatagtgcccctattgcatctgaggttgttgggttggtggtcaatgatctaggaaccactgatcaaggtcgtgatttaatagtacaagatcatgcttctcatctacagaggataaaagaatctcactgcaagtttatgactatgcagtaccctctcctgttcccatatggggaagatggcttccataaggatctcaagtactgtcaatgccagcgctcaggagccattaagagatattatgtcacgatggtagagttttttgcatatagactacatgatagagttggtgacttcaacactcctttacggtgcaagaaacttactcaatcctatgaggttgatggtttttgctgtgttgaggatggtcgcttgagccattacagaattgactcatttcagaagaaatatagagccagcccatacaactctttggttcaggctgttagcaccggcatgacacaaggatcaacagcaggtcaaaagatcgttttgccagcttcatttaccgggagcccacgttattactatcagaactaccaagattgtgtggcactttgtcgtcggtttgggtgcccacatctattcatcacttttacatgcaatgctttatggctagaaatagtagaagctttagcacccatttcaggacagtattcctctgatcgacctgatattgttgatcgtgtttttcatatgaagctaagaatctttatggatgacatagtaaaaaaccagttttttggtccaatatctggagatccatctgttgatcgtgttggttatgaggccgtttcaaggttcatgatacatggcccttgtggcagctcaaacaaatcgtctgcttgcatgaacgatggaaaatgcagtaagttttaccctaaagaatttacagagaaaactatagttttgcccaatggacgtatcatatatgctcggccaaataacaaaattaccacaaacaaaagtggtgtggatgtcgacaacgggtatgttgtgccccataatgttgacctcttggttaagtaccaggcacacatcaatgttgaaattgttaatcgtgatgatatggagaagtacttattcaagtacacaaccaaaggaccagattgtgctaaggttggaatacgggatggaggcaacgaaatacaacaatgtcttgattgtaggtgtatagcacctaatgaagctgcatggcgcttgctacaatttgatatccaccacaccgatccatctgttgaacgtttacctgttcatctcccgctagaaaataatgtggtgttttttgaagatgactatcttgaccaagtcattgaaaatccactaagcactatcaccaaattgactgcatggtttgatgctaacaggatatacccacatgctcgccaacacacttatgtggaattccctgaattttggacatggcatggcgatggcaagtattggaaacaacgctctaagagtcataagggcaagcatacacctgggatacatcaaactatccttcaagaccatattagattatccaccttggatgaactagacaaattactgagagatgcaggatatagcttggatcatttccagttaccgcagctaagccatcatgcttttccaccattggagtataggcttataatggatgaacttgcttatggaacaaacagtgtgactgaactgcttaatcaattaaatccttatcagaggcatgtttacactgccatagaatcctcagttttaaataattctaggcaaacattttttgtttatggatatggtggcacagggaagacatttctatggaataccctattgaacagcattagaaatagagggaaaatagccttgacagttgcatcttctggtatagcatcattgttacttccagtcaaccatgattctgtgaacatgcagtttggtggtataacagttgtcttgggtggtgattttagacaaactctaccagttattcctaatgcaaggaaacaacagatcttgaatgcctcaatcacccgttctcgcctttggcaaaactgtaatggtaatgtccatgacagtgcacctgctgatcgaccggacaccacctgggtggaaattccatcatatcttttactaccggatgaagagaggaacctcacatgtttgatttcttttgtgtatggttcacggccgcatatatcgcagctaccagcttacttatgtgagcgtgcaattttggcaccaacaaatgagatcgctgctggtataaatgcacagattatcagccacatagccaccgaagaaatgtcgtactatagctttgatgatattgatgatgccacaccaaactattgcaatgtgcagtctctttatcctacagaatttctcaatacaatacacatgagtggtctgccggataatcatttacaacttaagattggtgtccccattatgcttcttatgaatttagatacaccaaagggattatgtaatggtacccgtctcatagttacacagctgactcatcgcataactgaggctgaaataataataggaaaatccagaggatcaaaaccatacataccaagaatagtcactacttcgactgactcaaaatggcctttcaaaataaagcgtcggcaattcccagtccgtgtttcatatgccatgacaatcaataaaagccaaggacagacactcagtaaggttggtgtgtacctaccaaaccctgtattctcacatggacaattatatgttgccttctcgcgtgttacatcacctcaaggtcttcgagtcctcattgagaatagcctacctgggtatgaatctaagacacataatgtcgtatattctgaaatattcagtgatattgcaaatcagcgtggttag

SEQ ID NO: 47586 - DNA, 2592 bp, Oryza sativa
  Clone ID: PAT_MRT4530_5033C.1
atggctgacaatgagaaaggcaataaggtcagaagtcaggacattggtacttcaagctcccgagtgaatgaagcaccagacaccagttgtgtgacactggtccaacacctgattaaccagaaccgattgcttatagagatactacagcagcatcagacgccaattctgaacctgagtcagatacaagctcaagtgcagttggaggcagtccaatcactcacaccacaagtcagcatgccgccagcatcccaaaagacccatggtggcgtgccacatgttgactcaaaagaagcaagtatcatttgttttatgtgtgatgagcaagggcactatgcaagggagtgtcctcagcagaaaagaaaaacaccaatgcgaaccgaagataaagtccgtaagatgatcattaccagcacagaatggcctccaccaggaatgacaaaacgtcagggaagaaataccttccgaggtgcaccacagttgacagagcatcttttagctaatggaggtagagtgtctgatagtgaagattcagatcaagtctcctcagatgatgaagatgaaatggaacgtaaggcatgctctcgttgtggagaaatcggtcatgttgccagctcgtgtgccactacatgcgttcattgtgaggaagaccatccacccgacaggtgtccaacgagcaggatcacttgtttcttttgtgaaggaactgatcatgtaccaaaagattgtcaattcagttttctgctgacgaagaagatggccaaccaacccgccagttccaacggagagaagcatcaaggcaacacaaatcctagccaagattacagtttcagcctaactccagtgccaggacagaggaatcaaaatgagaaaagaaaatgccgagttcgggaagatatctgttgcttcaattgtcaaggaaggggtcatttcgccgacaagtgcccaaaaccaagaaacatagctgccagcacgtcagttcacgcaactccctgcaatcagaagcttgctcctcagcgaattgtcatccatgcatcccgaagcagtcctatagtccccgttgcaacagcttcaactccagcgagtgcattaccacaaggtgtcaatgctcaatttcagccccagccaccagttgacaagatagaggccagtatcggcattgtacctttggatgttccagcacagcagccaagaaatcaaaattggaacaacccagcaggggcaaccaacgttcaagtacctacagtccagcaacagtgcaagttatcagaatttctcaaaactgagcctccaacctttgccattgccgtcgatcctatggaagccagtgattggttgcgcacagtcgagaagaagctgggattgattcagtgcacagaccaggagcgggttgtcttcgcaactcatcagttggttggactggcttcagaatggtgggatagctacgaagcatcacggccagaaggacataccatcacctgggacgagttttcatctgtattcaagagatcacatgttcccgcaggaatgatcacactgagaaaacgagagttccgctacctgaagcaagaagatttgaccgtcacagagtacctgcacgagttccatcgtttggctcactatgcaccagaagatgtggaaaatgatgaagataaacaagagaagtttctccaggggttaaaagatgagatcgcagtgcaactactcctagaggaatatgaagatttcgagaaacttgtggacaaagccatacaactcgaaagtgagcataatcggatgaagaactgtaagagaaggattgtcagcatcccagtatttccatgtggtaaccaaagacagcgcactgagccacttcagatcaccggatcttctgttgcgcatcaagagtttccgccccaagaagatggacacaatgcagacaacaacattagcaatactaatgatgatgataccaccaacaaccatgctttttgccccattagtgaccactcaaatcaagcgtgcaatgtcaacatcattcaccaaggtgtcgacgatagtatcaatgatggcacccaaaatgacaaccctagcaattgtgactctgagaaagactccaatggtgatagcaactatggtaccactgatgccaatgttagcaaggatttccaaccaccaattccaactccaagtcagaatgatcatccccagacggatagctcagcaaagaagacgttgatttgctacaattgcaaagaaccagggcattactcgagggactgcctgcaaccaaggcaaagtcgacctccacattaccgccaatttacacgaagcagacatcccaatcgtattgtggtcactggagcaaacgccgtacccgcaacaaccgtcagtctagcttttgatgaaccacttgaaggttctctgaaaggcagcaggctcaagtaccactttgtcaccagaagcatccacaactctcggagtgaagagtacttggttgacaaagttcaaaaggtgattgatagaagataccagcaaaggtgtttatcaccgggcaaagaagtaggtcgaaaggtgattgataagagaaatctgaaaagaacacatcagggttga

SEQ ID NO: 47587 - DNA, 621 bp, Oryza sativa
  Clone ID: PAT_MRT4530_50340C.1
tttttttttttttttgtgatcctgtgaaggcctcaaaggtaagcattttcattttgtataataggaaaaatagagggagaagtttacagctagaattccctcacaagggtgaattcttctttacaacgaaaaaatagttgcatgttcattacatcatttagcattcagtgattttttgagggatcgaaggacaccccacatgacagttgataaaaagaacagaactaaaccagtgataatggcatacttcaaaccaagattcataagcaaatttaccaacagtcctgctaagacaacgcccacgaaatttgctgaaaaacctgaccagaatggcatgccaagaaccgatgaaattattgccccagtccatgctccagttccaggaaatggtacagccacaaacagcatcaaaccaagccattgaaattcctcaacaggtgcagccttctgccgcgcccgctcaaagagaagatccataatccgagttgcagatgcgcttctttgagagagaaatgctgcaagttttttcaggtagaggataatgaatggcacaggcaccatgttcccgagaacggataggaccgtgaggcggatggggtccaggcgcatccagtacccaac

SEQ ID NO: 47588 - DNA, 403 bp, Oryza sativa
  unsure (1)..(403): unsure at all n locations
  Clone ID: PAT_MRT4530_50341C.1
tgcaacanccatgcntacttcaagcgtttccaaatctagttcangagacngaggcngggcaagactgactncagggccnggattangctcaccanccnacnatangaacaagttcnacncnccgaagtnccgctntgttgtgagatttacnaaccnnnatatcncanctcnanttgtctatgctnccattgcgggtgatntcgtgatggctgctgcctactccntcagctgcctcgtnatggtctgaaattngtctcnccgactatccgcacttactnctctgggtttgnttctggctcnccgtgtgntcccgctcccccgggttcgggaccnanntanttccttgggcnatgtngaacgcccccgggggaggnnctactacntttcataccncctgntattt

SEQ ID NO: 47589 - DNA, 497 bp, Oryza sativa
  Clone ID: PAT_MRT4530_50342C.1
gttcgcgctggacccggccagccagttccggttcgacaatcagtactaccgcaacatcctcgccatgaacggcctcctcagctccgacgaggtgctcctcaccaagagccgggagacgatggagctcgtccaccgctacgccgccagcaacgagctcttcttcgcgcagttcgccaagtccatggtcaagatgggcagcatctccccgctcaccggccacaacggcgagatcaggatgaactgcaggagggtcaaccacttctagaacccttccacgtacgtacggcgcccacggccgatcgatgtgatgtgatgtgatcctatttgcttctttgtgttttgcatgttgattttatgatttgtgttttgtattttgctttgctttgctgctcgcttaattgttcatattagttttttcatgtgtgtaattcctcctgcaaatgtatcaaggaatggtctaataaaagtccatataccaatttgtttcaaaaaaaaaa

SEQ ID NO: 47590 - DNA, 968 bp, Oryza sativa
  Clone ID: PAT_MRT4530_50343C.1
tcaccatggagacacgatagcgctcactccttctgtcaacaacgcggtcgggtctccgatgagcatcctgacgacgacacgcaccaagatcacaaggatcttacatacgcgcctctccagcttactgctctggtcagcgcgctccagtagacgggccaccaccctgtcgtcttcatcaccggcgcctccgcctccgccgccgcccggagattccatgatctccctgatgcacttgacgtgcaggtacacgcggtggtcggggctattagtggagcggtagcaccaagggcggtagtaccactccatcgccctgcagccggtgcaccggtgcgacacctccgcgcgaagctcgaaggtgagcccgccccgcacggcgatggacaccggcagcctcgcgcagcacgggtgcagcttcgggtgctcgcccttgccggtcttcctcgacccgtagtagtggaatccccgcaccgtctcgaagcaggcggagcaaacgccggcgccgccggcgggggcctcgtggcggagctccatcgtgcccttcaccagcgcgtgctgcagcgtgggcgtcgcgagggcgcagctcgtgtggagggcgaggtgtgtcgggtggttgtcgacgacggaggtgtacctcgtgccttctccgggtagcatgcagccgtcgcactggaaggcgaccgcggcggcgtcgccggtgggatgctccaccacgtgcagcctcagcatgcaacccaggcgggcagggtggatgatctccgcaggaaagctcgagctcaccatagctgaattagttaaagcttgttctccagatattctcaccccctgctcatatataattgtagatatatatccatgtatgattctagctacatgtatatataaagtacatttcattcattaatcgatgacatctttaaataattaaacccagtatattgatttgaatggtaaaaaaaaaaaaaaaaaaa

SEQ ID NO: 47591 - DNA, 533 bp, Oryza sativa
  Clone ID: PAT_MRT4530_50344C.1
ggggcgtctagaacagggatccccgggcgaggaatcggcacgaggatctcttcctcccgcccccgacctctcttccctatccaccccatccaggctgcgccgcccactacgccctcctccaccacacctccccaaccctctccatccccgtcacctctcctcctcctcctccccttctcctccccctcctctccacctccacctccacctccaccgccaccgcctcgccctctccaccgcccgtttctggcgcctcgcggagcggcgagccagcgcggggccactggtgttcgaaacggaggaggagaggagtgggtggtcgggtgcggaggcagcggagtcgaactacgacgatgaggaggatgaggaggaggagcaagggtgggcgggcggcaatgccgcggggtggcgcggggagagccacgaggatgatcaggaggagggttccggttccggggaggggcggaggccgcggcggtcgcggacgcgcgagcggttcgtatgcaatcttccccgccgctgcgacgtcgacg

SEQ ID NO: 47592 - DNA, 2076 bp, Oryza sativa
  Clone ID: PAT_MRT4530_50345C.1
atgataattgttcttgtgtatgcgggtggtgaaatcatatacgaagagaaggcaggtgcatcatatagtattcctcccaagatcacttttcctgctatcaagtctactacgctagaagatgtgaaaaatgagattttccgtggcctagatttttctgaggttgcatattcattggttataaaagtgaggaatgtggtgcaaacaaatgttgaagaggaggcttatgttggagaagagacagacaatgaaggcaatattgacgaggatgaagaccaggaagatgtggaggagggtagcgaagacgaagagaatatgaatgatagtattgcattggttaattctgcaaaatcgcagccactcatgggtaggtctggtaagcaccccacaagagctgatgattgtttctttggttcaaagagacactttgagagtccattggccaaaggtcgaattttttactccaagcaacacctacagtttgcagtaaatgaatttcacattagtaataatatggaagtaagggtatctacaagcaacaaatcaagactagatttcaagtgcaaagatagtacttgcaagtggaagctatatgcaaaaacaacaaaaattggttcgagttggaaaatacaaacttgccaatttccccacacatgtcgtgcacctgctgaccgatttgatcatgcacagctaacagcagcggtcattgctgatgtgatacgtgatgatctaaaggagaatttggagttgagtatattaagcatacgtcagttggttcgacaaagatataaaaatgtgaaaccaaagtacaacaagttgtggcgtggtcgagagttggccatagttcaattgtttggtagttgggaagaatcatatgcacttgtcacaccgttgttggaggcaatgaaagcatctaatccgggtacaaaatatcaacttctatcaaatcctacatctcctgaaggacaccaatcattcaaatgtttggcctgggcttttgggccatgcattgaatctgtcccataccttcgaccggtaattagtgtggatgcttcttttttatctggtaggtatcggggcaggttgttgatagcatgtggatatgatgctgaaaataggttactaccacttgcttttgcaatcgtggaaaaggaggatagtgacaattggggttggtttatgagatggctaagaaaagaggctataaagtgggtattcaagcagccacatatcggatggaacgaaattggtggtgagtgtgtgcatcgattttgttcccaacatattgctgagaatctgtacaagcgatgtaaaaatgatgatgtgataaaaacattcaagtgggctgtaaagaagaagaaaccacgcaggtttgtagaaggcatggatgcaattacacaaagttgtccaaatgcaattgattatctaaaaagtgttggaaaatatcgacaggaggataaagatgagcctgagaaacctgagaggtgtttcaatgcatggatggtggttaccgttgggtactcaaggagattacctgtgacagcaatagtggaggaaacatttaataaatgcttagaatggtttgctgatagaagaaaatctgctcttgaacttgcagattcagagaaaatgtggtcccatcgggttgagaatttgttagtaaagcgagggaataaggctggatccatgcacgtgacttcttatggtgatgaaggtggtgagtatgaggtcaaggttgaccgtgagcgagttgcagtagtgcaaggaaatcatactgcatatgttcgaagagatttcaagtataaagtaataatacacaatgatactcctcctatgtgcgaatgcctaaagccaaacctcactggaataccatgcgctcatgcccttgctgtttgcaaggatagaaatttcaatgagaatcaatttatccatccatattactcttcatcaacactggcaagcacttgggcaggtcaatttcatccctatggaaatcaaaatgagtggccaccatatattggtccagttattgtgcctgacaagaggtgcatcatcaagcggaccgcactgacagaatga

SEQ ID NO: 47593 - DNA, 134 bp, Oryza sativa
  Clone ID: PAT_MRT4530_50346C.1
tgttgtttttttaaaccaacggttcgatttataacctcaagaaggcacggcctggtaaatgatgatagaaacaacaatgattcaggcacatgaacatgtttaagccacgaataatgaagggggagaaatgaaat

SEQ ID NO: 47594 - DNA, 357 bp, Oryza sativa
  unsure (1)..(357): unsure at all n locations
  Clone ID: PAT_MRT4530_50347C.1
atcccgcgagcgaccttcctcccaccttcctccgcaccacgcccgcgcgccggccggatgccgccggcgagtcgtcgcagtcgtcgcccacctcctgacggcaagcgcgatgccgctccaccaccgccgggcgctgcactccaacgactgcgacgacggcggcttacggctgctcctncgtggccgctgtcccctacctncctnccgagcgtcatccttactacccttcgctttccccttcgccggcgccctgggcttgcccgcccgttttcctgccccgtcgccgtctcctctccatgggcgccgcggggggcaagagggatcagggaggataacacggctccccaacaggcggtn

SEQ ID NO: 47595 - DNA, 3040 bp, Oryza sativa
  Clone ID: PAT_MRT4530_50348C.1
atggagagaggggagatggagagggaggaagaagatgagggggtgtttgatgaaatgccaatgcagaaagttttgttgtatcaatttaaccacaatatggaaaataaccgtgagtggatgtatactggctggaaacgtggtcgtgcaccgactgatgagtgggtacagcaaactaaggattttttggattatgctttttccatgccaaatgttgttgttagtggaaaaattaagtgcccatgctccttgtgccgaaactatgtttcacacagaaggcaaatggttgagatgcatttgtgtcgtgagggtttcaaagagaattacatgaactggtcagaacatggtgagtgttctattggtcaagaagatcaagctacaacttcagcagaaaatgagaaatttgatgaattggatcggatggatgacatgttggttgacatagccggtgactatgagctttctgaggaagagccaacagcctctgcccaagctttctacagaatggttgctagtgctgatgagaaagtgcatagtcagacaacacactcctgtttatctaccacatctcgtcttcttgccatcaagtcacagtacaacatgccagcagcatgctatgatgatgtgatgcaattgatccatgagcttctcccttctaggtcaaaattggatgataatttctaccgttcaaagaaaactcttgctggccttgggatgccatatgaaaaattgatgttgcaaaggctgtatagtaatgagaagatagcagtcctaatgcgatggcacaaagaacaccctccacataagccaaatgtgatgatgcacccattagatggtgaagcatgggctcaatttgatagagatttttctaattttgcacaagatcccaggaatgttagacttgatctagctatagatggattcacaccattcaacatgaatgctgcaacatattcttgttggcctgtgtttatggtaccatataagctcccaccaggtatttgcatgaaaccagagaacataatgcttgcccttgttatccctggtcctcaacatcctggaaagaacttgagttctttattggaacctttggtggatcagttacttgatatatgggttggtgtgacaacatgggatgcttcgaagaagaaaaacttcactatgaaggcagcatatctttggtcagtccatgattttcgtgcctatggtgattttgtgggttggagcaccaatggtaactagcatgtccacatgtttgtgtgaatcaaaggcattccggctcataatggagggaaagctgctggtttgattgccatcggtgtttccttccaactgatcacgaatttcgaaatcaatcaaatgcatttcgaaaggacacaacaatacatcatgggagaccaagccaactttcagagagcaagttcaagctcaaatgaatgcatccataacagattctgataattatgggaaaaagcacaattggagacatatatcatgtttttggagacttccttacttcagcaaattgatgcttcgccacaatattgatgtcatgcacaatgagaaaaatgttgctgaagctatttggaatacttgctttgacatcgctgataagaccaatgacaatgtgaaggcaagacaagatttagaggagatttgccatcgaccatggctgcatttggaactaaaagctaatggcaagtggcataagccaaaggcatcttattgtattgataagaatgataaggtcaccattctcaagtggtttaaagaactgaaattccctgatggatatgcagccaatattagccgtggggtgaatttggcacagaaaaagatttttggcatgaaaagccatgattatcacatatttatggagcgtttgctacctgcagcattccgtggcttccttcctgagagtatatgggtgactttggcggagttaagcttcttttatagacaattatgtgccagagagcttaataaggaaaatgtatataggttggaacagaacatacctattctgatctgcaaattggagaagatatttcctcctggttttttcaactccatgcaacatttgatgatgcatttaccttatgaggctcgacttggtggtcctgtgcaattccgttggatgtttccacttgaaaggaattttgaacaacaagagtggaaaggccgagggagacctactcagaagcaaattgatgatttgagactaaatggttggaaaggatgcatggggccaagtaatgttgattctgcattgtgccaaatgtcctatggatttcgtaggagggttacttcttatggatgctatgatatcaatggctatagattcagatcagaaaagtatgagggaaaaagagcagcactgaccactatcaatactggtgtttgtgtgagtagtgtagatgagaataataatactttagagtattatggtgtcattgaggatattataaaagtgtcttgggaaggtagtttgcagcttgagctagtgttgtttgattgtcgctggtttgacccaacaccgtctggtgtgaggcgcagtgaacatactggtttggtggaggtgaagcaaacctcaagactgtcaaattttgacccctttgtgatggcaaatcaagtcaagcaagtttattacgttccatatgcatgctcatcaagaacagatctgcatgactggtgcattgtttatcatgttactcctcgtgatagattgcctgctcttgaagtgattcctgattccaatgatcaagatgggacaacaaatgagatgccattctttcaagagagtgttctggacagtacatttatagttgatcttggagctgacctagaagctagcactgcagttgttgactgttcagatgaaatcactgaccctaaagagcttgaactactaaggaagcaacaaaaaaaggcaacaacagcaccacatcatcaatctcaaaatatagaagaggacgacagcgaggaggaaaacgaaaatgatgatcagacaaatcatgagatttatgatccgaatgaattttga

SEQ ID NO: 47596 - DNA, 259 bp, Oryza sativa
  Clone ID: PAT_MRT4530_50349C.1
tattgagcatgtgcgccttacagtgtcggactatatttattggcactctttatatgaacgtgcgccccacataaggattaaatgtcttgttcatcgaataaaaaatattgtgccagctgactactatatgtatcatatactatgatcaccatatgaatttgatgaaatggcctctcaaatgcgtttaatgaaacagatgtgcgtggggttcttcagctcataccagtggttagatacttaaatgtacctttacacctcg

SEQ ID NO: 47597 - DNA, 208 bp, Oryza sativa
  Clone ID: PAT_MRT4530_5034C.1
cctgttcggagcccccggggccgcaggacctagcgcggaaacttacttcacaatgtgactggctttgcactgggtggagaaaggttgcgtgggctctgcctttgcatatgcataatccactgcctgaggggttgtggggtgggggggggcgagctctactcctcgcgtgccctgaatggtgcggtgcttttgagtcttcgggccggga

SEQ ID NO: 47598 - DNA, 362 bp, Oryza sativa
  Clone ID: PAT_MRT4530_50350C.1
gcccagcatctaaagttgtggctctggttgggcttgtggtggagcaggcccaatttgacctgggtggtccacgcacgtactccatatgtgctgtccgtacccacgtatgcaccgtagtcgcagcactcgtgttcaccgtccacgaccccgtcgtcatcggccctgcacgtcagccgcgccgcgccacgctcgtcggcttcgcccttccgccgctagcctccctgccaccacggatccacgataaccgcgtgcgtcgggcggccatccatggcgctattcctctgatctctccggtcgccttcggccacgcccggcctcgatttccggtcacgttccgccatcgccggtttgatcgtgagtga

SEQ ID NO: 47599 - DNA, 698 bp, Oryza sativa
  Clone ID: PAT_MRT4530_50351C.1
gacatgaggttcctttttccttacagttcaacatctggtgggatactcgatagagctatagatgcagaaaataggaaacatggtggattctttagattggatcatgttgaaagaatatctggagttggttgcaaagacaatcattttttgtgaaatccttgtccaggttggctgcagagtgctacattaaagtggatgttgatctacatgtaaatataggtgtacgaactactgccctagctaagcattggtcgaaacctcgagcttacattggctgcatgaaatctggtccagtcctggctcagaagggtgtaagatactatcctgagcctgagtattggcaatttggtgaatggggggaacaaatactttaggcatgcaaccgttcagttctatgcaatctccaaggatctggtttcttacatatcaatcaaccattatctacatcataaatttgttttttatctaattcttacccatcattaggagcctggttcaatggcctagatgtctagcacattgatgattgctccatctgctgccccctccctgttctctgctcctgaaaccgtcagacatcaaccaccggccaaccagccctattccccctaaaccctaaggtaataccaatttctcctattttacatgtttttgtgatgtgtcaatttgtggatcaccatttgttttcttgatcattc

SEQ ID NO: 47600 - DNA, 1485 bp, Oryza sativa
  Clone ID: PAT_MRT4530_50352C.1
atggggtggctgctcggctgcttccgggtggccgggtacagcggcgaggggcgacgcgaacgtgaacgcgaccagctggtttcgtctccctccgtttcgccgccggtggacgctcccaaggtcggggagaggaagaggccgccgtccaagaacgcgctctccgctgtattcttgcgagaagatgaggggtcgagggttgagcatagtacgagcttgggagcgaacgggatcactgagaggacgaaggtggatcaggagcacaagaacgaggtccgtttgctcatacaccgtgatgcattggtggaaactacaaatgaaatcataaaagggccagaaaatactgaccaaagtcaaacacatttgacatgtcttcctgccatttctgatgacttacaattcatggaagggctgaaggctgaggcttgccaaactccatcagggtctcatcagagctccattttacctgatgctatgagttcttcttggaaagagtgcgatgcatcaaaccagaatgattctgaagctgtgtgcaagagcatagaagttgaggttgtgggcaatgatgacagtgcaatcaactgtgggaacaagttaaccgccttagattcaccgtctttcacatgtagggatgatatcaacctggttgaatccaaatctttacccatttcaactccttcagaagcgactgctgagatacagacaccagctacaactcatgcacctgaccaggaagagctgagaaatgagaacaatactaggacttgttcagagcatacatatgaagctgtgagttctgttgaggcctctggaagctgtgaaaaattgagactagaatcctgtcagcccaatatatcagatgaggatttcaagtatgcaaagaatgacagtttggtttctgttgaactttcaatatctaatgaatgttccctattccagagttctgagggttcagtatcatcctgtaataagagaagagagaattcaagcacagaatctgtggagaaatgtcttaaaagtgagccgctagttcattccagcagaaagaaggtgctcaaaggaaatgattctgaggttgaattcccaagcttgtcacagtggttaaagcctccaaatccaaaggtgttcagggatgagcccttgacaagtgacagatctcattctgctaagagttcagaagaagataggcctattattggattggtcgctgctcactggagagacacagaaccagatactttcactcctaaatggtgggatggaaatggcattcccaactcaacaaacaaatacaaagaagatcaaaaggtgagttggcacgcaacaccattcgaggagaggcttgagaaggctttatctgatgagaaattgctttcacaaagaaaatgctctagtggaaacacatctcagctttctgggctggaaggagaggaaaatgatactgccgcatctacttctaactacctatgtgtcgctgctattacatga

SEQ ID NO: 47601 - DNA, 573 bp, Oryza sativa
  unsure (1)..(573): unsure at all n locations
  Clone ID: PAT_MRT4530_50353C.1
gcacgaagccgcattgngtcagcggataagggggggcctaacccattgngttgngttgnacncgggttgacggggaaaaaattangggggttccgaattcccgggaagaaanggggaagcctggaagaaaaaccggnttaccacnttccnaaggggaanaggcancatggcgccnccaaaatttaaccccaatccttggacacccggggggnaaaggtttcttgaacaaatnaantaaaccnaattcccngggcgctttaaattgttctggggttaaattggggaaatgnaaattncnaatcctnaaatccccctttaaaccaaaaggantcccnttttgggaaaaggggccaaatttcttnggcttaanccttgcccanttccnccccnttcccccccgggggnaacccccttctttcccttccccnancccccccnaaanccaaaaaccngggtttggcccnnggcccnggccctttttttgnccccccaaanccccggggcngggggcccccccngtaantttccnaaaccccccncccnaaaaanccttcccccccccttttccccccc

SEQ ID NO: 47602 - DNA, 1815 bp, Oryza sativa
  Clone ID: PAT_MRT4530_50354C.1
atggccacggaatttcgaggggttggaacattaagggatgcacacacgctggaggaagcaaaatatatcttagccaagtgcggtggaattccagaagtaataatggctttagctagatatgtggcctccgagcaagaggacatacggcaaaggaagttgagccatcttaaagacaactttatgcacgagctggagaccaaccccgagtttgttagcttgcgggatctgttcagctggatgcattttagttttgaggctttaccgcactccatcaagccatgcatcctgtatctggcagtgttccaagtgaagagaatccggcggagccattttgtgcggcggtggatcgcggagggctactccaagtgcactgacagcaaaaccatggaggattacacgggcgagctcttcgacaggcttgccaaggagacagatacaatgcccgagtggcggttcaatagcttcttccatgagtacatcaactcacgactcatggaagagagagtggttttctttccattggtagtctctgtgttggatgggagtcgcagcctaaccacggaagtcatgggacaacacctagtcattgggagcagctggaaaagagacgaggagtatgtgtactacgaggacctggacgtgtcgcatctccagtctttgacagtatacggagcttggaagtccctcttcgtcccttacaagatgaaatcggtccgggtgctggatctagagggcactactcatgttggttttggtgacgatgaactcaagcggatcttggagctgcttcctcgcctcaggtttctctcactgagagggcaccgagaaatcactcatctcccggattccttgtctggcctcaagtatctccagactctggatatcaggcacacctcagttgtctacattgcgctgcagacgctacatgagctgcagtacattcgtgcaggcaccacggcgccatggatggatggtggtaaaggcttggcttacgaggcatcgagtatcagctcatgcgctagtgtggcgtcgtcctacttgcccaagttcctgagacgtggtggacctgttggaccttgtcaaggcgtcaagatgcctagagacgggatccatcacctgaaggccctgcacacgcttggtgccgtccacatcaattcttcaagcggacaggccattctggctgacatctaccgtcttaaacagatgaggaagctcgaagtgtcaggcatcaaccggaaaaacagcaaacatctgtgccatgccatcatcaatcacaagaacttggaatccttgtcactgcagctggacaaggagaaacatgttgtttgttgggatgacatctcccctccttccagcgtgcggagccttaagctgtatgggcatgtggagatgttatcggctcggaggttcaaaaatcttaggaacctaaggaagttgtgcctagagatgaatactacactattcacacagaacgtactgctcctcgggagcgtatcaagtctgcgaactctacgccttcatgtcaagcagaatcaagatggtgtcctccaatttcgggctcatcttttcagcaaacttcagcaccttgagattgtttgcaggtccaacttacatgtaatatttgacgaagaagcaatgcagaagctagagctgctgaagatccactgccatgatgggtcgttactgcagctttctgggctaaagcatccagtttccctcaaccaagtgcgggttctgggtacctttgacgacgcactcatggagtcttggcggcagcaactggcggagcatctgagaaaccctgctttagtttga

SEQ ID NO: 47603 - DNA, 2254 bp, Oryza sativa
  Clone ID: PAT_MRT4530_50355C.1
tcaattgccgccttcaaatggtatactcctggtaattctttcagggccattaacaggaacttgagctcgaaaagttttaaggaactgcaatatctgaagactaaaaaatgaccgagggagtatagcaggagctattagtgcttgtagctgctcactaatcttgatattttctacaacaacctcctcaaattgaaggaagatgttgcgcttagacatgacagcaaattttgcagagaccatcagtgttgcaccctcttgctcctccagcaagttctcaatgctccatcgcacaacattccgcacaaccccaccatctgacctatccttgcattcgaatttctggtatatttgccccacctcaatctgcaggagggggagcctctcggcggcctcgaacagcacgcgcacgtccgacgccgaggtgtagcacagcctccacgtgccgtcgagcgccgcgaggtccagcggcgacccctccccggcgccgagctcctccacgctcaccggaggtcccttaatttgacagcgatattttttaaggtcccgctgcgcgacgacgagtaggtcctcgagcacgacgcgctcctcgcccccgtcggccttgtcgagcgcgccgacgaggtccccggcaaacaccccgagctcggcgtcgacctcctccttgagcctgatgaacttggtcctgatggcgccgatgaactcctccgggctgttcacgcacccgcgcggcttccgctgctgcagccggtgaaggagcggcccacgcatgttgagctcgtgcgagaagctcttcacgtcaagcgccgcttcctctgcccgctcgtcgcccgcaggatcgccttgaaccgccgccgctgtccttctgctcttcttcaccggtaagagggcggcggcggcggcggcggcatgagatccttcaacgccttcgatgccctcgcggccgaagaagaaaaagaagggcagcatcaagggctgagatgaggccggcgggagagggggtggcgcgccgcataggcgaagaggttgccgctgaccgcttgccgctgctccgcagccgtacttgccccccgccgctcgccgactaggccccccgctccgccgcactcgcccgccgctgctccgcctgccgcgctcgtggaggaggtcaaccaacacgacgatgacgtcggcggtgaagagctggagcatgacgagcgccgctgtcccagccgcctctccccccctctccagccgcgccgcagcccctcctcctgctccggccgcgcgccgccgcgcgctgccgctcgccctctgcggccgcgctcgcccgccgctccgctttccaccgcctgccgccgccgccaacgctatgcagcctagctcgcacgccgacaccgctcctcctctgcagtgcttcgatcttgtgtaaataacagctgcagctgcttcttcgtcaacctggaattggaaatcatgctgctcagcacgagacgtagttatcagattaggctgcaaaaggatccaggtggtccggtgtaagtagttcttttcctcccacaaggtgacagaacgacagttcagcagtttacctggaaggcccaacatgcacaagatataagtatccttaagaagacatggaatagaagggttatggcgaagtgccattagagtaaacacgattaatgcagtataggaaaataatctctcgaaaggggatggatgcagttgtgcacctcgcctgcgcttaaaggagcacccttcgttgctgtcgacctcatgcttcctccggatccccctcaccgcctgctgctccagcggcgagagcgggaacagctgcccgctgacccggcagagtgagctgtggttgtcgtagaggatcctctggttacagtttttgtcgcagatgtgcgtggtcccggtcagtttgcaacggtacatgttgccaaagacgtgctcgttctggcaattcttgtcacacttgtgactagggattggcccttctgtgttaagaatactggacaagtaaatcacattgctgggctcagcaatcacggattttccaaatacctccatcgaaacgcagctaaaatctcttcacagattcccctcttttctcggtttcggagggatcagaagtttcgtaatccactccaacccccaagcccccagatcgaccgaaaacaacacgaatcgtgaccccccccccacacacacacacacacacgaaacaccacagaaacctcaggtaaagggagggacccggacgcgtgggtcg

SEQ ID NO: 47604 - DNA, 1920 bp, Oryza sativa
  Clone ID: PAT_MRT4530_50356C.1
tttttttttttttttttattaactgatgtatgtatctctgattcagcaaattgtcgagattaggaaattgctatttacaaaaaatactacggaattgattcagggatagagactccctttgttagcttttttgaattgcaaagggcacgccggagcgcaccagtattttcataattaaatagaagagccagggtttcacttgtttttttaaaacaaaaaaatacagaacaaaatatgcttgtgctgaagcaggctagtcggatagagcgacagaagttgcaggaatgtctgctgtctccagagagtttctactccaaattacagatgatagctactttttgttgatccctccaaatgcaacagcttgcttgggcacccaaagtgcaaggttcagctaaaggctagcgctcttcttcgataccagcctagagtttcagtggctctagtcgtagtaccaaagcttcatgtcttctgggtcatgatctggaattggaaatcatgctgctcagcacgagacgtagttatcagattaggctgcaaaaggatccaggtggtccggtgtaagtagttcttttcctcccacaaggtgacagaacgacagttcagcagtttacctgcacaagaaaggaatgggttaacactcaaaaagaaaaaaaatcataccatactagtatatcaaacatacaaagatatccacataaaggttatcttgatctttccaacatgcacaagatataagtatccttaagaagacatggaatagaagggttatggctaagtggaagtagcgttaaacacgattatgcagtataggaaaataatctaagcgatagcatcaaatgattatcaggaagtactatgcaattcagaataggcggttcaaccaaaattacgagttacaacaaggtcccataaattagaactgatactacatagacatttattcagtgcatccaaggagagtctcatatcccttcgtaagtctataaagaaggaagctcttatagttccatcctgtcaaagggagaaaggggtcgaaacaacggcattagccggctgtgggcaagaaaagacggattctcgttatctctagctcaggtccatgccgtctccaacttggcttgggattggagacacagcggtgtaggacctctcgaaagaggatggatgcagttgtgcaccacgcctgcgcttaaaggagcacccttcgttgctgtcgacctcatgcttcctccggatccccctcaccgcctgctgctccagcggcgagagcgggaacagctgcccgctgacccggcagagcgagctgtggttgtcgtagaggatcctctggttacagtttttgtcgcagatgtgcgtggtcccggtcagtttgcaacggtacatgttgccaaagacgtgctcgttctggcaattcttgtcacacttgtgactagggattggcccttctgtgttaagaatactggacaagtaaatcacattgctgggctcagcaatcacggattttccaaatacctccattgcactgctgctaaaatctcttcacagattcccctcttttctcggtttcggagggatcagaagtttcagtaaggctcgcgacgcgcggaggagctcacaagcgaagatggagggaggaagaagcggatgaaacagcgagcgggggacgcggaaggaggaggacctcgtcctctctctctcactctcgcaacgccgcgtggacccgcggagcaccaacctcgcagcgagccgagcggagcactcgagcggagcaatggcagggagaggagggccagacagcccggccggtcatgtcgaagaacaccctcgtgttcgacatcgccgccgcgctagggttttgcgactccacagatggggaataccccccgttttgtttgagtttttgtgctgtaacaaatc

SEQ ID NO: 47605 - DNA, 419 bp, Oryza sativa
  unsure (1)..(419): unsure at all n locations
  Clone ID: PAT_MRT4530_50357C.1
caagttcntcctctccnccatcgtgctcnccgtcctcaccttcncggcagcgcnggagctacggcggctacggcgacgtcggcgagtactgccgcgtggggaaggcggtgtcccggaacccggtcccatcgtnccggaactacatcncgcggtngtncgcgtcgccggggnccgcctngactccggcaagcagccgccgcngcagtcctggagccgtgctgccgggagctcgccgcagtnccgatgcagtnccggtgcgacgcgttgagctgncttggtgcgtggcgtggtcacggaggagggcgaccgcgtcgtgngaatgaatctcgcagcacgaggcgcccgggtgcgactcgcgaacgatcgccgggattnagcgcgctgacggactacggccggtgcaactgcagcacanttgn

SEQ ID NO: 47606 - DNA, 493 bp, Oryza sativa
  unsure (1)..(493): unsure at all n locations
  Clone ID: PAT_MRT4530_50358C.1
gcggtatctacccagactacaacactggtgggtggagcattcccaccgtcggtggtatctggtatttgattgtagcagtatagtagtacaggnanagnaaaaataaagtcatgcatcatcgtgtgtgacaagtgtgaaacatcggggtgatacaaatctgaataaaaatgtcatgcaagtgttgagggggggaaaaaaaaaaaaaaaaaaaaaaaaaaaaaaaaaaaaaaggagaaaaaaaaaaaaaaaaaaaaaaaaaaaaaaaaaaaaaaaaaaaaaaaaaaaaaaaaaaaaaaaaaaaaaaaaaaaaaaaaaaaaaaaaaaaaaaaaaaaaaaaaaaaaagggggggccctttttaagggggccaaattttactaccccttttttccaacgaaaaatttttttttaggggcccccaaaaataaaataaaggggtcccttttttaaaaacttctgaccttggaaaaaacccggggttaacccaaataaaag

SEQ ID NO: 47607 - DNA, 291 bp, Oryza sativa
  Clone ID: PAT_MRT4530_50359C.1
atggccgtagggattaagaaaggccatgatcaggtggctgctgcagcagcagcgctgctgatggtgttcttggtggcggctaccttccacttccaggctctccacgcgcgcccggtggacgcgtccgggacgctgcaccctagcagccacgacgacaacaccggcgcaagtccgccgccgccgacggcggcggcggcggccggcggcaggggtttaccgaagaggagctcgtcgccgtcgggatgtaccaactatggccccggaggcggcaccgtttgtcctcctcgctag

SEQ ID NO: 47608 - DNA, 114 bp, Oryza sativa
  Clone ID: PAT_MRT4530_5035C.1
atggcctctatccgatcggcacatctctccgatatctgcgtcgatctttttttcgttcatgctagctttgtccatggagagcaggaaacatcgatctcgtacccgagagcgtga

SEQ ID NO: 47609 - DNA, 351 bp, Oryza sativa
  Clone ID: PAT_MRT4530_50360C.1
atgtgtagagcggagaaatacgcgcatttttcatggcaaaatctaaaccgagaagcctctcagtttagcgttaaccagcgacgaaccaatttggttgtacacaactactatgcctctcgtgacgtgacggtggtggtagccacgcactatcccacctttgtatttggtccacaaatgttgttcacgggtttgtcaaaagtttctgatgggcttatttccttatgggccacatgctgcgggcttcaaataactatggcccgaataattttcctgatgaaccaagcctgcagcaaccatcggtttgtttcgtaccaaaccacagagaaaaattccgaacataaaaccgtgaag

SEQ ID NO: 47610 - DNA, 637 bp, Oryza sativa
  Clone ID: PAT_MRT4530_50361C.1
cccgggctgcaggatgtaatgtagattttttttttgaaggcgataaagtataggtggatcaattcatgttgattaaaaagtccgactgaagtacgacagtgaggcctaaggaataaatgactttttgttgcattttattttcaggaatgaacatatgtagtaacctggtagtagtttccataggtagcacgcactagcaccggctaaataacatgcaactatgcaagtgcttgacacaggggcacttgctcttatcttcttagtttccaatcagcttagcaatatagctttgggaattgggaaagtaagtaaacctttatagttctaacatagaaaagtttctggcttaatgtagtcgaacaccatgtttttggtcttacggttgcatagtcttgaatcatttgtgtgagccggcagtttgcagggtgttactgcagaacagtaagagatatacctttattcttcaactaggaagatagcccgcgcaatgcgcgggcatgcatgtgtattactttgctaaaaaccggcttgacaaattaatttcaaactaaaagtaagatttttttcattctttttaatttaatgttcatcggctcgctcttttcttatgaaatattaagaatttattgatgaatat

SEQ ID NO: 47611 - DNA, 1825 bp, Oryza sativa
  Clone ID: PAT_MRT4530_50362C.1
atggagtttctggtttctgctgtggcaagtgatcttatcggccggttcatctcttctttagcgcaaaattacaacaaccatacttgtaaggaggatgatcgtagaaggctggagcgcatcttgctgaggatgcactctgttgttgaggaagcagaaaggcgccatatcacaaatcaaggaatgctcctgcagctaaagggacttattgagggattctacctcggatactacatgctcgacaagatcaagttccaaccctccgaagaagagagcatcgaagatgaggtgagtcatgagattcagtcatttgccttgtctgcctgtaactctcgcaagcgctttcgttttgctgatgccataagaaaacgcacaccagtagcctttggtagcaagagcaaaacaaacctgaaagatgttgttgatggtttagaaactaagattgcagatatgagggaatttgtcattctccttggtagccagactcgtctaccacgtcagccttacagtacatatctatacatagataactgtatgtttggtcgccgtattgagaaggagcaagtcatcaatttcttgctttgcaatgatcctcatgatccatatgttagcattcttcctattattggccctcaaaggattgggaaaaaaacttttgtgcaacatgcttgcctggatgagagggtgcgcaactgcttctcccatatatttttctttaaagaagacaatctgaagaccggagagctctcgcttaactccaaggcttctcaagggaaatatttgtttgttattgagttcatttgggatgtggatgaggcagcttggacaaaatttcaatcatatttgcagaatatgcccggtactggaattaaggttgtagtgataggtacaacagaggacattcttaagtttgggacagcccaacccatcaggctgaagaggctgtctgaagaagagtactggtactacttcaaggcgcttgcctttggaagtatggaccctgatgagcatccaaagctagcatctctgggtatgcagttggctactgagatgaggggaggatttcttggtgcgaccgtagtaggtggactattaagagctaatcccagcacccagttctggcagagcatgttattatgcataagagaggtggcacaaaagcacttgtcttcctttggtgtacaccctgaagatcttcttgaaagaaatgcccctcttgatttcaccagggtagcctttgtgggtgctcaagttcaaggctgcctggtttacgatgttagggtggctggccctggaagtgagctaccaaaactaacatcacaagatttgaaactgggtgctgatattcctgctgaagacaagtttgatgtgctggtatggaaatcccgcatcccaccgtactctaactacatagttacttatgagaaacaaaaacgacggtacaaggttggcaggaggaaccatcaagcattgagagaaatcaagctcaaatcttaatttgggggagaactctacaaattaagaaattatatcgtcggtaatgtaatttaaaaggcttgctctgactactattggaataatttgtacagttcagatcaatgtagcacttgtgtctctactgtaggttaaaatgtgtatatttttattaagaaaaactctgttgtatctgttcctattagtttggatatgtgaaattcagtcagttacagttgttaccctgacttgtatttgcatgtatgacggaaaccttttgtaaagaaactacttcatgtttctgactatgtgacctatgtatgaacaatttaatttacacaatatctgtttgggc

SEQ ID NO: 47612 - DNA, 346 bp, Oryza sativa
  Clone ID: PAT_MRT4530_50363C.1
cggacgcgtgggcggacgcgtgggggagcgcgccgtgcaccgcctatcacaatgtcgaccgacgccgccggcgtcgctgaccagagctggtgcttagccactgtcaccccgcgctcccgcgccacagtcgtcgtcagcctcgcctccccatgaccgtgctgctgctcctgctcctccaacagaagcaacctcccggcccccttccgcccacgccttatgcgcaacacccccgtctatgacgcccccgtcgcccccgccgcgatggacgccgccgtcgaccgactcatggatgggtgcgccaagatcaagaccagagtctatgacaagaagccagagctcttcgagc

SEQ ID NO: 47613 - DNA, 2745 bp, Oryza sativa
  Clone ID: PAT_MRT4530_50364C.1
atggaagaagatgaagtagaagatgagaacattccggactgggctcagtatggcggatttgaagaaaacacaatgggcgaggcggagctggatgttgaagggaatgacggtgctgatgaacttggtcaaatattgcgggacttacaggaggactgcgaaagtgaaaaggaggtgcagaaactgaagcgcatgttagcggaccacagaacagcgttgtacccaggttgcgagaagggctacaaaaagttgagtaccatcctagaattcttgcaatggaaggttaaaaatggtgtgagtgacaaggcattcggcgagttattgaaactcgtaaagaacattcttccggaggggaacgaattgcccgaaagtacatacgaagctaagaagacagtctgccctctaggtctggaagtacagaagatttacgcgtgtccgaacgactatatcctgtatcgcggtgagtacgaaaacctagaagcatgccctgtttgcaaagcactacgatacaagataagacgagatgatccaggtgaagttgacggacaacctttgaagaagagaattcctgctaaggtgatgtggtattttcctataataccaaggctgaagcggtttttcaggaacaaatcacaagctagaatgatacggtggcacgcagaagaacgtaaacaggatgggatgctgagacaccccgctgacgggtcgcagtggcgaaatatcgacagaacatttaaagacttcggcgaggatgcacaaaacatgaggtttggtttaagcactgatggaatgaatccgtttggagagatgagcagtggccatagcacctggccagtcaccatgtgcatctacaatcttcccccttggctatgcatgaagcggaagtacatcatgatgccgattattattcaaggcccgaagcaacctggtaacgacattgatgtgtacctaagaccattggttgaagatctgaaagtgctgtggaggaaagagggcgtccccgtgtgggatgaggacaagcaggagcaatttaacatacgagcgttgctattcgttacaattaacgattggcctgcacttagtaacctatccagacaatcaaacaaggggtacaacgcttgcactcactgtttggatgaaactgaaagtacttatctgaagcattgcaggaaggttgtgtacatgggccatcgtcgactccttgctgcaaaccaccctgtacggaaaaaaggcaagcacttcgaacagaaggcataccatcgtactaagcctaaacatcgcaacgggaaagcagtgttcgaaatggtgaaggatctgaaagtagtatttggaaaggggcctggcagccaacctatagagagcgaagatggtcacgcggcgatgtggaagaaaaactctattttttgggagctaccctattgggaggtcttggacgttcaccacgcaatcgacgtaatgcacctcactaagaacctttgcgtaaacctgctaggcttcttaggtgtatatgggaagtccaaagatacactcgaagcacgcaatgatctcaagcatatggaacaacgcgagggctttcatccggaaccgaacgagaaaggaagccattacttaagtccggcgagctacaccctaagcaaggaagagaaggagagtatgtttcaatgcctagagagcatcaaggtaccgtccgaatactcctcgaatgtaaagagaataataagcacgaaggataagaagttacaaaacctaaagtctcatgactgtcacgtgcttatgacacagctgcttcctgttataattcgtggtatccttcctgataatgtgcgggtaacaataacgaagctttgtgctttcatgaacgcaatttcacagaaagtcattgatccagaaagtttagccgcccttcagcatgacgtggtgcaatgccttgtcagctttgagttgatctttccaccgtcattcttcaatataatgacacatcttctgtgccaccttgtaaaagagatcggtattctcggtcctgtgtacctacacaacatgtttcctttcgagaggtacatgggcgttctaaagaagtacgttcgtaaccgttctcgtccggaagcaagcatcgcgaaggggtatggaacagaggaggtcattgagttctgcgtagattttattgaagacctcgagccaatcggggtacccgaatcaatccatgaggggagactacggggaaagggcacacttggaaggagagcaattatgactgtagacaacgatttattccgtaaaggacatttcacggttttgcaacaatcttcgttggttgctccttacattgatgagcaccttgcgattgttcgctcagaaaacagtggcaagtccgatgcctggattacacgccatcatattgatactttccccgcttggctgcgagaacacctcctgggtaacgagacgattgaccgacaactagccttcttggctaggggaccctccggctcgaacatggatagcaaaccaaagaaggggaaagggcccgatgagccaagacgccatgttgttctcccaggcaagaggaaaatcgttggagtcgaggataagactgacgaaaattacgatctgtttgaggggcaacctccgtttgcagtgacggttgacccgagcatcatactatcaaaggaggacacgccatactcatgcaacgatcatagcgaaggaacaatagtgaggagaaagtacgtgaggaagacagtgacctag

SEQ ID NO: 47614 - DNA, 2856 bp, Oryza sativa
  Clone ID: PAT_MRT4530_50365C.1
atggatcggcaatggatgtacgcggattggtggtcgaaagagtttattgacggcgtgcattattttttgggtggggctaatgataacaagcgtaacggttttataagctgtccatgtgacaagtgcaaaaaccagaaggagtattccaccacacgaactattcatgcccacctgtttcagtgggggttcatgcgtagctacaattgttggacctcgcacggagaggttggggttgcaatggaagaagatgaagtagaagatgagaacattccagactgggctcagtatggcggatttgaagaaaacacaatgggcgaggcggagctggatgttgaagggaatgccggtgctgatgaacttggtcaaatattgcgggacttacaggaggactgcgaaagtgaaaaggaggtgcagaaactggagcgcatgttagcggaccacagaacaacgttgtacccaggttgcgagaagggctacaaaaagttgagtaccatcctagaattcttgcaatggaaggctaaaaatggtgtgagtgacaaggcattcggcgagttattgaaactcgtaaagaacattcttccggaggggaacgaattgcccgaaagtacgtacgaagctaagaagatagtctgccctctaggtctggaagtacagaagattcacgcgcgtccgaacgactatatcctgtatcgcagtgagtacgaaaacctagaagcatgccctatttgcaaagcactacgatacaagataagacgagatgatctaggtgaagttgacggacagcctttgaagaagagaattcctgctaaagtgatgtggtatttccctataataccaaggctgaagcggtttttcaggaacaaatcacatgctagaatgatgcggtggcacgcagaagaacgcccgaagcaacctggtaacgacattgatgtgtacctaagactattggttgaagatctgaaagtgctgtggaggaaagagggtgtccccgtgtgggatgaggacaagcaggagcaatttaacctacgagcgttgctattcgttacaattaacgattggcctgcgcttagtaacctatccggacaatcaaacaaggggtacaacgcctgcactcactgtttggatgaaactgaaagtacttatctgaagcattgcaggaaggttgtgtacatgggccatcgtcgattccttgctgcaaaccaccctgtacggaaaaaaggcaagcacttcgaacaaaaggcagaccatcgtactaagcctaaacatcgcaacgggaaagcagtgttcgaaatggtgaaggatctgaaagtagtatctggaaaggggcctggtagccaacctatagagagcgaagatggtcacgcagcgatgtggaagaaaaactctattttttgggaggtaccctattgggaggtcttggacattcgccacgcaatcgacgtgatgcaccttactaagaacctttgcataaacctgctgggcttcttaggtgtatatgggaagtccaaagatacactcgaagcacgcaatgatctcaagcatatggaacaacgcgagggccttcatccggaaccgaacgataaaggaatccattacttaagtccggcgagctacaccctaagcaaggaagagaaggagagtatgtttcaatgcctagagagcatcaaggtaccgtccggatactcctcgaatgtaaagagaataataagcacgaaggataagaagttcacaaaactaaagtctcatgactgtcacgtgcttatgacacagctgcttcctgttataattcgtggtatccttcctgataatgtgcgggcaacaataacgaagctttgtgctttcatgaacgcaatttcacagaaagtcatcgatctagaaagtttagccgcccttcagcatgacgtggtgcaatgccttgtcagctttgagttgatctttccaccctcattcttcaatataatgacgcatcttctgtgccaccttgtaaaagagatcggtattctcggtcctatgtacctacacaacatgtttcctttcgagaggtacatgggcgttctaaagaagtacgttcgtaaccgttctcgtccggaagcaagcatcgcgaaggggtatggaacagaggaggtcattgagttctgcgtagattttattgaagacctcgagccaatcggggtacccgaatcaatccatgaggggagactacggggaaagggcacacttggaaggagagcaattatgactgtagacaacgatttattccgtaaaacacatttcacgcaccttgcgattgttcgctcagaaaacagtggcaagtccgaagcctggattacacgccatcatattgatactttccccgcttggctgcaagaacacctcctgggtaacgagacaactgaccgacaactagccttcttggctaggggaccctccggctcggtaactacattccaaggacacgatggtccaactagcacatattacggtgtcatcgacaacatttgggaactagagtatggacccctgaaggtccctctgtttcggtgccaatgggttaggctgactggtggaggcgtaacgattgatgacagcgggatgacaacggttgacttaaataaggtaggatactcagatgaaccattcgttctagccaatgatgtaatacaagttttttacgtgaaggacatggatagcaaaccaaagaaggggaaagggcccgatgagccaagacgccatgttgttctcccaggcaagaggaaaatcgttggagtcgaggataagactgacgaaaattacgatctgtttgaggggcaacctccgtttgcagtgatggttgacccgagcatcatactatcatag

SEQ ID NO: 47615 - DNA, 2436 bp, Oryza sativa
  Clone ID: PAT_MRT4530_50366C.1
atggaagaagatgaagtagaagatgagaacattccggactgggctcagtattgcggatttgaagaaaacacaatgggcgaggcggagctggatgttgaagggaatgacggtgctgatgaacttggtcaaatattgcgggacttacaggaggactgcgaaagtaaaaaggaggtgcagaaactggagcacatgttagcggaccacagaacagtgttgtacccaggttgcgataagggctacaaaaagttgagtaccatcctagaattcttgcaatggaaggctaaaaatggtgtgagtgacaaggcattcggcgagttattgaaactcgtaaagaacattcttccggaggggaacgaattgcccgaaagtacgtacgaagctaagaagacagtctgccctctaggtctggaagtacagaagattcacgcgtgtccgaactactgtatcctgtatcgcgaagaacataaacaggatgggatgctgagacaccccgctgacgggtcgcagtggcgaaatatcgacagaacatttaaagacttcggcgaggatgcacgaaacgtgaggttcggtttaagcacggatggaatgaatccgtttggagagatgagcagtggccgtagcacctggccagtcaccatgtgcatctacaatcttcccccttggctatgcatgaatcagaagtacatcatgatgccgattattattcaaggcccgaagcaacctggtaacgacattgatgtgtacctaagaccattggttgaagatctgaaagtgctgtggaggaaagagagcgtccccgtgtgggatgaggacaagcaggagcaatttaacctacgagcgttgctattcgttacaattaacgattggcctgcacttagtaacctatctggacaatcaaacaaggggtacaatgcttgcactcactatttggatgaaactgaaagtacttatctgaagcattgcaggaaggttgtgtacatgggccatcgtcgattccttgctgcaaaccaccctctaccctattgggaggtcttggacgttcgccatgcaatcgacgtgatgcacctcactaagaacctttgcgtaaacctgctgggcttcttaagtgtatatgggaagtccaaagatacactcgaagcacgcaatgatctcaagcatatggaacaacgcgagggccttcatccggaaccgaacgagaaaggaagccattacttaagtccggcgagctacaccctaagcaaggaagagaaggagagtatgtttcaatgcctaaagagcatcaagctgcttcctgttataatttgtggtatccttcctgataatgtgcgggtaacaataacgaagctttgtgctttcatgaacgcaatttcacagaaagtcatcgatccagaaagtttagccgcccttcagcatgacgtggtgcaatgccttgtaagctttgagttgatctttccaccgtcattcttcaatataatgacgcatcttctgtgccaccttgtaaaagagatcggtattctcggtcctgtgtacctacacaacatgtttcctttcgagaggtacatgggcgttctaaagaagtacgttcgtaaccgttctcgtccggaagcaaacatcgcgaaggggtatggaacagaggaggtcattgagttctgcgtagattttattgaagacctcgagccaatcggagtacccgaatcattccatgaggggagactacggggaaagggcacacttattacacgccatcatattgatactttccccgcttggctgcgagaacacctcctgggtaacgagacgattgaccgacaactagccttcttggctaggggaccctccggctcggtaactacattccaaggttatgaaatcaatggatacactttttacacaagagcccaagagaaaaagagcacgaaccagaacagtggtgttcgtatcgatgccataggacacgatggtccaactagcacgtattacggtgtcatcgacaacatttgggaactagagtatggacccctgaaggtccctctgtttctgtgccaatgggttaggctgactggtggaggcgtaacgattgatgacagcgggatgataacggttgacctaaacaaggtaggatactcagatgaaccattcattctagccaatgatgtaacgcaagttttttacgtgaaggacatggatagcaaaccaaagaaggggaaagggcccgatgagccaagacgccatgttgttctcccaggcaagaggaaaatcgttggagtcgaggataagactgacaaaaattacgatctgtttgaggggcaacctccgtttgcagtgacggttgacccgagcatcatactatcaaaggaggacacgccgtactcacgcaacgatcatagcgaaggaacaatagtgaggagaaagtacgtgaggaagacagtgacctag

SEQ ID NO: 47616 - DNA, 225 bp, Oryza sativa
  Clone ID: PAT_MRT4530_50368C.1
gcacgaggaattgttttagtagaggaaactaaaggagtgacagtgacttcgcttccatagaagacttacaatgactagttcgggcttgttcggtgtggagaaatttgaagtcataggaatatgaaaagtggaggaatcggaatgtatacacatatcaatccataggaattttgaaaaaaaaaaaaaaaaaaaaaaaaaaaaaaaaaaaaaaaaacaaaaaaacaa

SEQ ID NO: 47617 - DNA, 511 bp, Oryza sativa
  Clone ID: PAT_MRT4530_50369C.1
catgaatccaaatgttctgcagatgccactcatggtgctgcagaaaatgggaagccagattctgaggaaatatctgctccaatggatactgatgccaaggttgagccattgataaagaatgtgaagaaaattgatgttccagtttctggattggtttatggtgcactggggtctgaagaattggtgaaagcttctgagaatgagtatgaaatggctcttcaggacagagtaatggaagaaaccaaggagaaaaagaatgctgtcgaggcttatgtttatgacatgcgtaacaagctctatgacaagtacaacgattttgtcatgtctgagtacaaggaagggtttattgccaagcttcaggaggttgaggattggctgtacgaagatggtgaagatgagacaaaaggggtttatattgcaaagctggaagaacttaaaaaggttggtgatcctattgagatccgctacaaagagtgggctgaaagaagctcttctattaaccagctggtac

SEQ ID NO: 47618 - DNA, 822 bp, Oryza sativa
  Clone ID: PAT_MRT4530_5036C.1
tcaaatagcagaagtagctatcacccggagaccaggaaagctaatatgaggcagttggtggcgagttagaagcaaatgacaagcatggtatcttagtaatgacgagctgatctcgacgcatgacatgaagtgggtaacttgtatgaggttgactccaaagatatgaactatgcaaagttctggaactgaatccccatcttcaagtgccgcaacccagtcgaagtcagctaaaggttcaaccagggataagtcaggtgcagagaagattccatctgtcatcgccttcctcccgccgcgcccgccgcccgcccgtgccctagcgccgccgccgccgctgaatccgccgcatcccgccttccccgcgcgccttcggttcgccgccgacgtcgctccggtcctccgcccgactcggcgccacctccttcggcttcgccgagtggttgccgaccccgtccgccgctccgcttcgcccgccgactgccggagcaccgtcgccctcggcatcccgaaccgcgccgtcgccttcctccgctccggttcgccgccgccgtcgctccggtcttcctcccggctcggcgccacctccctcggcatcgccgcatcgccgtcgacctcgtccgcgccttcgtttcgctcgccgaccgtcggagcgccgccgtcatcgttatcccgagccgcgccgccgccttcttccgctccgggcgccgttctcgtcgtcgtcgttgtcccggggtgagccgtggaccgtcccttcactttccccctcctctccgctctctcgggcgctgctccgccgcgccgatggtcgccggcggtgaccat

SEQ ID NO: 47619 - DNA, 488 bp, Oryza sativa
  Clone ID: PAT_MRT4530_50370C.1
gtaatatatatatcaggtaaagttgacagtaaaaaagttactaattgtttgctacagggaaaggttgggttgcggggtaggtggctgctggggacacagggtaggaggggggtgggggtgggggtgggggtagggatgaaaaaggagcggatacggacggataatgctcataccatattcgttttcatattttttatcggatacgaaaacgaatacggatagctcgaatatggaaacaaatacggattatcttgaatacgaataagaatcgaatatgatcggacacgaatacggaaacaaatttttcggatatccgaattattatccgtatccgacggaaaccctgataccatattcgtattcgtatccgggagaaaatattcgtattcgtatccgtatatgaaatatccgagaattatccgatccgaaaggtatccgtatccgtttttatccggagcggatggaaactatccgctccgttttcatcc

SEQ ID NO: 47620 - DNA, 473 bp, Oryza sativa
  Clone ID: PAT_MRT4530_50371C.1
tagggatgaaaacggagcagatagtttccgtccgctccggataaaaacgaatacggatacctttcggatcggataattctcggatagttcggatacggatattttctctcggatacgaatacgaatatggtattaggatttccgtcggatacagataataattcggatatccgaaaaaattgtttccgtattcgtgtccgatcatattcgattcttattcgtattcgagatagtccgtatttgtttccgtattcgagctatccgtattcgtttccgtatccggcaaaaaatatgaaaacgaatatggtatgagcattatccgtccgtatccgctccgaccacccgcgactgcccctggccgccgagcctcgccgccggccccgcgcagaccatggtgatcggcgccagcggccgcctcctcgccgtcggcgcctggatgggctcacgtgtaccgtcaccccagacatgtccac

SEQ ID NO: 47621 - DNA, 596 bp, Oryza sativa
  Clone ID: PAT_MRT4530_50372C.1
gactgcatattgaaaagtactcgccagaccaggagggcacacagcgctgcacctgtacatgattgacggcactaacagcatcttccggccctctgatatctgcaggaggatgctccggttgctcattttgagctgcaagagactacaatgatcacaactcaagattcttacatatcttgcatcagattcacaatggtagcccttgcgctggacacggaaggcacgaagggtactctgagacgacactgcaacttacaaggacccaactttcctccgagaagcgcccagaggattcgacaaagctgacataaacagcattgcactatcacaccagtgctcactggccggcagtagccagggacacagcgaactgtgccagtaccttacagtctacacagcgagagctgcaggctaagatgatcaggatgaacctcacgaccaatctatgtccacgcctaaatcacccgaactatgcagttctacccaacctacactctgctaactctggctcccataccagcgcagcattctcattcatgaaaggaatactatcgaagtactgcagataaaagtggacactttgctcatctgcatgt

SEQ ID NO: 47622 - DNA, 1606 bp, Oryza sativa
  Clone ID: PAT_MRT4530_50373C.1
ctacggcccgtcctcgccgccggcgcgcctccgggtgaaccccaacgccgacgtcgccctcgccggcgccgacttcgtccgcaaccaccgcgtcctcggcgtcgacttcgcctccgtccacgtctacccggacacttggtaagcggcaacaggctaacagccagccgccgcggcggccggagacgcagagatgtcgcagctctacacaccctgaaccagccgggctccgagcaatggcacgacgagcccggcgagacgttgagcttcacctcgcgcagcagcctgtcccacagcctcagctcgccggcgaaggtcgcggcgtcgccgccgtcgccgagcaggagccgccgcatgtccatccacacgaacagcccggccggaaccccgggaggcccaggtccttggacaggctgtacacgacgtgcacgcggtcggcgacgccgacgtcgccgtcgtcgtcctcgccgcggtgccgtgcgcgcgaggacgacgactcgacgagctccgccacgctgacgaggtccggcgcggcgaagacggagccggagtagatctcgtcggagacgaggtggatgtcgttgcgcgccacgaagccgaggatgccctcgagcgcctcgcgcctcgccgtggtgccgagcgggttggacgggttcgtgatcaggacgccgcggacgcgcatgcccgccgcggcggcctcgtcgtgcgccgcctggagcgcggcggccgtgacctggaacccgttcgcgcttcatcttaaccaaaaaccacccaaatcttttgacatgcggatgttgttttagcttgcctacgataaaataggggatgcatccgtaaaatcatttttaagttgtgttggggaccgtgatgactggagaaaggggaggggagaggcctgtggaggtggcggtgctcgttgccaaggtgggagcgttaaaggtgtttctatcgtatcgtaggtgacactctatcacattttgaagaccacgcataagagagatttacaccgtgaatggcataatggtcccgtcgagaacagtgcacactcattcatttttaccggattttagtagcgcatggtagcacgaagcggtttggcatactagaaaagagaaaacggcatatccgtttcgagaaacaaattaaccagctcggtaaaacgacaatggaaggatctagaaggacctgacagcaccggtactccctgacatctcggagtaccggtggactctagggatgaaaacggagcggatagtttccatccgctctagagaaaaacggatacagatacctttcggatcggataattcttggatatttcggatatggatacgaatacggatattttctcccggatatgaatacgaatatgatatcagggtttccgtcgaatacggataataattcagatatccgaaaaatttgtttccgtattcgtgtccgatcatattcgattcttattcgtattcgagataatccgtatttgtttccgtattcaagctatccgtattcgttttcgtatccggtaaaaaatatgaaaacgaatatagtatgagcattaaacgtccttttaaaaaaaacaacaaaattgtgacgacaattgaaacaa

SEQ ID NO: 47623 - DNA, 264 bp, Oryza sativa
  Clone ID: PAT_MRT4530_50374C.1
atgagcagcgacgcgctgtccatcttctccctgttcgggtgtccaagtaggtgcggtgcggaggacgacaaggtccgttaccgcggagtccgccgctccgacgtggtccggccggcgccgccttgtccccagccgcgtggtcctcctgccgagaccaaatctctggctgagtcgctggtgcgttgcacaatgggatgttcagaatcaggtgcagagaagacaagtctggtgaagggacaacgggatgctcaggataaggggtag

SEQ ID NO: 47624 - DNA, 399 bp, Oryza sativa
  Clone ID: PAT_MRT4530_50375C.1
tttacttaactaacaatgatctcgatgggggatccccttttcctctcttcaatagctcctcgctagggatgaaaacggagcggatagtttccgtccgctccggataaaaacgaatatggatacctctcggatcggataattctcggatagttcggatacggatacgaatacggatattttctctcggaaacgaatacgaatatggtatcagggttccgtcggatatggataataattcggatatccgaaaaatttgtttccgtattcatgtccgatcatattcgattcttattcgtattcgagatagtccgtatttgtttccgtattcgagctatccatattcgtttccgtatccggcaaaaaatatgaaaacgaatatgatatgagcattatccgtcc

SEQ ID NO: 47625 - DNA, 744 bp, Oryza sativa
  unsure (1)..(744): unsure at all n locations
  Clone ID: PAT_MRT4530_50376C.1
ccacgccgtccgcacaaattcatgtcatgagaactgtcaattcatgtcatgagaactgtcaattcattggtttgatcatgttaattcttgcatgtttaccctactacttctcaagtaggcagcacaaactcttctgctgagggattatatagcatgtttggcgcctgttgagcatgtccatggtaacatacttgtgtttggaaattgtgtgccctactattaatttgtctccaatggcccactaaacttttcttacgttttttttcctgaactatgtctacttcatatgcaagtgcaagctagtatgttgtaagaacttgcatggggatcgcttactgttgtctccaaaattttggtatcttgaatcctatttatccatatgtctttatgtagcttgcacctagcgaaggaaaatgaaaataatatgtctaactgcacagttgtttgttcttttttatataaaataatagcgtggtagtagtggccattctaattctggtggtcctttcttttgttaggaatatgttccatgttacaatcgtccagtcagaagacttagtaataagcgatgaatcgtccattgcttgcatgggcaagtattgcaagtgcttccttcaatagatttttgaatattgccatatccaaaacaatctgaaaacccttgtacttctccggtcagcataataatgcctntctggncctcctatntttcttctttgcctctttcatgccagtacactaatc

SEQ ID NO: 47626 - DNA, 428 bp, Oryza sativa
  Clone ID: PAT_MRT4530_50377C.1
cacaaactactcagacgcagacgcgctcgtccggtggccggtagggatgaaaacggagcggatattgacggataatgctcatacatattcgttttcatattttttaccggatacgaaaacgaatacggatagctcgaatacggaaacaaatacggattatctcgaatacgaataagaatcgaatatgatcggacacaaatacggaaacaaatttttcggatatccgaattattatccgtatccgacggaaaatctggtaccatattcgtattcgtatccgggagaaaatatccgtattcgtatccgtatccgaactatccgagaattatccgattcgaaaggtatccgtatccgtttttgtccagagcggacggaaagtattcacgtgaatgcttctggagggttccgccgtcttccaaattactact

SEQ ID NO: 47627 - DNA, 437 bp, Oryza sativa
  Clone ID: PAT_MRT4530_50378C.1
cggcggccacatgtagggatgaaaacggagcggatagtttccgtccgctccggcaaaaaacgaatacggatacctttcggatcggataattctcggatagttcggatacagatacgaatacggatattttctcccggatacggatacgaatatggtatcggggtttccgtcagatacagataataattcggatatccgaaaaaattgttttcgtattcgtgtccgatcatattcgattcttattcgtattcgagataatccatatttgtttccgtattcgagctatctgtattcgttttcgtatccggtaaaaaatatgaaaacgaatacggtatgagcattatccgtccgtatccgctccgttttcatccctagccacaggcggcggaggatggagcggcggccacaggcagcggcggcggacgacgcggtggccc

SEQ ID NO: 47628 - DNA, 223 bp, Oryza sativa
  Clone ID: PAT_MRT4530_50379C.1
gtgagttcatcaatgttgccatgaacacatgcttcacatggacgctatggtgctctctaccacacccccatcacgcagaggttgagccgtacagtaatggaggtcgccatcgggatcgctgccgtccatgtcaacgctcggttttccttaccgagatcacgtctctcctaaaaacaaatcaagaggggacagttcttctttcacctgtgtatttaactgcgtg

SEQ ID NO: 47629 - DNA, 1858 bp, Oryza sativa
  Clone ID: PAT_MRT4530_5037C.1
ttgacgcctgggcggacgcgcgtaaaaatcccaaaaacaaaaaataataaaaaaaaagaaagagagagacatttcgcatctgctgccctgcctcctctcccatcacctgcccattttttcacattgaggcccctctgaaaatattatatttacaactaggtccctggccgggccggccggccaccggaaggagcacctcgccggagaaggctttgtctcttctttttcttctcctcctcctcctccatcggcggcggcatggggttctcgctgtaccccatgaagacgtcgacgcgcatgctgtggagcaccagcttcttccgccataaggtcgcctcctccttctaagcccacgccctctcgggcggcggcggcgagccggcggcggagcgcgcggttggtaggtgcgcgtgcgtgcgtgaacgggagagcagcttcgagatcgggttttcttgggttcttggagaagggaggagaagagggggaggagagcatggatcccggccgcgtcgtgttcgactccggcgtggcgcggcgggcgtgccccggcggcgcgcagatgcttctcttcggcggcggcggcagcgccaacagcggcggcttcttccgaggcgtgccggcggcggtgctggggatggatgaatcgcggtcgtcgtcgtcggcggcgggggcgggggcgaagcggccgttcttcacgacgcacgaggagctcctggaggaggagtactacgacgagcaggcgccggagaagaagcggcggctgacggcggagcaggtgcagatgctggagcggagcttcgaggaggagaacaagctggagccggagcggaagacggagctcgcccgccgcctcggcatggccccccggcaggtcgccgtctggttccagaaccgccgcgcccgctggaagaccaagcagctcgagcacgacttcgaccgcctcaaggccgcctacgacgccctcgccgccgaccaccatgccctcctctccgacaacgaccgcctccgcgcgcaggtaatctcattaaccgagaagctgcaagacaaggagacgtcgccgtcgtcggcgaccatcaccaccgcggcgcaggaggtcgaccagccggacgaacacacggaggccgcgtcaaccaccggcttcgccaccgtcgacggcgcattggcggcgccaccgcccggccaccagcagccgccgcataaagatgatcttgtgagcagcggcggcaccaacgacgacggcgatggcggcggcgcggccgtggtggtcttcgacgtcaccgagggcgccaacgaccgcctcagctgcgagtcggcgtacttcgccgacgccgcggaggcgtacgagcgcgactgcgccgggcactacgccctctcgtcggaggaggaggacggcggcgcggtcagcgacgagggctgcagcttcgacctccccgacgccgccgccgccgccgccgccatgttcggcgccgccggagttgtgcaccacgacgccgcggacgacgaggaggcgcagctcggcagctggaccgcctggttctggagctgatcgatggaagcatggagcattggagccatgctatcaatgaatgaatgaatcaaatgaccttgagaccctcctctccgtcctttcttttgccctatttttaatcgctgttatatgttaattatgtgcaattaaagtgtacgtgttttgtcgtaagttgtgtttgttcaaattgtatgttttgaaggtgtcatgtattcatacacgatatgatatatagacgggatcatgaatgatactcggaaagattggaataattccatgtagtgttgagcaataataaacattttcctccgataagatgtttttatgatt

SEQ ID NO: 47630 - DNA, 1809 bp, Oryza sativa
  Clone ID: PAT_MRT4530_50380C.1
gtgggcatcttatacttgtatggagtatatcagtatatgctagttgcagacgttttacagtgcaactgtaactgttgctacaatgttactgaaagagaaacagaagaaaacaaaaacaacagtctgtatattccagtttgtattgctttcaatgctgtctgatgtacaaccgcattgtgatcgacagtgaagcaacaagttgcaaaactatttccagtgaaacacaaatctatggtatataatgagttgattttctatcaatcatgcatacaatcctccacacgaaatcaacaacaggcccaactgactgttaaaaataggatctcgatgaacgtgatgaacgagtggtgctgccctcatttcgatctttcttccacatgccctcaaagctcaggaagcatttgagaggtttcaccttccaacggtttctctgagatatttcattctggatataagacaattgttcaatgatcgttctaaagtcaggcctgctagcaggattttcactccagcattgttcaatcagctctctcaatccgtaagcataatgctttggaggagctctgaaaggtggcctttctttagaattatgtgccttctcaatttcattatttttcttgtcataaaaagggagacatccttcaatcatctcttgaagtatcaaagcaaatgagaagacatccactttagtatcatattcttcatttcgcaggacttctggagctacatacctacatgcattgcctggagaagttacagctttctcttctctaacttttcttctccattttagcatcttacacagatcgaaatctgccaccttcagatgtccagtgtcatccctcaatatgtttgaaggctcaaggtcacggtggatgatagcttgaggtttatgctcatgtaaataattcatccctcttgcaatatcaagagctaatttcactgcatatgacggttccagagcccctttcctactcaagtgcttgcgcaaatcacccttgggcataaattccattacaatcatcattgggctgctttgtgttacagcacctaaaaattgcacgacattcggatgccgtattagttgtagcacatcaagctcatctctgaatgcttgtactttgttctcgtccataattagatcgtcatcaagcttcttaacagcaaccagaatgcccctccatgttgctttcctaaatgtaccctttgatataccatttccattagtgaaatctagctcgttcggggaaatctcgtactcaggaacctcacggacatttttaacatgcataggagcaatcttaagcttggagccatgcttttccaagatcttgatcacatcatggttctggtaatgcaatgcgtctgccaaaggcgtgctgccccactggtcctcggcgacggcatccgccccacgctggaggagcagctcgacgacctcggcttgcccctcgcaggcggcgatgtgcatcgccgtgcggccgtcggagtcgcggaagttggggtcggcgccggcgtcgaggagctcctggatcccctcgacgtcgccctcgtgggccatgtacatcagctggaagcccatgaccccgaccgcctcgctcgacccctcctccgagctctcccccgcaccgccgcggtcgggcgccatcgacgactgcttccccagcttaaaccgcggggtcgccgcggccgtcggcgtgcttggcttcggctccatgtggcggcgcgggcgcgggcacgggaggcggctagggttccgatggggaggacgagacgagacgagagatcggatcaatcaaagcctcgtgc

SEQ ID NO: 47631 - DNA, 219 bp, Oryza sativa
  Clone ID: PAT_MRT4530_50381C.1
atgcgcggcggaagtgtggacgcgttgccctgcggcgttgggcccagtggtggtgggggcttccccgcgccacgtcccgcgtcgcgcggccgccacgtgccatcccaccagcccttggatgcaatggagagacacttccactatgtacccttgaacttggaccagggcttgtcattcttgggctgggaattggtgaacactctggactacctcggctag

SEQ ID NO: 47632 - DNA, 1946 bp, Oryza sativa
  Clone ID: PAT_MRT4530_50382C.1
atggaggctgcggcacggctctgtagcggcggtggcgaggtggaggcgccacgtgctaatgattcaaatttttgtgatgctcatgcttgggtggatggagctttgatggaggtggaggcggacggagcctgcggtggtggcggtggcggtggccgcgacagcaacgacaacgagcgaaaccattacatcgcggtggcgatgagggctccgagaacttcagaaaaactccccgcgtcgctctcgcgcgggcggctcggggggccaaaaaccctagccgcccacgcctccactccttccccctcacctcgccgctgccggagctcgccggcggcgtgtaaggaaggcggcggcgaggcttctctccttcgtggtgttcccctcctcggcgcgacgtggacggggcaccatccctcaccagcgcggtcagaggcggtggcgcggcagcgacgctgggcggcctgggtcgccgttggtgggcggcgaggtggcggcggagcattggcttcggcgaggccgccgttgggcttggcggcggtgtggagcgcgctggcggcggggtcgtctttcccgtggttggccaggcggtcgctgtgttcgaagagctcctccccttctttgtggggagcttcagaaagactcaggttgccaaggcgaggttgttcccggtccggtcccataggtcggattcgacgtggaggctggcggaggtggttggtgctgtggcagtcttgtcgttggcaagactggaagccggccggcggtggggcgtcggttgggtgtggtggaagccatgtgccgccgatgtttagatggtggtttcggattgggcaacggaccatggcggtagggggtaccgagcgaaagcttagcccaacctttgggccaacagtgactacgctttcgggtcgctttcgggtgtggtaaccctcctgagggcatggttgaggtacccctcctcccttggcgaggagctctgggtgaaaaccttgttccgtttttgggacggatgacgacggcgtcttttggcgtcgcgaccttcctgagggcgtcgttttagagtcttcgcgtcgtggtggtgttgttggcccggtggcgatcggtctcgcatagcgacggccggttcggtgctcggctcccctctctgtagcgtgtgtttgcggttggcacttggttcggggcgtgtgctctagtgcacatccttcctcgacaaccagcaaatgctcgctgctagtactagtacaagcgataggggggtctagaatgctcgctgtccatatattagatagataaactggtgagattttacagtcgacggcttgctgctcagcacttgcgttgtcgcgtccgtcatcaccggtgctgctattttctcggcattgtctgctgcttctagctataccctctaagtgtttcagcaggagcaccgacagcctagtaagttcatggtttccaacatggagtgccagacctcgtagaatttctccatgtaaaagcacgcggatacaaaaacgaatacggataactcgaatacggatagctcgaatacggaaacaaatacggattatctcgaatacaaataagaatcgaatatgatcggacacgaatacggaaacaaatttttctcggaacacgaaaaccaactcaacttcatattcgtattcgtatccgagagaaaatatccatattcgtatccgtatccgaaatatccgagaattatccgatccgaaaggtatccgtatccgtttttgtccggagcggacggaaactatccgctccgttttcatccctatatgcacctcattcgcgacactaactggattgacatatcctgcaaggcaccgacatcctataccaggatggctgaggataaggcatgtgcgcacatatactgtaacagatacccctcctccagcagcagcaactctagcatatcttctatcatccat

SEQ ID NO: 47633 - DNA, 2313 bp, Oryza sativa
  unsure (1)..(2313): unsure at all n locations
  Clone ID: PAT_MRT4530_50383C.1
tgctccagtcctggttcagggcaaacatctgggcataattcagtgggaggtgatatgctagcccagctcttttggcaacctagccgaggtagtccagagtgttcaccaattcccagcccaagaatgacaagccctggtccaagttcaagggtacatagtggaagtgtctctccattgcatccaagggctggtgggatggcacctgnatctccncaccacattaagcagaatatgggcctgtttggttggtgccacattttgccactcttgagccgtttattagagagagatcacgaaaaactccccaaaaatggcgtgggctacgactacgaggctaagataccagggtttatccttctcctcgtttactcctacgtactccgtacagttggatgccgatcggacggcggagtgcagctcgttgacccagccgatttcgttcacacgtggcggccgcgcgacgcgggacgtggcgcggggaagcccccaccaccactgggcccaacgccgcagggcaacgcgtccacacttccgccgcgcatcgctttcacaggcaacctcaaccaacactcgggactgggagggaaggaagattttacacacaccggacttaccgctataaagcgcgaaggccccccatccacgatgccgtctcgcaccgccccgttcatctctcgcctccggctcctccgaaccgccgccgccctctccccgttctcgtcctccgcgccgccgcggcacagcccccgcatcctccgcgctatccctgtcggtgcgcctcacccgccgcgcgtctccgcagccgtctcgccgctggtccgtccggtcgccgccgggttcgcgctgttcagcatggccaccgccgcctcctccgccgcatccgtccacgacttcaccgtcaaggatgcaagtggcaaagatgtggacctgagcaccttcaaggggaaagtcctccttatcgtcaatgttgcatctcagtgtggcttgaccaattccaactacacggagctgagccagttgtatgagaagtacaaggaccaggggttttgagatccctgctttcccatgcaaccagttttgttggacaggaacctggcactaatgaggagattgtccaatttgcttgcacccgcttcaaggccgagtatccaatttttgataaggttgatgttaatggtgacaacactgcacccatctacaagtttctgaagtccagcaaaggtggtcttttcggtgacaatatcaaatggaacttctccaagttcttggtcgacaaagaggggcgtgttgtggagcgctatgcgccaactacttctccactcagcatggagaaggacatcaagaagctgcttggaagttcttaaaaccttaccgccggcgccaccagatgcactgctgcgttgcattgagcacttggaacttccaataatgttgtaataaaactgtgcttggaattgctgtattttcatttgcgtagccctgctgtgtaatgtataaagtattaacgtgtaatgaaattggcttactgcatcactttgcccctttattgaaatattatctcctgtataaaaaaaaaaaaaaaactgtgttcgttaaaaaaaaattgcagcattcatttatacgaaatgcatctccacttgaaaaatcactgtcggatccattgctacagttttttcttacgctttgtctcttgtgacatttcaggtggtcgggcatgccagaaatatgtcttctttgggtttggaagggcaatccatttaccagagaagagctgctaaattttcttctgtgcacagtgatattcatgtacgaagctatatatcttgccctgtttctccatgtgggagccctcatctgaggtcaagatctccacaacatcaaaatggtataatgtcaccctctccgatttcgagcccaagaactacttcaggtgcttccactcctctgactggtggtaatggagctattccttttaaccatgcaagacacctagcttacaataatgagggtttcacaattacatcgagatgtcttgatgagcccttgccaaaccagcctccagatccggtccttggtcgttttgttagagtgaaacaaccctcgctaggttttcaggagagggcagtccctgaagctgacattctgagccctcaatttggaaggatgggacatgtgagcgtgtggaatttgcatgataagccactgccttctgagcatgcttcacagaagggctttgaggatcgggtaaaacttaagcctccactggatttgagatctggccattgtacaggaggaaactcaactagaagtcca

SEQ ID NO: 47634 - DNA, 1338 bp, Oryza sativa
  Clone ID: PAT_MRT4530_50384C.1
tactagagtggcagtttgacaatggttgactcgctaagtcgatcagcaaatgtaacccacatattagcgacttccacctcatctcatcttcttacatctcccactgtctctctctttcatgtcttcctcctatctcatcttccagtggcttgtcaatagggatgaaaacggagcggatagtttccgtccgctccggacaaaaacggatacggatacctttcggatcggataattctcgaatagttcggatacggatacgaatacggatattttctcccggatacgaatacgaatatggtaccagggtttccgtcggatacggataataattcggatatccgaaaaaattgtatccatatttgtgtccgatcatattcgattcttattcgtattcgagataatccgtatttgtttccgtattcgagctatccgtattcgttttcgtatccggtaaaaaatatgaaaacgaatatggtatgagcattatccgtccatatccgctccgttttcatccctaactgtaagacacaaaaagacattcagattgagctgctcatttccaggttatatgattctaccgtctactgaatccagcaggctacatgtcaaagaaataaaagatacatggatcctttaaaaaaacatcaacaggtagatttgtagcaatctccacccacacaacacaatctgaatgcgcatctatgcagtgatctcggatttggcattcttagcattttcttcatctttggttgatgccgctgctgctctgtcctgctctttcttctgcgcccttaacagtgcgcgtcttgcccggggacgcatctcgcgcacttggcgtcgtggcatcataaaaggttcaagagggcgatcatggaatgggtgctcatttccagaaaatatcctcagtttacgatccctgtcatcacgcaatctattgcgaggaagcatgcgcatgacagctttgcgaattgcttcagttgggtctttttccatctggtccttgagtcttctttccttcaaatggccaatataccctgtgtgccagtagtagattttatcggtcatttttcttcctgtaacactgatatcttttgcattaagcacaacgcacatgtctccattttccacatgtggtgcataagttggcttatcctttccctgaagcacaacagctatttgggatgccaaccgtccaaggacctggccctttgcgtcaaatacacgccatctcaatccatctaaattgattcttctcaaacctgcaagtgctttcatgtcgctcgcctgctgtggttgctccgctgcggtggcggcggcggcgacggtggagcgcacgcg

SEQ ID NO: 47635 - DNA, 1013 bp, Oryza sativa
  unsure (1)..(1013): unsure at all n locations
  Clone ID: PAT_MRT4530_50385C.1
tgcagcagcgggggatggcggcgtcggcgtcggcgtcggcggcggcgtcgtaccttggcccgcgggcgcagcccatgaagcaggccggggcggcggcggcggcggccggcggcaagatgtaccgcggcgtgcggaaacggcactgggggaagtggatggaaaatatcctactgtcatataaatatacactaataattatatataaatattaaattattctattattcttttataattttttatttattatttattataattggtatgtattgtgctacttttgtttggacttccttattattttataaatatgagtgaattatataataaatatgtttttgataaatttacctagaattaattatttattttttttctttcattacaatcacgtatataatatatcttagtatttattttataatacatcttatttatttattttatttattttttatttttaattttattatttattttttatattatatttaagacttcaattactttattaattattatttttattatatacgtttttaatagtaattatatatttgaatttaaaatattaattatttatatttatatttttcatcacctgatattatttctattttttctataaatattttcattcattatattttttttaataactttttttattttatatttctttttttattattttagaataagttacancncanantctattgannaaaatattaaatgctattataattctaatcaagctatagactttttttaattaactatactaatttatttttttttataataaagttattattgtttgtatacttttgtttgtatattacaaaattctaatattttgcattaacttatatataatatcatttttttgtatctaagtatacttttacggaatatttttagttctatatttgctacgattctcattttatttttaatataattttatttttttttatgatggattattcccgggcaaatattttattgta

SEQ ID NO: 47636 - DNA, 206 bp, Oryza sativa
  unsure (1)..(206): unsure at all n locations
  Clone ID: PAT_MRT4530_50386C.1
atatatcacattctttgcaagggttagcttagttagantcttcccgcaatatgttataggaaaaggataaaacagcaaaaagaacntctcaaacaaaaatgaaaaaaaaatngcacatgcctaatccctnttgtacaatatgttatagtattatacatatttaccacnttttactntacttgctctctgtatggaacttgcctttt

SEQ ID NO: 47637 - DNA, 1999 bp, Oryza sativa
  Clone ID: PAT_MRT4530_50387C.1
atggttgaacacgtcggtggttggtgtcgtcggtctagcgtgtatcggtgtatggccggtgggcagggtggcttccagattgccatgcagttccagctgcgattggtccggaggcaaaatcaaacagggcctcagttttctgcatttgtacgcagagcatttatacgtaggtacacagtacatgctgatgaacttggggcaaagctagaggcagacgtacgacggtcaaaagatacgaacatcaagagaagaagcttcagggccgttggcgagtggagaagggcacggcggccgtgtagcctggaatctccggtgctcctccggcgagcggcggcgatggacgggggcggcggcgatgccgtggacggggaggcgagcggcgcccggttcgagtgggacgaggactcgcagctctactaccacgccagtactgggttttaccatgaccccgtcgctggatggtactatagcggtagagatggtcagtactacatctatgacaatggaaattacgtgccatggacaccagatgcgggcaatgaacccaaaacacataatccatgcgatgaatctaatcaagatttcctggaaccctcatcaggattggaacaagatataccagataaccagaatgaaacacaacggccaccatcagaatggttattgcacaaaaattctatgctcttgtttgatgaattttctttttacggagatagtagtgagacagctgaaaataaacctggtaacttcgcctcggaaaatgcaccatcctctccatgtgatgcttccttgcaccaaacagaagatgaattgcaaaatgagaattcgacagccgtgcatgaatctctgagtgaagaggaagagaaatggcttgctcagtatggtcaggtagagcaagaaattgatgatcaaccattatttccgagcatcgatctctgggattgggatatggtcaaagaatcagttagtaaaggtcaacccatggccaggcttgtgggacgtttagttaagggttctagtaagcctcatccttctctgcctgctcgtggtggccttctaagaactgcccctgtgcatgaagttcatcttgatcttgtgcgtgtttcatcaggaaaaatatacaggctaaggaaccctagcaggaaatacttagcctctttatcatcatatgactcgtccaacccaacaaaagactggggttttcccaacatatatgccaattccgacaatgatttggataaacagtcatcagcacagtgccaatcggaagtcatggatgtattttctatgaagggtgtttcagctgctagtgccaaggagcacaagataaatgcttatagggacagagctgctgagagaaggatcctacaccgtggtatagggataggacctggacagaaacaaagtagcagcaccaatttttatgaacatgaggaaacaagtgagggcatggatctgatgggaggtgcatcagtagatatgaacttccgttccagtggcttgaattctgccaagaaaatgatggagaacatgggctggaaggaaaggctgaaactgctgattgtgagcaagaacctgcggaattgcggaaagctggtaactgaagagcgggagaagattgtgaatattcctgacggaaatggatacggatacctttcggatcggataattctcggatatttcggatacggatacgaatacggatattttctcccggatacgaatacgaatatggtatcagggtttccgtcggatacggataataattcggatatccgaaaaatttgtttccgtattcgtgtccgatcatattcgattcttattcgtattcgagataatccgtatttgtttccgtattcgagctatccgtattcgttttcgtatccggtaaaaaatatgaaaacgaatatggtatgagcattatccgtccgtatccgctccgttttcatccctagtgtatagaaatcttgtgagcaccaacagttcatagaatatactt

SEQ ID NO: 47638 - DNA, 1708 bp, Oryza sativa
  Clone ID: PAT_MRT4530_50388C.1
atgagccaccggcgagtggatgcggcggcgtgcgactcatggaggcccccacccacgccgccgcctccccacgcccgccgcgcgctcgccctccgcgtgggtgggggtgggggtggcccggcgttcgcgtcgctcaccgtgcgggaggggggagggggaggggaggagggggaggtgggggaggggaaggggaagcagcagcagctgccggcggcgggggtgctggtgaggcacccgctggcgatgctggcgctggtgcccaacgccgtcgcgctcttcgcggcgggggcggccgcgggggccgtcgccaagacgatcaccgcgccgctcgaccgcgtcaagctcctcatgcagacgcacagcgtgcgggtggtgggggagagcaccaagaaagggatcggattcctcgaggctattgcagagatagggaaggaagagggcttgaagggttactggaaaggcaatcttccacaggttgctatgaacatgctgagagacgaaggtttggcctccttctatggaggcctgggtccgtctcttataggaatcgccccttacattgctgtgaacttctgtgtttttgacttaatgaagaaatctgtaccagagaagtataagagtagaccagagacatctctggcaactgctcttctttcagcaacatttgcaactttgatgtgttatcctctggacactgttagaaggcagatgcaaatgaaaggatcaccctacaacacggttttggatgctattccaggcattgtggaacgtgatggtctaattggactatacagaggttttgttccaaatgcattaaaaaatctaccaaatagcaggagatcgtaggtatttattttcctatttttcaaggtcttgcacaactgcggcaagatgggcctcactttcacgaagcttttcagccgcctcttctccaagaaggagatgaggatcctcatggtcggtctcgacgcagctggtaaaaccacaattctctacaagctcaagcttggagagattgtcaccaccattccaacaatagggtttaatgtggagactgttgaatacaagaacattagcttcactgtctgggatgtcgggggtcaagacaagatcagacctttgtggaggcactatttccagaacactcaaggtctcatctttgttgttgatagcaacgacagagatcgtgtggttgaggcaagggatgaactccacaggatgcttaatgaggatgagttgagggatgcggtgttgctggtttttgctaacaagcaagatcttcctaatgcaatgaatgctgctgagatcacagataagcttggtctccattccctgcgccaacgccactggtaaatccagagtacatgcgccacaacaggagagggtttatatgagggccttgactggctctcgagcaacattgcaaacaaggcctgattggatgaccagaataccacattacatagcagttgcattttctggagaacggaggagatggtcattttgatactgagatttggattattatttcactggagtgttcgttgaatatattgtatttcttcgttaggcttttcagatctggtttgttatgttacctagctactctctacaaccccttccggtattattaagagactaattgtcagcttgaactatatcatatattcatatacgatatacccgagtaatgcagttcttttcctcc

SEQ ID NO: 47639 - DNA, 1751 bp, Oryza sativa
  Clone ID: PAT_MRT4530_50389C.1
ccgcgcagccgcttcgtggtgtggctgcacggcctcggcgacaccggccgcgccaacgagttcctcgccgacagcttccccaccacggccgccttcgccgacgcccgctgggccttccccaccgcgcccaccgctccggtcacttgcaaccgtggcgaggtgatcacggcttggttcgccatcccggaagttcctattactgctagaactgccagagatgaaaaggaagtgctcaaagctgtggagcgtgtgcacgaaatgttagacggagaagtagctgctgggacgagtccttcaaatatattcgtttgtgggttaagccaaggaggtgctctagccatagcaagtgttctactctacccaatgactttaggtggctgtgttgtgttcagtggatcacttcctctaagcaaaacatttgctgagagtataccatctgaagctagaaaggtaacagagctgcagatatatttgcaaacaccagttttgtggtttcatggcatggctgacggggtggtactgtttgaagctgggcatgctgggtgtgcatttttacaagaaattggcatgcactgcgaattcaaggcttatcctgcacttgggcatacattggtggatgaagagctccagtattttcgacaatggatcaaggatcgtttatctcaaggaactggagttccagtgccatccttatctgacaagatggatctccagtagctgcttgtttttttagaaccaaagggcaggaatcctaggccccaatttttatagctccttcttgttcttgatgtggatattctagtccaattcgcccgcctcgtccccgcgcccatggcggcggcggcggcccgcaaccggagcttcgtgctgtggctgcacggactcggcgactccggcccggccaacgagcccatccgcaacttcttctccgcgccggagttccgcctcaccaagtgggcgttcccctccgccccgaactcccccgtctcctgcaaccatggcgctgtgatgccttcatggttcgacatccacgagctacccatgagctctggttctccacaagatgacagtggggttcttaaggctgttgaaaatgtgcacgccatgattgataaggaggtagctgatggcatccctccagagaacatatttgtttgtggattcagtcaaggaggtgctctcacattagcaagtgttttgctttatcccaagactctaggtggtggcgcagtgttcagtgggtggctgccttttggttcgtcagttactgagaggatttcacctgaagcaaggaagactccaattctgtggtcacatggaatagctgacaatgtagtattgtttgaagctggtcaagctggtccaccttttttgcaaaatgctggtttcagttgtgaatttaaggcatatccaggtcttggtcactcgatttccaaggaagagctatattctcttgagtcttggatcaagaatcatctaaaggcctctcaggagaaggaaaattaacattgctttggcctgccgtcactctgtggtacataaaatttggtgagaatatgttgacctttacggacactcatttggaagtttttatttgggattgatcaatgtgtcaacagatatttgactcgtaacggccatagccgcacatgtacaatcgctggagtttgtatgttcctggcatgaccaactgcaccttagaatttactatatagtgacaaagtattgaataaataccccgtgttccagtt

SEQ ID NO: 47640 - DNA, 291 bp, Oryza sativa
  Clone ID: PAT_MRT4530_5038C.1
gctgaagcagcagcagcaccggtagttgcagtcgaccaatctcatttatgtcgctaaatcccgcccgcgccgaccgtcgcgtatcggaagatggattggaacaataaataacactgctatccacagagagcggttggggaagactatagcaagaccaaacagatatgaagcgaaggcactttgctacagatgcggataaggagaaactttaatgcctcacctgagagaacctcgagaaacaaactactgataaacaggatcggataatgaatgtgttaaagcacttgcaac

SEQ ID NO: 47641 - DNA, 617 bp, Oryza sativa
  Clone ID: PAT_MRT4530_50390C.1
ccggccgggatcacatcgcaatccaaaccttcgactttgccttcctctcgccgctgattcgattcgatccgatccgatccagggagaggctgaagcactggcgatgaagaggagcgtggggacgctgggggaggcggatctgagggggaagaaggcgttcgtgcgggccgacctcaatgtgccgctcgacgacgcccagaagatcaccgacgacacccgcatacgggcgtccgtgcccactgtaaagttactcctcgagaagggcgccaaggtcattctcgtcagccatctgggccgtccgtagggtgtcactcccaattacagtttgtagcctcttgttccacgcttgtgtgagctactcggagtcgatgttgagatgcccactgattgcattgatgaggaaggcgagaaattgtatgctgctttggcggaaggcggtgttctactcctagagaatgttagattctacaaggaggaagaagggactgattcttgagtttgccaagagattcgcagttgtatgatgacctctattgatatgaagccaactgcactgcacacagaggtcatgcttcacctgactgagtgaccagatatttggagcccgccgctgctga

SEQ ID NO: 47642 - DNA, 1245 bp, Oryza sativa
  Clone ID: PAT_MRT4530_50391C.1
atggccgcggccgcgtcctacttctccggcacggcgctcatgccatcgcagcgcagcggggcccccgcgccggagtactccgccgccggcaccggcgccgccgccgctccttccccttccaagccgcgcgacccccgcttctccggatgcgtccccgccaccgtgctccacatttcccggtccttcgccgccgcgctcgccgcggacggtgggggcgaccccgtcttctccatcgacggcgtcgagaccaccaacgttagggttttggggagggtggtgagcgtggtgagcagggatactgacgtgtgcttcactctcgatgacagcaccgggaagatcccactcgttcggtggatcactgatcagtcggatactcgagacacgtcttacattcaggagggagtgtatgtgaaggttcaagtgaacctcatgggatttcaagctaagaagcagggtcttgctcgatctatcaggcctattaacaatttcaacgaagtggtgctacatttcattgagtgtatgcatgtgcatttggaaagtgttcaatcgaagatgcaaaggcaactccctccttcagtccaaaccaatgaatacactcatgtgccctcatctggtggagtgagggattaccaagttcatttcactcctcaagtaaaccaaggactaccccctgcagttcaaacaaatacatctacttatgtgcctcttttgggtggagttagagatcatcaagctcattttgctcaagtaaaccaagggcagttttctccggcagttcaagcaaacacatctacccatttgcctttttctggtggagttggagaacatcaaattcattttactcctaaagtaaaccaagggcaatttcctccatcagttcaaacaaacacatctgctcatgtgccttattctggtggatttagagaacatcaagttcattttacacctcctgtaaaccaagggcaatttcctccagcagttcaaacaaacctgtataatcatgcggcttcttctggtggagtgagagaacaagttcatcttactcaagcaaaccaaatcttttatttcccggcccagttttcagcttactcaagcactggtggactacagcatgacccacaaagaatggttttggaagctctgcagcaaccagatatactgggggttgtcaagcatctggctgcagcaggcttcgtctattggaccattgatgacaatcatgtcaagtctatgtgtaatggttga

SEQ ID NO: 47643 - DNA, 591 bp, Oryza sativa
  Clone ID: PAT_MRT4530_50392C.1
cctccgcgacaggcggcgtccccctccccctccgcacccccctcgacaagcggcgtccccacgggcggcgtgtggagaggcggcggatccgctcggatctggcctcccatggccggcgcggcccgtgcccggcggcggcgcgcggagaggcacccggtggcgcgcggtgagggactacagccaggaattggtgagagtgaatcaatccggcctaggtggggttggccgaggcccaataacttaaggtggtttcctcctcccaagctaagcaaggtgggattattcaaaggctcatacggtcgccacccgacttttgcgtctttgccagcgggtaatagtggaggatgtcctcatcgttcccacccccttaacaagggcccaactctgataccaaatgattaatccctttgccagcgggtaatagtggaggatgtcctcatcacacacgaggcggtcgcggttctcggcggtgccggaggatgccgagaaaactccagtcggctagatgccggcgactccaagtcggcgatggcggttttcgtcgggagttaaaaaacggaacgtggaagacaggggtggaggcaggcctat

SEQ ID NO: 47644 - DNA, 294 bp, Oryza sativa
  Clone ID: PAT_MRT4530_50393C.1
aacaaaaaaaaaccattaaaactctaactacactacataacaaacacttatttacccaccaaactaaaataaataatcatcgatggggtctcccttgatgaagatcgccatcttcttcttgatccttctatccaactgtaatctgatgggctcctctgacgccgtgcgcccttacacagtcaaccacactaggacgcttgtacacctctatgacctcatttagattcacctctaggaaatctttgctctcgccgatatgctactcctcctagaagaaaaaccctgcgaccccta

SEQ ID NO: 47645 - DNA, 708 bp, Oryza sativa
  Clone ID: PAT_MRT4530_50394C.1
tgcacgagggggcacggcgcgctggcgctccatgtgctggattgcggcctgctctgctccagctcttgtttctggtggggcatcttctcccgtctgtggtcgtttcacgcctgcgccccgagttggtccactggtttccgctgcactgtcgtcttgtgcttggttcggtgctttcaatttatggatgctatcagtattcatacaagaatggcgacaatagatctggtgcagatcatggcacatatatcattgctccagctggggaaagtgtatatgatcagtcaataaaaaatccttgttacagtaaaatgcatggtggcaaagaaattgcaggattttggggttatctgttccagatcatgtttcagtcaaatgcaggtgctgtgatgattacagatctggtgttttggtttatcctgtaccctttccttgcctacaatcaatatgatatgaattttttgctgattgggacacactctataaatgttgtgttcatgattggtgatactgctatgaatagcctgcgtttcccgtggtttagaatcgcatatttcttgctgtggactggcgcttttgttaatgttcagtggctcatccatgctagcatatcgatttggtggccttacccatttctggacttagcatttcctaaagctcctgtatggtatttggtggtagcagtgatgcatttcccttgctatgctttat

SEQ ID NO: 47646 - DNA, 613 bp, Oryza sativa
  Clone ID: PAT_MRT4530_50395C.1
aacacaacccacaaccctgttttggaccctgttccaaaccctggcccctattaccccatggataaccctaattaaaaaaacccatttttttgcaacttgcaacacacaactgggctttttgggcaacacaagccggccgttaaccagggaaagggggggaaaaaaaaaaaaaaaaaaacctttttaggtttcaacccccccccccccccaaaaaggggtaccaattaaaaaaaaaaaacaacctaaaacaaaattccccccccgggggccaaaaaaaacacagggggttattatgaaccctggaaaaacaacatccggggcaaaaacttaaggaaaaggactgggggtttttttttctgcccaaaaccaaaaaaatccttgggcttaaagggaaagggggacttgggccccctaccccggccaaaccaatttaaaatgcttccacgggtggtccttaatccagccccttattttattcacaggctttttgggtatcaaaaccgcccaaacaaattgcaaaagattgaaaggctgaaatcggaaaacgggagcccaggggaaacaagcccttcccaatttttccaaacgggaaaaacaccttggcccgccccgg

SEQ ID NO: 47647 - DNA, 6048 bp, Oryza sativa
  Clone ID: PAT_MRT4530_50396C.1
atggccgagcaaggaaaagcgcacgacctctctccgagtgtgagcggcgacgacggggagccgaatccacgccgtcgagctcgtactcccccacctcctccgcgccaaagccctaagcagggggaggcgcttgagagggtcgacaaatccgtggcatcaccagtcgcaggtgatgcaggagaacggcgagatggggagcgtcgcctcctcgtctacggcgacggcagcacgcctcagggtgcgcttcaggctgctggcgcgctcctacgacacccgcctgtcgtccatgacccggagtctccagcccaacgatggctggaagacgtggccaacttggtcatgacggcacagcagcgcctgggtgctggtggacggtccgccaccaccaagacctccggcgccgctaccaccggctccgtgtcgtcaaggcggagggcgcggcgagcggcggctgctgcgcgccattcggccgccactccctcgtcgacacctccaactcgggaggatcagcatggagagccggatgcccgcatcgacatcgagcgccggcgtaataaccggcgtactccccgcgcaacggagggcgcctcttcgtccagagtgtcacctcgacatggacgtgaggatcagccctccgtgcccccggccggtggtgttggctgtagagcctttgtggcgagtcttcggaatgtccgttggcccccaaggttccggcccaccatcaccgagaagtacgatgggagcgtcaaccccaccgagtttctccaggtctatacgaccgggatcgaggccgctgggggtgacgacagggtcatggcgaacttctttcccatggccctaaaaggacaggcgcggggttggctaatgaacctgccacccgcgttggtccactcctgggaagatttgtgccaacagttcaccatgaacttccaaggcacatatccgcgcccaggcgaagaagcggacttgcatgcagtacagcgaggcgatgatgagtcgcttcgctcgtacattcagcggttttgccaagtccgcaatactataccatgcatccctgcacacgcggtgatctacgcgttcagggggggcgtgcggcacaaccgcatgctcgaaaagatcgcttccaaagagccccagactaccgcggagctttttcagctcgcggaccgagtggctcgtaaggaggaagcgtggacatggaactcctccggttccggagtggcagcttcggccgcccccggatccgccgctcagacagggcggcgtgacaggaggaggaagaagaggtcggaccgttccggcgacgagggtcatgtcctcgccgtcgagggcgctccgcgggccactcgaaaggggaggcctgcgagcgacaaaaagaaagaggctggtactcccagcagggagcgccccgccggcaggtggtgctccgtccacaacacctccctccacgatctcgcggactgtcgtgcagtcaaaaacctggctgagcgaacgaggaagtgggaggaggacaggaggcaggaacgccgtgagggcaagtccccggcggttccttccggcaaacggcgaagtgaggccaagcagaaggcccccgctgttgacatcgatgatggtgatgatgacctaggtttccaagaacctggggccaccattgccaccgtcgatggaggagcgtgtgctcacgtctctcgccggagcttcaaggctatgaagcgagagcttctggccatggcccctactcatgaggcgatgcgtcgggcgcggtggtcggaggttgctctcactttcgaccagaccgaccacccaccgtgcattgcccggggagggcaggttgcgatggtggtttcccccaccatctgcaacgtgaagttgggacgtgtcctcatagatggaggagcggccctcaacatcctttcccccgcggcttttgatgccatcaaggccccggggatggtgctccgaccgtcccagccgattatcggtgtgacgccggggcacacgtggccattaggtcacatcgacctaccggtcaccttcggtggacccgccaacttccgcacggagcgggtgagcttcgatgtggcggacctcagtctgccctacaacgcggtcctagggaggcccgcgttggtgaagttcatggcggcggtccactacgcctacctccagatgaagatgccgggccccggtggccccatctctgtccatggcgatcttaaagtcgcgctcgcttgcatggagcagcgcgcggaccacctcgctgctgcgaccaagcccgagggtggtgacgagaggcttggcacctccgcccccaccgccccgaggcagcggattgccacatgcgacgaggtcccggaagacgcgctcgtctccttcctgcgggcaaacgctgatgtcttcgcatggagaccggcggatatgcccggggtccccagggaggtgattgagcaccgtctcgccgtacgaccggatgcaaggccgatccggcagaaagtgcggcggcaggccccggaacgtcaagccttcatccgcgaggaggtggctagacttttggaggccgggttcatccgtgaggtcatccatccggagtggctggcgaacccggtggtcgttcccaaggcgaacggcaagcttcggatgtgcatcgactacaccgaccttaacaaggcatgtcctaaggacccttaccccctgcctcgcatagatcagattgtcgactccactgcggggtgcgaccttttgtgttttctagatgcatactctggttatcatcagattcgcatggctagggaggatgaggagaaaactgcgttcattacccctgtaggaacctattgttatacatcaatgcccttcgggttaaagaatgcaggtcctacttttcaacgaactactcgaatttctttgggtagccaaataggacgtaatgttgaggcttatgttgatgacttggtagtaaaaacgcgcaaccaagaaactttactttcagatctagcggaaacttttgagaacctccgctccgcccgcataaagctgaaccccgataagtgtgtgtttggtgtacctgcgggcaagcttctcgggttcttggtctctgcccgaggcattgaggccaaccccgagaagattcgagctatcgagcggatgcgcccccccagcaaacttagggatgtgcaatgcgtcaccggttgcatggccgccctaagtcgtttcatatcaaggctgggagagaaggcgctacccttttttaagctcctcaagcgctcggggccgttcacttggacggaggaagctgaacatgcccttactcagctaaaggcatatctcagctctcccccggttctagtcgccccggagccaaatgagcccctgctactttacttagcggcgaccccccaaacaatcctcattccgcgcaccccgcaccctgtgccgacttggcccgggagcaagcagggaggagaggcccccgagtcaaacggtggcctaaggcccctgacgaccggagacggccctctgcccgcttgtcagacggtgctgagtgcccccgaccctcaggaaggccccgaggccactgcgggaaggccgcacctatcgccctttggccccgaggctaaccctgtgctgactcgacctgggagagagcagggagaagaggcccccgagccgaacggaggcctgacgcccctgacgaccggagttggcccgttgcccgcttgtccgacgacgccaggagtccccgaccctcaggacggccctgaggccactgtgggaaggccactcctgtcatcctccgaccccgaggtcatcggtacagaagacaagtgccccccaagaggccacttggacgaagaacgccccggggatacggcccctagcgaaggggatcggccccgccgaaaggtgcagcggcctgtctattttgttagtgaggccctccgggacgctaagacccgataccctcaggcccagaagatgctttacgctattctgatggcctcaaggaagctgcgccattatttccaggcgcatcgggtcactgtggttacgtcttaccccctcggccaaatcttgcgtaatcgagagggtacaggacgggtggtaaaatgggcaatcgagctttctgagttcgatctgcactttgaaccacgccacgctatcaagagccaggccctcgccgattttgtggcagagtggaccccggctccagagaccgtctcaattcccgaggccagcacggacccctcacagctgcctcaaaccgcccactgggtgatgcagttcgacggttctctgtctctccagggcgccggtgcaggggtcacgttgacctctccgaacggagacgtcctcagatacttggtccgtctcgattttcgagcgactaacaatatggcagagtacgagggactccttgccggactcagagtggcagctggactggggatccgccgcctcttggtattaggcgactcccagctagtcgttaaccaggtctgtaaggagtaccggtgctctgacccacagatggacgcctacgtacgccaagtgcggcgtatggagcgccatttcgatgggatagaacttcggcatgtacccagaagggataacatagttgccgatgaactctcaaggctcgcgtcctcgcgagcccagaccccaccgggcgcctttgaagaaaggcttacccagccgtcggcgcgacccgatcccataggggagacggatgcgcctgaccggcccccgaggcccgtcggagtccaggcctcgggacccgaagggagcgctccaagctcccttagattgattgcttggatctctgagatccaaacatacctcacagatatgactctacctgaggaccgcgaagggagtgaacgcgtacaacgcatttccaaacgctacgtgttggtagaagggaccctctatcggcgcgcggctaacggaatcctcctgaaatgcattcctcaggaacaaggcgttgagcttcttgctgacatccatgagggcgagtgcggagcccattccgcctcgcgtaccctggttggcaaggcctttcgtcaaggattttattggccgacagctctcaatgatgcagtcgatctggtccggcgatgcagagtgtgtcagttccacgccaagcaaatccatcagccggcccaggccctgcagatcataccactgtcatggccatttgctgtctgggggcttgatatcctgggaccgttcaaacgggccctgggcgggtttgagtatctgtatgttgcgatcgacaagttcactaagtggcccgaggcttatccggttgtcaagattgataagcactctgctcttaaattcattaagggcatcacggcccgttttggagtgcctaaccgtattattacggataatggcacccaattcactagtgaactcttcggcaactactgcgaagacatgggcatcaagctctgcttcgcctcacctgctcaccccagaagcaatggccaagtggagcgcgccaatgcagaaatcctcaaaggccttaaaaccaagaccttcaatattctcaagaagcacggcgattcatggatcgaggagttaccagcggtgctctgggcaaaccgaaccacaccaagccgagcgaccggggaaacgcctttcttcctcgtttacggcgcagaagcggttctcccatccgagctcaccctgaggtctcctcgggccaccatgtactgcgaggctgatcaagatcagcttcgtagagatgacctcgactacttggaagagcgaaggcggcgcgcggccctccgagccgcgcgctaccagcagagcctgcggcgctaccatcagcgccacgtccgggcccgatcactctgcgtcgacgaccttgtcctacgccgcgtccaaacgcgtgctggattgagcaagctctcaccaatgtgggagggtccgtatcgagtgatcggtgtcccccggccgggctcggtacggctggccacgggcgacggcacggagctgccaaacccgtggaacatcgaacaccttcgtcgcttctacccctga

SEQ ID NO: 47648 - DNA, 329 bp, Oryza sativa
  Clone ID: PAT_MRT4530_50397C.1
tttgtgtgccccggccggtacaactttgacgggtacgttgagtttatggatatggctctctcgaccggtcaaaggttcatccgcacgaccttacaccagtgcggtggctatggaggggattccgtgatcatgctgtttcggtggtgagaggaggaggatatggagaaggacaacgacactgtgtctacatcgaccaatggggacgccgaaactgcgagtacaatagcctgggctgccactccatcctcgtgttgaagggccgaactttcgtggagggctacaccgacttcatgcgcgccttgggtgagcacttcacgtcgttgcttccc

SEQ ID NO: 47649 - DNA, 4677 bp, Oryza sativa
  Clone ID: PAT_MRT4530_50398C.1
atggccgagcaaggaaaagcgcacgacctctctccgagtgtgagcggcgacgacggggagccgaatccacgccgtcgagctcgtactcccccacttcctccgcgccaaagccctaagcagggggaggcgcttgagagggtcgacaaatccgtggcatcaccagtcgcaggtgatgcaggagaacggcgagatggggagcgtcgcctcctcgtctacggcgacggcagcacgcctcagggtgcgcttcaggctgctggcgcgctcctacgacacccgcctgtcgtccatgacccggagtctccagcccaacgatggctggaagacgtggccaacttggtcatgacggcacagcagcgcctgggtgctggtggacgagcctttgtggcgagtctcgggaatgtccgttggcccccaaggttccggcccaccatcaccgagaagtacgatgggagcgtcaaccccaccgagtttctccaggtctatacgaccgggatcgaggccgctgggggtgacgacagggtcatggcgaacttctttcccatggccctaaaaggacaggcgcggggttggctaatgaacctgccacccgcgttggtccactcctgggaagatttgtgccaacagttcaccatgaacttccaaggcacatatccgcgcccaggcgaagaagcggacttgcatgcagtacagcgaggcgatgatgagtcgcttcgctcgtacattcagcggttttgccaagtccgcaatactataccatgcatccctgcacacgcggtgatctacgcgttcagggggggcgtgcggcacaaccgcatgctcgaaaagatcgcttccaaagagccccagactaccgcggagctttttcagctcgcggaccgagtggctcgtaaggaggaagcgtggacatggaactcctccggttccggagtggcagcttcggccgcccccggatccgccgctcagacagggcggcgtgacaggaggaggaagaagaggtcggaccgttccggcgacgagggtcatgtcctcgccgtcgagggcgctccgcgggccactcgaaaggggaggcctgcgagcgacaaaaagaaagaggctggtactcccagcagggagcgccccgccggcaggtggtgctccgtccacaacacctccctccacgatctcgcggactgtcgtgcagtcaaaaacctggctgagcgaacgaggaagtgggaggaggacaggaggcaggaacgccgtgagggcaagtccccggcggttccttccggcaaacggcgaagtgaggccaagcagaaggcccccgctgttgacatcgatgatggccccggggatggtgctccgaccgtccagccgattatcggtgtgacgccggggcacacgtggccattaggtcacatcgacctaccggtcaccttcggtggacccgccaacttccgcacggagcgggtgagcttcgatgtggcggacctcagtctgccctacaacgcggtcctaggtatgcccgcgttggtgaagttcatggcggcggtccactacgcctacctccagatgaagatgccgggccccggtggccccatctctgtccatggcgatcttaaagtcgcgctcgcttgcatggagcagcgcgcggaccacctcgctgctgcgaccaagcccgagggtggtgacgagaggcttggcacctccgcccccaccgccccgaggcagcggattgccacatgcgacgaggtcccggaagacgcgctcgtctccttcctgcgggcaaacgctgatgtcttcgcatggagaccggcggatatgcccggggtccccagggaggtgattgagcaccgtctcgccgtacgaccggatgcaaggccgatccggcagaaagtgcggcggcaggccccggaacgtcaagccttcatccgcgaggaggtggctagacttttggaggccgggttcatccgtgaggtcatccatccggagtggctggcgaacccggtggtcgttcccaaggcgaacggcaagcttcggatgtgcatcgactacaccgaccttaacaaggcatgtcctaaggacccttaccccctgcctcgcatagatcagattgtcgactccactgcggggtgcgaccttttgtgttttctagatgcatactctggttatcatcagattcgcatggctagggaggatgaggagaaaactgcgttcattacccctgtaggaacctattgttatacatcaatgcccttcgggttaaagaatgcaggtcctacttttcaacgaactactcgaatttctttgggtagccaaataggacgtaatgttgaggcttatgttgatgacttggtagtaaaaacgcgcaaccaagaaactttactttcagatctagcggaaacttttgagaacctccgctccgcccgcataaagctgaaccccgataagtgtgtgtttggtgtacctgcgggcaagcttctcgggttcttggtctctgcccgaggcattgaggccaaccccgagaagattcgagctatcgagcggatgcgcccccccagcaaacttagggatgtgcaatgcgtcaccggttgcatggccgccctaagtcgtttcatatcaaggctgggagagaaggcgctacccttgtttaagctcctcaagcgctcggggccgttcacttggacggaggaagctgaacatgcccttactcagctaaaggcatatctcagctctcccccggttctagtcgccccggagccaaatgagcccctgctactttacttagcggcgaccccccaagtagttagtgcagcgttggttgtggagcgcgatgaagacaatcctcattccgcgcacccccaccctgtgccgacttggcccgggagcaagcagggaggagaggcccccgagtcaaacggtggcctaaggcccctgacgaccggagacggccctctgcccgcttgtcagacggtgctgagtgcccccgaccctcaggaaggccccgaggccactgcgggaaggccgcacctatcgccctttggccccgaggctaaccctgtgctgactcgacctgggagagagcagggagaagaggcccccgagccgaacggaggcctgacgcccctgacgaccggagttggcccgttgcccgcttgtccgacgacgccaggagtccccgaccctcaggacggccctgaggccactgtgggaaggccactcctgtcatcctccgaccccgaggtcatcggtacagaagacaagtgccccccaagaggccacttggacgaagaacgccccggggatacggcccctagcgaaggggatcggccccgccgaaaggtgcagcggcctgtctattttgttagtgaggccctccgggacgctaagacccgataccctcaggcccagaagatgctttacgctattctgatggcctcaaggaagctgcgccattatttccaggcgcatcgggtcactgtggttacgtcttaccccctcggccaaatcttgcgtaatcgagagggtacaggacgggtggtaaaatgggcaatcgagctttctgagttcgatctgcactttgaaccacgccacgctatcaagagccaggccctcgccgattttgtggcagagtggaccccggctccagagaccgtctcaattcccgaggccagcacggacccctcacagctgcctcaaaccgcccactgggtgatgcagttcgacggttctctgtctctccagggcgccgtcgatctggtccggcgatgcagagtgtgtcagttccacgccaagcaaatccatcagccggcccaggccctgcagatcataccactgtcatggccatttgctgtctgggggcttgatatcctgggaccgttcaaacgggccctgggcgggtttgagtatctgtatgttgcgatcgacaagttcactaagtggcccgaggcttatccggttgtcaagattgataagcactctgctcttaaattcattaagggcatcacggcccgttttggagtgcctaaccgtattattacggataatggcacccaattcactagtgaactcttcggcaactactgcgaagacatgggcatcaagctctgcttcgcctcacctgctcaccccagaagcaatggcccaggtgagcgcgccaatgcagaaatcctcaaaggccttaaaaccaagaccttaaatattctcaagaagcacggcgattcatggatcgaggagttaccagcggtgctctgggcaaaccgaaccacaccaagccgagcgaccggggaaacgcctttcttcctcgtttacggcgcagaagcggttctcccatccgagctcaccctgaggtctcctcgggccaccatgtactgcgaggctgatcaagatcagcttcgtagagatgacctcgactacttggaagagcgaaggcggcgcgcggccctccgagccgcgcgctaccagcagagcctgcggcgctaccatcagcgccacgtccgggcccgatcactctgcgtcgacgaccttgtcctacgccgcgtccaaacgcgtgctggattgagcaagctctcaccaatgtgggagggtccgtatcgagtgatcggtgtcccccggccgggctcggtacggctggccacgggcgacggcacggagctgccaaacccgtggaacatcgaacaccttcgtcgcttctacccctga

SEQ ID NO: 47650 - DNA, 1650 bp, Oryza sativa
  Clone ID: PAT_MRT4530_50399C.1
atggccgagcaaggaaaagcgcacgacctctctccgagtgtgagcggcgacgacggggagccgaatccacgtcgtcgagctcgtactcccccacctcctccgcgccaaagccctaagcagggggaggcgcttgagagggtcgacaaatctgtggcatcaccagtcgcaggtgatgcaggagaacggcgagatggggagcgtcgcctcctcgtctacggcgacggcagcacgcctcagggtgcgcttcaggctgctggcgcgctcctacgacacccgcctgtcgtccatgacccggagtctccagcccaacgatggctggaagacgtggccaacttggtcatgacggcacagcagcgcctgggtgctggtggacggtccgccaccaccaagacctccggcgccgctaccaccggctccgtgtcgtcaaggcggagggcgcggcgagcggcggctgttgcacgccattcggccgccactccctcgtcgacacctccaactcgggaggatcagcatggagagccggatgcctgcatcgacatcgagcgccggcgtaataaccggcgtactccccgcgcaacggagggcgcctcttcgtccagagtgtcacctcgacatggacgtgaggatcagccctccgtgcccccggccggtggtgttggctgtagagcctttgtggcgagtcttcggaatgtccgttggcccccaaggttccggcccaccatcaccgagaagtacgatgggagcgtcaaccccaccgagtttctccaggtctatacgaccgggatcgaggccgctgggggtgacgacagggtcatggcgaacttctttcccatggccctaaaaggacaggcacggggttggctaatgaacctgccacccgcgtcggtccactcctgggaagatttgtgccaacagttcaccatgaacttccaaggcacatatccgcgcccaggcgaagaagcggacttgcatgcagtacagcgaggcgatgatgagtcgcttcgctcgtacattcagcggttttgccaagtccgcaatactataccatgcatccctgcacacgcggtgatctacgcgttcagggggggcgtgcggcacaaccgcatgctcgaaaagatcgcttccaaagagccccagactaccgcggagctttttcagctcgcggaccgagtggctcgtaaggaggaagcgtggacatggaactcctccggttccggagtggcagcttcggccgcccccggatccgccgcccagacagggcggcgtgacaggaggaggaagaagagggcgctccgcgggccacccgaaaggggaggcctgcgagcgacaaaaagaaagaggccgacgctccctgacctcggctacttggaagagcgaaggcggcgcgcggcccttcgagccgcgcgctaccagcagagcctgcggcgctaccatcagcgccacgtccgggcccgatcactctgcgtcgacgacctcgtcctacgccgcgtccaaacgcgtgctggactgagcaaactctcaccagtgtgggagggtccgtatcgagtgatcggcgtcccccggccgggctccgttcggctggccacgggcgacggcacagagctgcctaacctgtggaacatcgaacaccttcgtcgcttctacccctag

SEQ ID NO: 47651 - DNA, 861 bp, Oryza sativa
  Clone ID: PAT_MRT4530_5039C.1
ctatcgttttagccccctcccgcgatctcccgtggtccctagccacctccccgccgtcgtcccctctctcccgtgccgccggccgtcttcagccgcccctgccgccgcgttagcacgccggctggccgtgccgtcgcctcctccagcatcgcagccacctcctcttcgccggcctgccctctgttttccgcggagacctccggaagtgcctccccgccggcgacagtggcgttgccgccactgttccgcctccggccgcctctgctgcgtcccctgtgcgccggccgacgtcgccatcacctctcccggcaccggagcgccgtcctctttcccggccaggccacggcgtcgcccgaatttcgccggaacgccgtcgctcgcgccggcctctccttcctcctcgtcggcatctcctccagcagcccctttcgccatgcccgtgcgtcagccggcgctgccgtcccctccctcggcacgccgcaacgtcgtcctcggcatcgcttccccttcggccgaacaccgccggtgtccgtcgtcctcttcaccgttcatcctcgccggctcgtcgtctcgcggcgctgcctccgtcgtcggcatcgcagcggcgtgttccacgccatcctcgtctccgtgcagccactgccggctgccctcgtcgcctcctcgccggccccggtcgctgtagccgtcgtcgtcttcgtcctcggctccgcgtcgtcaagcctcgtgccggccgcgtctcgccttcgtccaaggatcgccgccgaagtcgtcccctcgccgttcgtcttctttgttcccggccgtctccgctgcgcccgttcgtcgttgtcgttcccacgcctcgtcgcgtggtggtaa

SEQ ID NO: 47652 - DNA, 353 bp, Oryza sativa
  Clone ID: PAT_MRT4530_503C.1
ttctgccgcgggctcctccttggcggcgccggcgccggcgttgtcgtaggcctgcgccaccggtgtcgccgtcgccggcgtgctgctctccttagcggccgtggccgccgcgggcgcgccggcggcgttgtcgtaggccttcgcctccagcgtcggcgtgctggtctgcggcttggcggcgtcgtcgcattccttctccaacgccgccgccgcctccgccgccggcgcctccgccgccggcttggctggcgtcgtggtagatggcgtagcggaggagtagacctgcgagaggtcttgctcgaggaggtcgagcacggcgtagacgttgcggaacgtggcgacgacggactcct

SEQ ID NO: 47653 - DNA, 533 bp, Oryza sativa
  Clone ID: PAT_MRT4530_50400C.1
cccacgcgtccggggtcaacgaccttgccagccagggtcaaggaggcgcatttcccttcttttaattaattattactattactggtagtactgattaatttatactcaatttattattactaccatgaatccgtataatacatatagcagttctgactgtggtttcttagttaattaagccgtcaaaattaagaaactacagtcagaattgactcaactgttaaaacttgaaaacaatcgtcacacaggctgtgtgtaagggactgtatgtacggtgtttatacggtatttttttgtggttttatgtgttattacaatttcatttttttttgtatctcttaaaactttggtatatattgttgcctgtggatatgtattaacttacctgtacatgtttaggccacatgcatgcatatatgtctatggcacactgcaacagaaagaaagaatactgctcatggcgtacatatatctgacaagtaacagcaagtgtgtactttgtgtaaccttcaagagataaaggaagaggatct

SEQ ID NO: 47654 - DNA, 5256 bp, Oryza sativa
  Clone ID: PAT_MRT4530_50401C.1
atggccgagcaagcaaaggcgcacgacctctctccgagtgtgagcggcgacgatggggagccgaatccacgccgacgagctcgtactcccccacctcctccgcgccaaagccctaagcagggggaggcgcttgagagggtcgacaaatccgtggcatcaccagtcgcaggtgatgcaggagaacggcgagatggggagcgtcgcctcctcgtctacggcgacggcagcacgcctcagggtgcgcttcaggctgctggcgcgctcctacgacacccgcctgtcgtccatgacccggagtctccagcccaacgatggctggaagacgtggccaacttggtcatgacggcacagcagcgcctgggtgctggtggacggtccgccaccaccaagacctccggcgccgctaccaccggctccgtgtcatcaaggcggagggcgcggcgagcggcggcggctgcacgtcattcggctgccactccctcgtcgacaccgtcgactcgggaggatcagcatggggagccggatgcccgcctcaacatcgagcgccggcgtaatagccggcgtactccccgtgcaacggagggcgcctcctcgtccagagtgtcacctcgacacggacgtgaagatcagccctccgtgcccccggccggtggtgttggctgtagagcctttgtggcgagccttcggaatgtccgttggcccccaaggttccggcccaccatcaccgagaagtacgatgggagcgtcaaccccaccgagtttctccaggtctatacgaccgggatcgaggccgctgggggtgacgacagggtcatggcgaacttctttcccatggccctaaaaggacaggcgcggggttggctaatgaacctgccacccgcgtcggtccactcctgggaagatttgtgccaacagttcaccatgaacttccaaggcacatatccgcgcccaggcgaagaagcggacttgcatgcagtacagcgaggcgatgatgagtcgcttcgctcgtacattcagcggttttgccaagtccgcaatactataccatgcatccctgcacacgcggtgatctacgcgttcagggggggtgtgcggcacaaccgcatgctcgaaaagattgcctccaaagagccccagactaccgcagagctttttcagctcgcggaccgagtggctcgtaaggaggaggcctggacctggaactcctccggttccggagtggcagcttcggccgcccccggatccgccgctcagacagggcggcgtgacaggaggaggaagaagaggccggaccgttccggcgacgagggtcatgtcctcgccgtcgagggcgctccgcgggccactcgaaaggggaggcctgcgagcgacaaaaagaacgaggctggtacacccagcagggagcgcctcgccggtaggtggtgctctgtccacaacacctccctccacgatctcgcggactgtcgtgcggtcaaaaacctggccgagcgaacgaggaaatgggaggaggacaggaggcaggaacgccgtgagggcaagtccccggcggttccttccggcaaacggcgaagtgaggccaagcagaaggcccccgctgttgacgtcgatgatggtgatgatgacctaggtttccaagaacctggggccaccattgccaccgtcgatggaggagcgtgtgctcacgtctctcgccggagcttcaaggctatgaagcgagagcttctggccatggcccctactcatgaggcgatgcgtcgggcgcggtggtcggaggttgctctcactttcgaccagaccgaccacccaccgtgcattgcccggggagggcaggttgcgatggtggtttcccccaccatctgcaacgtgaagttggggcgtgtcctcgtagatggaggagcggccctcaacatcctttcccccgcggcttttgatgccatcaaggccccggggatggtgctccgaccgtcccagccgattatcggtgtgacgccggggcacacgtggccattaggtcacatcgacctaccggtcaccttcggtggacccgccaacttccgcacggagcgggtgaacttcgatgtggcggacctcagtctgccctacaacgcggtcctggggaggcccgcgttggtgaagtttatggcggcggtccactacgcctacctccagatgaagataccgggccctggtggccccatctctgtccgtggcgaccttaaagtcgcgctcgcttgcatggagcagcgcgcggaccacctcgctgctgcgtccaagcccgagggtggtgatgagaggcttggcccctctgcccccaccgccccgaggcagcggattgccacatgcgacgaggtcccggaagacgcgctcgtctccttcctgcgggcaaacgctgacgtcttcgcatggaaaccagcggacatgcccggggtccccagggaggtgattgagcaccgtctcgccgtgcggccgggcgcaaggccggtccggcagaaagtgcggcggcaggccccggaacgtcaagccttcatccgcgaggaggtggcaagacttctggaggccggattcatccgtgaagtcatccatccggagtggctggcaaacccggtggtcgttcccaaggcgaacggcaagcttcggatgtgcatcgactacaccgaccttaacaaggcatgtcctaaggatccttaccccctgcctcgcatagatcagatagtcgactccactgcggggtgcgaccttttgtgttttctagatgcatactctggttaccatcagattcgcatggctagggaggatgaggagaaaactgcgttcattacccccgtaggaacttattgttatacgtcaatgcccttcgggttaaagaatgcaggtcctacttttcagcgtactactcgaatttctttgggtagccaaataggacgtaatgttgaggcttatgtcgatgacttggttgtaaaaacgcgcgaccaagaaactttactttcagatttagcggaaacttttgagaacctccgctccgcccgcataaagctgaaccccgataagtgtgtgtttggtgtgcctgcgggcaagcttctcgggttcttggtctcagcccgaggcattgaggccaaccccgagaagattcgagctatcgagcggatgcgcccccccagcaaacttagggatgtgcaatgcgtcactggttgcatggccgccctaagtcgttttatatcaaggctgggagagaaggcgctacccttgtttaagctcctcaagcgctcggggccgttcacttggacggaggaagctgaacatgcccttactcagttaaaggcgtatcttagctctcccccggttctagtcgccccggagccaaatgagtccctgttactttacttagcagcgaccccccaagtagttagtgcagcgttggttgtggagcgcgatgaggacaatccccattctgcgcacccccactctatgccgacttggcccgggagcaggcagggaggagaggcccccgagtcgaacggtggcctaaggcccccgacgaccggagtcggccctctgcccgcttgtcagacggtgccgggtgcccccgaccctcaggaaggccccgaggccactgtgggaaggccgcacctaccaccctttgaccccgaggctacccctgtgctgattcaacccgggagagagcagggagaagaggcccccgagccgaacggaggcctgaggcccctgacgaccggagctggccctttgcccgcgtgtctgacgacgccaggagcccccgaccctcaggatggccccgaggccactgtgggaaggccgcacctgtcatcttcggaccccgaggtcatcagcacaggagacgagtgtgccccgagaggtcacttggacaaagagcaccccggggatacggcccctagcgaagaggatcggccccgccgaagggtgcagcggcctgtttactttgttagtgaggcccttcgggacgccaaaacccgataccctcaggcccagaagatgctttacgctattcgggtcactgtggttacgtcttaccccctcgggcaaatcttgcataatcgagagggtacacgacgggtggtaaaatgggcaatcgagctttctgaattcgacctgcactttgaaccacgccacgctatcaagagccaggccctcgccgattttgtggcagagtggaccccggctccagagaccgtctcaatccccgaggccagcacgaacccctcgcagctgcctcacaccacctactgggtgatgcagttcgatggttctctgtccctccagggtgccgtcgatctggtccggcgatgcagagcgtgtcagttccacgccaagcaaatccatcagccggcccaggccctgcagatcataccactgtcatggccatttgctgtctgggggcttgatatcctgggaccgttcaaacgggccccgggcgggtttgagtatctgtatgttgcgatcgacaagttcactaagtggcccgaggcttatccggttatcaagatcgataagcactctgctcttaaattcattaagggcatcacggcccgttttggagtgcctaaccgtattattacggataatggcacccaattcactagtgaactcttcggcgactactgcgaagacatgggcatcaagctctgcttcgcctcacctgcccaccccagaagcaatggccaagtggagcgcgccaatgcagaaatcctcaaaggccttaaaaccaagaccttcaatattctcaagaagcacggcgattcatggatcgaggagttgccagcggtgctctgggcaaaccgaaccacaccaagccgagcgaccggggaaacgcctttcttcctcgtctacggcgcagaagcggttctcccatccgagctcaccctgaggtctcctcgggccaccatgtactgcgaggctgatcaagatcagcttcgcagagatgacctcgactacttagaagagcgaaggcggcgcgcggccctccgagccgcgcgctaccagcagagcttgcggcgctaccatcagcgccacgtccgggcccgatcactctgcgtcgacgacctcgtcctacgccgcgtccaaacgcgtgctggattgagcaaactctcaccaatgtgggagggtccgtatcgagtgatcggtgtcccccggccgggctcggtacggctggccacgggcgacggcacggagctgcctaacccatggaacatcgaacaccttcgtcgcttctacccctga

SEQ ID NO: 47655 - DNA, 795 bp, Oryza sativa
  Clone ID: PAT_MRT4530_50402C.1
atggcgcggcgttccacggcaaaccacaggtgttcggacttcggatttgggtatggaggtcgagtgggttgtggggagttagctggcgcgaaggctcgattcataggcgagggaggagcgaaaggcgggcgcgtcgagcacctgtcgcgacacgttcggcaggagcacggcggcagcggggaatcacgtcagctttgtaggcgtgctctcagcgtgggacacggtatcagcagggcagcgagaaggctggcgcggggagctgcagccgcggggcggcttcgattggctgaggccggcgcccggcgccgcggcgacgttagccttgcagtttcagcgtcagctttgcagagcggagacagaggcggtcgggctagtcgcgtctcgtcgtttcgggtagaggggcagtgttggttcgccacggcgaacggcgaggtcagcggcgatctcgacagggcatcgggcacggcggcgtcggctttacaggcgcgggtcagtggctttgcaggattggcgcgcagcgggggacaaggcttttggccgcgacgcgtcgtcaatggttcgttgtgctcatcgcgcagtttgcacgccaagtgcttgttaaaatgcctgcaaggagggagagagaaaggaaggtgggggagggatggggcactggtgcggctggcatgtggggtccagggctcctgggctcaccgctcagagaggaggagaagaaagagaggagaggcgattttcctgaaaattttggtgaaaactgagagtgtgatcgaattttcaggatatgctacagtgtag

SEQ ID NO: 47656 - DNA, 142 bp, Oryza sativa
  Clone ID: PAT_MRT4530_50403C.1
gtccgacccacgacgtatcgcggacagcgtggacagactcatgcgtttatactggatctacaattgaaggcgagtgggcggtcgcaatctttttccatatacaaataaggcttcatgttattatgatgaaaactactataag

SEQ ID NO: 47657 - DNA, 5298 bp, Oryza sativa
  Clone ID: PAT_MRT4530_50404C.1
atggccgagcaaggaaaagcgcacgatctctctccgagtgtgagcggcgacgacggggagccgaatccacgccgtcgagctcgtactcccccacctcctccgcgccaaagccctaagcagggggaggcgcttgagagggtcgacaaatccgtggcatcaccagtcgcaggtgatgcaggagaacggcgagatggggagcgtcgcctcctcgtctacggcgacggcagcacgcctcagggtgcgcttcaggctgctggcgcgctcctacgacacccgcctgtcgtccatgacccggagtctccagcccaacgatggctggaagacgtggccaacttggtcatgacggcacagcagcgcctgggtgctggtggacggtccgccaccaccaagacctccggcgccgctaccaccggctccgtgtcgtcaaggcggagggcgcggcgagcggcggctgctgcgcgccattcggccgccactccctcgtcgacacctccaactcgggaggatcagcatggagagccggatgcccgcatcgacatcgagcgccggcgtaataaccggcgtactccccgcgcaacggagggcgcctcttcgtccagagtgtcacctcgacatggacgtgaggatcagccctccgtgcccccggccggtggtgttggctgtagagcctttgtggcgagtcttcggaatgtccgttggcccccaaggttccggcccaccatcaccgagaagtacgatgggagcgtcaaccccaccgagtttctccaggtctatacaaccgggatcgaggccgctgggggtgacgacagggtcatggcgaacttctttcccatggccctaaaaggacaggcgcggggttggctaatgaacctgccacccgcgtcggtccactcctgggaagatttgtgccaacagttcaccatgaacttccaaggcacatatccgcgcccaggcgaagaagcggacttgcatgcagtacagcgaggcgatgatgagtcgcttcgctcgtacattcagcggttttgccaagtccgcaatactataccatgcatccctgcacacgcggtgatctacgcgttcagggggggcgtgcggcacaaccgcatgctcgaaaagatcgcttccaaagagccccagactaccgcggagctttttcagctcgcggaccgagtggctcgtaaggaggaagcgtggacatggaactcctccggttccggagtggcagcttcggccgcccccggatccgccgctcagacagggcggcgtgacaggaggaggaagaagaggtcggaccgttccggcgacgagggtcatgtcctcgccgtcgaaggcgctccgcgggccactcgaaaggggaggcctgcgagcgacaaaaagaaagaggctggtactcccagcagggagcgccccgccggcaggtggtgctccgtccacaacacctccctccacgatctcgcggactgtcgtgcagtcaaaaacctggctgagcgaacgaggaagtgggagaaggacaggaggcaggaacgccgtgagggcaagtccccggcggttccttccggcaaacggcgaagtgaggccaagcagaaggcccccgctgttgacatcgatgatggtgatgatgacctaggtttccaagaacctggggccaccattgccaccgtcgatggaggagcgtgtgctcacgtctctcgccggagcttcaaggctatgaagagagagcttctggccatggcccctactcatgaggcgatgcgtcgggcgcggtggtcggaggttgctctcacttttgaccagaccgaccacccaccgtgcattgcccggggagggcaggttgcgatggtggtttcccccaccatctgcaacgtgaagttgggacgtgtcctcatagatggaggagcggccctcaacatcctttcccccgcggcttttgatgccatcaaggccccggggatggtgctccgaccgtcccagccgattatcggtgtgacgccggggcacacgtggccattaggtcacatcgacctaccggtcaccttcggtggacccgccaacttccgcacggagcgggtgagcttcgatgtggcggacctcagtctgccctacaacgcggtcctagggaggcccgcgttggtgaagttcatggcggcggtccactacgcctacctccagatgaagatgccgggccccggtggccccatctctgtccatggcgatcttaaagtcgcgctcgcttgcatagagcagcgcgcggaccacctcgctgctgcgaccaagcccgagggtggtgacgagaggcttggcacctccgcccccaccgccccgaggcagcggattgccacatgcgacgaggtcccggaagacgcgctcgtctccttcctgcgggcaaacgctgatgtcttcgcatggagaccggcggatatgcccggggtccccagggaggtgattgagcaccgtctcgccgtgcggccgggcgcaaggccggtccggcagaaagtacggcggcaggccccggaacgtcaagccttcatccgcgaggaggtggcgagacttctggaggccggattcatccgtgaagtcatccatccggagtggctggcgaacccggtggtcgttcccaaggcgaacggcaagcttcggatgtgcatcgactacaccgaccttaacaaggcatgtcctaaggatccttaccccctgcctcgcatagatcagatcgtcgactccactgcggggtgcgaccttttgtgttttctagatgcatattctggttaccatcagattcgcatggctagggaggatgaggaaaaaactgcgttcattacccccgtaggaacctattgttatacatcaatgcccttcgggttaaagaatgcaggtcctacttttcaacgtactactcgaatttctttgggtagccaaataggacgtaatgttgaggcttatgtcgatgacttggttgtaaaaacgcgcaaccaagaaactttactttcagatctagcggaaacttttgagaacctccgctccgcccgcataaagctgaaccccgataagtgtgtgtttggtgtacctgcgggcaagcttctcgggttcttggtctctgcccgaggcattgaagccaaccccgagaagattcgagctatcgagcggatgcgcccccccagcaaacttagggatgtgcaatgcgtcaccggttgcatggccgccctaagtcgtttcatatcaaggctgggagagaaggcgctacccttgtttaagctcctcaagcgctcggggccgttcacttggacggaggaagctgaacatgcccttactcagctaaaggcatatctcagctctcccccggttctagtcgccccggagccaaatgagcccctgctactttacttagcggcgaccccccaagtagttagtgcagcgttggttgtggagcgcgatgaagacaatcctcattccgcgcacccccaccctgtgccgacttggcccgggagcaagcagggaggagaggcccccgagtcaaacggtggcctaaggcccctgacgaccggagacggccctctgcccgcttgtcagacggtgctgagtgcccccgaccctcaggaaggccccgaggccactgcgggaaggccgcacttatcgccctttggccccgaggctaaccctgtgctgactcgacccgggagagagcagggagaagaggcccccgagccgaaaggaggcctgaggcccctgacgaccggagctggccctttgcccgcttgtccgatgacgccaggagcccccgacccccaggacggccccgaggccactgtgggaaggccgctcctgtcatcctccgaccccgaggtcatcggcacagaagacgagtgcgccccgaggggccacttggacgaagaacgccccgggggtacggcccctagcgaagaggatcggccccgccgaaaggtgcagcggcctgtctactttgttagtgaggccctccgggacgccaagacccgatacccacaggcccagaagatgctttacgctattctgatggcctcgaggaaactgcgccattatttccaggcgcatcgggtcactgtggttacgtcttaccccctcggccaaatcttgcgtaatcgagagggtacaggacgggtggtaaaatgggcaatcgagctttctgagttcgatctgcactttgaaccacgccacgctatcaagagccaggccctcgccgattttgtggcagagtggaccccggctccagagaccgtctcaattcccgaggccagcacggacccctcacagctgcctcaaaccacccactgggtgatgcagttcgacggttctctgtctctccagggcgccgtcgatctggtccggcgatgcagagcgtgtcagttccacgccaagcaaatccatcagccggcccaggccctgcagatcataccactgtcatggccatttgctgtctgggggcttgatatcctgggaccgttcaaacgggccccgggcgggtttgagtatctgtatgttgcgatcgacaagttcactaagtggcccgaggcttatccggttgtcaagattgataagcactctgctcttaaattcattaagggcatcacggcccgttttggagtgcctaaccgtattattacggataatggcacccaattcactagtgaactcttcggcaactactgcgaagacatgggcatcaagctctgcttcgcctcacctgctcaccccagaagcaatggccaagtggagcgcgccaatgcagaaatcctcaaaggccttaaaaccaagaccttcaatattctcaagaagcacggcgattcatggatcgaggagttaccagcggtgctctgggcaaaccgaaccacaccaagccgagcgaccggggaaacgcctttcttcctcgtttacggcgcagaagcggttctcccatccgagctcaccctgaggtctcctcgggccaccatgtactgcgaggctgatcaagatcagcttcgtagagatgacctcgactacttggaagagcgaaggcggcgcgcggccctccgagccgcgcgctaccagcagagcctgcggcgctaccatcagcgccacgtccgggcccgatcactctgcgtcgacgaccttgtcctacgccgcgtccaaacgcgtgctggattgagcaagctctcaccaatgtgggagggtccgtatcgagtgatcggtgtcccccggccgggctcggtacggctggccacgggcgacggcacgaagctgccaaacccgtggaacatcgaacaccttcgtcgcttctacccctga

SEQ ID NO: 47658 - DNA, 840 bp, Oryza sativa
  Clone ID: PAT_MRT4530_50405C.1
atggcgcggcgttccacggcaaaccacaggtgttcggacttcggatttgggtatggaggtcgagtgggttgtggggagttagctggcgcgaaggctcgattcataggcgagggaggagcgaaaggcgggcgcgtcgagcacctgtcgcgacacgttcggcaggagcacggcggcagcggggaatcacgtcagctttgtaggcgtgctctcagcgtgggacacggtatcagcagggcagcgagaaggctggcgcggggagctgcaggtggcaggcatggtcgggcggagcggtgtcgtgttcgtgtgccagccgcggggcggcttcgattggctgaggccggcgcccggcgccgcggcgacgttagccttgcagtttcagcgtcagctttgcagagcggagacagaggcggtcgggctagtcgcgtctcgtcgtttcgggtagaggggcagtgttggttcgccacggcgaacggcgaggtcagcggcgatctcgacagggcatcgggcacggcggcgtcggctttacaggcgcgggtcagtggctttgcaggattggcgcgcagcgggggacaaggcttttggccgcgacgcgtcgtcaatggttcgttgtgctcatcgcgcagtttgcacgccaagtgcttgttaaaatgcctgcaaggagggagagagaaaggaaggtgggggagggatggggcactggtgcggctggcatgtggggtccagggctcctgggctcaccgctcagagaggaggagaagaaagagaggagaggcgattttcctgaaaattttggtgaaaactgagagtgtgatcgaattttcaggatatgctacagtgtag

SEQ ID NO: 47659 - DNA, 5970 bp, Oryza sativa
  Clone ID: PAT_MRT4530_50406C.1
atggccgagcaaggaaaagcacacgacctctctccgagtgtgagcggcgacgacggggagccgaatccacgccgtcgagctcgtactcctccacctcctccgcgccaaagccctaagcagggggaggcgcttgagagggtcgacaaatccgtggcatcaccagtcgcaggtgatgcaggagaacggcgagatggggagcgtcgcctcctcgtctacggcgacggcagcacgcctcagggtgcgcttcaggctgctggcgcgctcctacgacacccgcccgtcgtccatgacccggagtctccagcccaacgatggctggaagacgtggccaacttggtcatgacggcacagcaacgcctgggtgctggcggacggtccgccaccaccaagacctccggcgccgccactaccggttccgcgtcgtcaagacggagagcgcggcgagcggcggctgctgcacgccattcggctaccactccctcgtcggcgcctccgactcgggaggatcagcatgaagagccggatgcccgcctcgacattgagcgccgacgtagtgatcggcgtactccccgcgcaacggagggtgcctcttcgtccagggtgtcacctcgacatggacgtgaggatcagccctccgtgcccccggttggtggtgttggctgtagagcctttgtggcgagtcttcggaatgtccgttggcccccaaggttccggcccaccatcaccgagaagtatgatgggagcgtcaaccccaccgagtttctccaggtctatacgaccgggatcgaggccgctgggggagacgacagggtcatggcgaatttctttcccatggccctgaagggacaggcgcggggttggctaatgaacctgccacccgcgtcggtccactcctgggaggatttgtgccagcagttcaccatgaactttcaaggcacctatccacgcccaggtgaagaagcggacttgcacgcagtacagcgaggggatgatgaatcccttcgctcgtacattcagcgtttctgccaagtccgcaatactataccttgcatccctgcacacgcggtgatctacgcgttcagggggggtgtgcggcacaaccgcatgctcgaaaagattgcctccaaagagccccagactaccgcagagctttttcagctcgcggaccgagtggctcgtaaggaggaggcctggacctggaacccctccggttccggtgtggcagcttcggccgcccccggatccgccgctcagacagggcggcgtgacaggaggaggaagaaaaggtcggtccattccggcgacgagggtcacgtcctcgccgtcgagggcgctccgcgggccacccgaaaggggaggcctgcgagcgacaaaaagaaagaggctggtactcccagcagggagcgcccagccagcaagtggtgctccgtccacaacacctccctccacgatctcgcggactgtcgcgcagtcaaaaacttggctgagcgaacgaggaagtgggaggaggacaggaggcaggaacgccgtgagggcaagtccgcggcagttccctccggtaaacggcgaagtgaggccaaacagaaggcccccgccgctgacatcgatgacggtgatgatgacctaggtttccaagaacctggggccaccattgccactgtcgacgggggagcgtgtgctcacgtttctcgccggagtttcaaggccatgaggcgagagcttctcgccgcggcccctactcatgaggcgacgcgtcgggcgcggtggtcggaggtggccctcacctttgaccagaccgaccacccaccgtgcgttgcccggggagggcagattgcgatggtggtttctcccaccatctgcaatgtgaagttggggcgtgtcctcatagatggaggagcggctctcaacatcctttcccccgcggcctttgatgctatcaaggccccggggatggtgctccagccgtctcaaccgatcatcggtgtgacgccggggcacacatggccgttaggtcacatcgacctaccggtcacctttggtggatcagccaacttccgcacggagcgggtgaacttcgatgtggcggacctcagtctgccctacaacgcggtcctggggaggcccgcgttggtgaagtttatggcggcggtccactacgcctacctccagatgaagatgccgggccccggtggccccatctctgtccgtggcgaccttaaagtcgcgcttgcttgcatggagcagcgcgcggaccacctcgctgctgcgaccaagcccgagggtggtgacgagaggcttggcacctccgcccccaccgccccgaggcagcggattgccacatgcgacgaggtcccggtcaaggaggttgccttgggcgacggcccatccaagaccacacggatcggtgccttcatccgcgaggaggtggcgaggcttctcgaggccggattcatccgtgaagtcatccatccggagtggctggcgaacccggtggtcgttcccaaggcgaacggcaagcttcggatgtgcatcgactacaccgaccttaacaaggcatgtcctaaggatccttaccccctgcctcgcatagatcagatcgtcgactccactgcggggtgcgaccttttgtgttttctagatgcatactctggttaccatcagattcgcatggctagggaggatgaggaaaaaactgcgttcattacccccgtaggaacctattgttatacatcaatgcccttcgggttaaagaatgcaggtcctacttttcaacgtactactcgaatttctttgggtagccaaataggacgtaatgttgaggcttatgtcgatgacttggttgtaaaaacgcgcaaccaagaaactttacttttagatctagcggaaacttttgagaacctccgctccgcccgcataaagctgaaccccgataagtgtgtgtttggtgtacctgcgggcaagcttctcgggttcttggtctctgcccgaggcattgaggccaaccccgagaagattcgagctattgagcggatgcgcccccccagcaaacttagggatgtgcaatgcgtcaccggttgcatggccgccctaagtcgtttcatatcaaggctgggagagaaggcgctacccttgtttaagctcctcaagcgctcggggccgtttacttggacggaggaagctgaacatgccctcactcagttaaaggcatatctcagctctcccccggttctagtcgccccggagccaaatgagtccctgctactttacttagcagcgaccccccaagtagttagtgcagcgttggttgtggagcgcgatgaggacaatcctcattctgcgcacccccactctgtgccgacttggcccgggagcaggcagggaggagaggcccccgagtcgaacggtggcctaaggcccccgacgaccggagtcggctctctgcccgcttgtcagacggtgctgggtgcccccgaccctcaggaaggccccgaggccactgcgggaaggccgcacctaccaccctttgaccccgaggctaaccctgtgctgattcgacccgggagagagcagggagaagaggcccccgagccgaacggaggcctgaggcccctgacgaccggagctggccctttgcccgcgtgtctgacgacgccaggagcccccgacccccagggcggccccgaggccactgtgggaaggccgcacctgtcatcttcggaccccgaggtcatcagcgcaggagacgagtgtgccccgagaggccactgggacgaagagcaccccggggatacggcccttagcgaagaggatcggccccgccgaaaggtgcagcggcctgtttactttgttagtgaggccctccgggacgccaaaacccgataccctcaggcccagaagatgctttacgctattctgatggcctcgaggaaactgcgccattatttccaagcgcatcgggtcactgtggttacgtcctaccccctcggccaaatcttacataatcgagaaggtaccggacgggtggtaaaatgggcaatcgagctttctgagttcgatctgcactttgaaccacgccacgctatcaagagccaagccctcgccgattttgtggcagagtggaccccggctccagagaccgtctcaatccccgaggccagcgcggacccctcacagctgcctcacgccgcccactgggtgatgcaattcgacggttctctgtctcttcagggcgccggtgcaggggtcacgttgacctctccaaacggagacgtcctcagatacttggtccgtctcgactttcgagcgactaataatatggcagagtacgagggactccttgccggactcagagtagcagctggactggggatccgccgcctcttggtgttaggcgactcccagctggtcgttaaccaggtctgtaaggagtaccggtgctccgacccacagatggacgcctacgtacgccaagtgcggcgtatggagcgccattttgatgggatagagcttcggcatgtacccagacgggacaacgtggttgccgacgaactctcaaggctcgcgtcctcgcgagcccaaaccccaccaggcgcctttgaagaaaggcttacccagccgtcggcgcgacccgaccccttaggggaaacggatacgcctgaccggcccccgaggcccgtcggagtccaggtctcgggacccgaagggagcgcttcaagctcccttagattgattgcgtggatctctgagatccaagcatacctcacagataagactctacctgaggaccgcgaagggagtgaacgcgtccaacgcatttccaaacgctatgtgctggtagaagggaccctctatcggcgcgcggctaacggaatcctcctgaagtgcattcctcaggaacaaggcgttgagcttcttgttgacatccatgagggcgagtgcggagcccattccgcctcgcgcaccctggttggcaaggcctttcgtcaaggattttattggccgacagctctcaatgatgcagtcgatctggtccggcgatgcagagcgtgtcagttccatgccaagcaaatccatcagccggcccaggccctgcagattataccactgtcatggccatttgctgtctgggggcttgatatcctgggaccgttcaaacgggccccgggcgggtttgagtatctgtatgttgcgatcgacaagttcactaagtggcccgaggcttatccggtcgtcaagatcgataagcactctgctcttaaattcattaagggcatcacggcccgttttggagtgcctaaccgtattattacggataatggcacccaattcactagtgaactcttcggcgactactgcgaagacatgggcatcaagctctgcttcgcctcacctgcccaccccagaagcaatggccaagtggagcgcgccaatgcagaaatcctcaaaggccttaaaaccaagaccttcaatattctcaagaagcacggcgattcatggatcgaggagttgccagcggtgctctgggcaaaccgaaccacaccaagccgagcgaccggggaaacgcctttcttcctcgtctacggcgcagaagcggttctcccatccgagctcaccctgaggtctcctcgggccaccatgtactgcgaggctgatcaagatcagcttcgcagagatgacctcgactacttagaagagcgaaggcggcgcgcggccctccgagccgcgcgctaccagcagagcttgcggcgctaccatcagcgccacgtccgggcccgatcactctgcgtcgacgacctcgtcctacgccgcgtccaaacgcgtgctggattgagcaaactctcaccaatgtgggagggtccgtatcgagtgatcggtgtcccccggccgggctcggtacggctggccacgggcgacggcacggagctgcctaacccatggaacatcgaacaccttcgtcgcttctacccctga

SEQ ID NO: 47660 - DNA, 6084 bp, Oryza sativa
  Clone ID: PAT_MRT4530_50407C.1
atggccgagcaagcaaaggcgcacgacctctctccgagtgtgagcggcgacgacggggagccaaacccgcgccgtcgagctcgtactcccccacctcctcctcgccaaagccctaagcagggggaggcgctcgagagggtagataaatccgcagcatcaccggtcgtgggtgatgcaggagaacggcgagatggggagcgtcgcctcctcgtctacggcgacggcagcacgcctcagggcgcgcttcaggctgccggcgcgctcctacgacacccgcctgtcgtccatgacccggagtctccagcccaacgatggctggaagacgtggccaacttggtcatgacggcacagcagcgcctgggtgctggtggacggtccgccaccaccaagacctccggcgccgccaccaccggttccgtgtcatcaaggcggagggcgcggcgagcggcggcggctgcacgtcattcggctgccactccctcgtcgacacctccaactcgggaggatcagcatggggagccggatgcccgcctcgacatcgagcgccggcgtaataaccggcgtactccccgcgcaacggagggcgcctcttcgtccagagtgtcacctcgacatggacgtgaggatcagccctccgtgcccccggtcggtggtgttggctgtagagcctttgtggcgagtcttcggaatgtccgttggcccccaaggttccggcccaccatcaccgagaagtacgatgggagcgtcaaccccaccgagtttctccaggtctatacgaccgggatcgaggccgctgggggtgacgacagggtcatggcgaacttctttcccatggccctaaaaggacaggcgcggggttggctaatgaacctgccacccgcgtcggtccactcctgggaagatttgtgccaacagttcgccatgaacttccaaggcacatatccgcgcccaggcgaagaagcggacttgcatgcagtacagcgaggcgatgatgagtcgcttcgctcgtacattcagcggttttgccaagtccgcaatactataccatgcatccctgcacacgcggtgatctacgcgttcagggggggcgtgcggcacaaccgcatgctcgaaaagattgcttccaaagagccccagactaccgcggagctttttcagctcgcggaccgagtggctcgtaaggaggaagcgtggacatggaactcctccggttccggagtggcagcttcggccgcccccggatccgccgctcagacagggcggcgtgacaggaggaggaagaagaggtcggaccgttccggcgacgagagtcatgtcctcgccgtcgagggcgctccgcgggccactcgaaaggggaggcctgcgagcgataaaaagaaagaggctggtactcccagcagggagcgccccgccggcaggtggtgctccgtccacaacacctccctccacgatctcgcggactgtcgtgcagtcaaaaacctggctgagcgaacgaggaagtgggaggaggacaggaggcaggaacgccgtgagggcaagtccccggcggttccttccggcaaacggcgaagtgaggccaagcagaaggcccccgctgttgacatcgatgatggagatgatgacctaggtttccaagaacctggggccaccattgccaccgtcgatggaggagcgtgtgctcacgtctctcgccggagcttcaaggctatgaagcgagagcttctggccatggcccctactcatgaggcgatgcgtcgggcgcggtggtcggaggttgctctcattttcgaccagaccgaccacccaccgtgcattgcccggggagggcaggttgcgatggtggtttcccccaccatctgcaacgtgaagttgggacgtgtcctcatagatggaggagcggccctcaacatcctttcccccgcggcctttgatgccatcaaggccccggggatggtgctccgaccgtcccagccgattatcggtgtgacgccggggcatacgtggccattaggtcacatcgacctaccggtcaccttcggtggacccgccaacttccgcacggagcgggtgagcttcgatgtggcggacctcagtctgccctacaacgcggtcctagggagacccgcgttggtgaagttcatggcggcggtccactacgcctacctccagatgaagatgccgggccccggtggccccatctccgtccgtggcgaccttaaagtcgcgctcgcttgcatggagcagcgcgcggaccacctcgctgctgcgaccaagcccgagggtggtgacgagaggcttggcacctctgcccccaccgccccgaggcagcggatcgccacatgcgacgaggtcccggaagacgcgctcgtctccttcctgcgggcaaacgctgacgtcttcgcatggagaccagcagacatgcccggggtccccagggaggtgattgagcaccgtctcgccgtgcggccgggcgcaaggccggtccggcagaaagtgcggcggcaggccccagaacgtcaagccttcatccgcgaggaggtggcgaggcttctggaggccggattcatccgtgaagtcatccatccggagtggctggcgaacccggtggtcgttcccaaggcgaacggcaagcttcggatgtgcatcgactacaccgaccttaacaaggcatgtcctaaggatccttaccccctgcctcgcatagatcagatcgtcgactccacagcggggtgcgaccttttgtgttttctagatgcatactctggttaccatcagattcgcatggctagggaggatgaggaaaaaactgcgttcattacccccgtaggaacctattgttatacatcaatgcccttcgggttaaagaatgcaggtcctacttttcaacgtactactcgaatttctttgggtagccaaataggacgtaatgttgaggcttatgttgatgacttggttgtaaaaacgcgcaaccaagaaactttactttcggatctagcggaaacttttgagaacctccgctccgcccgcataaagctgaaccctgataagtgtgtgtttggtgtacctgcgggcaagcttctcgggttcttggtctctgcccgaggcattgaggccaaccccgagaagattcgagctatcgagcggatgcgcccccccggcaaacttagggatgtgcaatgcgtcaccggttgcatggccgccctaagtcgtttcatatcaaggctgggagagaaggcgctacccttgtttaagctcctcaagcgctccgggccgtttacttggacggaggaagctgaacatgcccttactcagttaaaggcatatctcagctctcccccggttctagtcgccccggagccaaatgagcccctgctactttacttagcggcgaccccccaagtagttagtgcagcgttggttgtggagcgcgatgaggacaatcctcattctgcgcacccccattctgtgccgactcggcccgggagcaggcagggaggagaggcccccgagtcgaacggtggcctaaggcccccgacgaccggagtcggccctctgcccgcttgtcagacggtgccggatgcccccgaccctcaggaaggccccgaggccactgcgggaaggccgcacctaccaccctttgaccccgaggctaaccctgtgctgattcgacccgggagagggcagggagaagaggcccccgagccgaacggaggcctgaggcccctgacgaccggagctggccctttgcccgcttgtctgacgacgccaggagcccccgacccccaggacggccccgaggccactgtgggaaggccgctcctgtcgtcctccgaccccgaggtcatcggcacagaagacgagtgcgccccgaggggccacttggacgaagaacgccccgggggtacggcccttagcgaagaggatcggccccgccgaaaggtgcagcggcctgtctactttgttagtgaggccctccgggacgccaagacccgatacccacaggcccagaagatgctttacgctattctgatggcctcgaggaaactgcgccattatttccaggcgcatcgggtcactgtggttacgtcttaccccctcggtcaaatcttgcataatcgagagggtacaggacgagtggtaaaatgggcaatcgagctttctgggttcgatctgcactttgaaccacgccacgctatcaagagccaggccctcgccgattttgtggcagagtggaccccggctccagagaccgtctcaatacccgaggccagcacgaacccctctcagctgcctcacaccgcccactgggtgatgcaatttgacggttctctgtctcttcagggcgccggtgcaggggtcacgttgacctctccaagcggagacatcctcagatacttggtccgtctcgactttcgagcgactaataatatggcagagtacgagggactccttgccggactcagggtggcagccgggctggggatccgccgcctcctggtgttaggcgactctcagctggtcgttaaccaagtctgtaaggagtaccggtgctctgacccgcagatggacgcctacgtgcgccaagtacggcgtatggagcgccattttgacgggatagagcttcggcatgtgcccagacgggataatatgattgccgacgaactctcacggctcgcgtcttcgcgagcccagaccccaccgggcgcctttgaagaaaggcttacccagccgtcggcgcgacccgaccccttaggggagacggatgcacctgaccggcccccgaggcccgtcggagtccaggcctcgggacccgaagggagcgctccaagctcccttagattgattgcttggatctctgagatccaaacatacctcacagataagactctacctgaggaccgcgaagggagtgaacgcgtacaacgcatttccaaacgctacgtgttggtagaagggaccctctatcggcgcgcggctaacggaatcctcctgaagtgcattcctcaggaacaaggcgttgagcttcttgctgacatccatgaaggcgaatgcggagcccattccgcctcgcgtaccctggttggcaaggcctttcgtcaagggttttattggccgacagctctcaatgatgcagtcgatctggtccggcgatgcagagcgtgtcagttccacgccaagcaaatccatcagccggcccaggccctgcagatcataccactgtcatggccatttgcggtctgggggcttgatatcctgggaccgttcaaacgggccccaggcgggtttgagtatctgtatgttgcgatcgacaagttcactaagtggcccgaggcttatccggttgtcaagatcgataagcactctgctcttaaattcattaagggcatcacggcccgttttggagtgcctaaccgtattattacggataatggcacccaattcactagtgaactcttcggcgactactgcgaagacatgggcatcaagctctgcttcgcctcacctgcccatcccagaagcaatggccaagtggagcgcgccaatgcagagatccttaaaggcctcaaaaccaagaccttcaacattctcaagaagcacggcgattcatggatcgaggagttgccagcggtgctctgggcgaaccgaaccacaccaagccgagcgaccggggaaacgcctttcttcctcgtctacggcgcagaagcggttctcccatccgagctcaccctgaggtctcctcgggccaccatgtactgcgaggctgatcaagatcagcttcgtagagatgacctcgactacttggaagagcgaaggcggcgcgcggccctccgagccgcgcgctaccagcagagcctgcggcgctaccatcagcgccacgtccgggcccgatcactctgcgtcgacgacctcgtcctacgccgcgtccaaacgcgtgctggactgagcaagctctcaccaatgagggagggtccgtatcgagtgatcggtgtcccccggccgggctcggtacggctggccacgggcgacggcacggagctgcctaacccatggaacatcgaacaccttcgtcgcttctacccctga

SEQ ID NO: 47661 - DNA, 625 bp, Oryza sativa
  Clone ID: PAT_MRT4530_50408C.1
cggttcaggtgctggtttgggccaaggccgcagcaactgtgcttgaagggttttacgcattcttcctccactccgatgaaaaaaagcctattgaggtaacgtaacataagtattattactccaaattgaagtttaaccatcatcatgatgtatgtatatataggggctgacagaatgaaagtttaagaacttcatcatgagatgtgatcgatcactggaagaatatttcacagaaaccaaacgaaagggccctattgattgattaccttgtgccaattctgctctaatggctttgaaacaaatgtgcccccggaactgcataaatttcaagagtggtctatgaaaattggagaatgggaggaattgcacacatgaactgtcttgccagagtggaaatgctatggtaatgatatactggaactcctttttatgggctccaaaaaaaaaaaaaaaggcaaaaaactatttgagcacggaaattttcagtggcaaaaccttactgcgaataaaagcaaagcactgcaaaatctaaagctttgcatgggtcaagtactcaagtttatgccctttttcagacaagggaaacaatttggcttggcccaaagaaccctttccagagcccccc

SEQ ID NO: 47662 - DNA, 267 bp, Oryza sativa
  Clone ID: PAT_MRT4530_50409C.1
atggcctctgcagagagaagaataaggatgtggtggcgcacagctagaaggcctaagcatctatggggtcgccggagcatgctctacatgggccacagccgcatctacacggaccactactacgaccccatcgagctccatgggcagccgccgccactgcttggtgtgccgcaatctgtgaatggggaggagacggaggggattgggaggagacgcggtggcagcaacgatgggaggaggcacggagagatggcaccggagacttga

SEQ ID NO: 47663 - DNA, 859 bp, Oryza sativa
  Clone ID: PAT_MRT4530_5040C.1
atgacgtcaccaccggcggcggcggctcggtggctcggacggctcggacggcgcacgctcgccggtgaacggcggcgcttcggcacgaacggagggcaccaacaggtagcggacggcacggcgaactcaccggcgaccaaagcgacggcggaagaccaagggacggcgacggcgacgaggttgaaacggcggcggtcttcggcttgacgacggcgacgatgctccggcggtctccgacggtggcgaagcggcggacgaggacggcgacgacttggcgaccacgacggcggtcttcccgagcgacgacaatgactggaacggcggcggcgcacgactggagcgacggcggcgacggcggcgctagggcacacggcgctagagcgctacgggcgacgagaggcgaaggcgagggtggcggcgggtagaggagacaccggggaagcttataaaggggctaggaggcggcggcgaaggcccacggtggccggcgacgagaaggaaagtttagggttcggaggagagagatgaaaccgattcgaactcgattccaacgatttccaaaacgaattagccgatgtttccaaaagagaaaaggtagatgagatcgagaagatcatttcccctctatcaattcgaccggaaacggaaaggagcggccggatttgaaaggagacggcggcggcgcggcgctagggtttcgggcggcggcggcgcgacgaagacgatggatccgacaagcgggccccacctgtcagcgaccgaacacgcgcgcgggcggctgcggactgggccggactgggccgaggagagagagaaaggttttgggccgactttcggcccaaagccaaaagaagacttt

SEQ ID NO: 47664 - DNA, 1071 bp, Oryza sativa
  Clone ID: PAT_MRT4530_50410C.1
cccacgcgtccgcccacgcgtccgatatatagggactgacagaatgaaagtttaagaacttcatcatgagatgtgatcgatcactggaagaatatttcacagaaaccaaacgaaagggacctattgattgattaccttgtgccaattctgctctaatggctctgaaacagatgtgcccacggaactgcataaatttcaagagtggtctatgaaaattggagaatgggaggaattgcacacatgaactgtcttgccagagtggagatgctatgggataggcaaaatacttgatagggctttctggctgtttggcatttgtcagacgccctgtgtgtggtaacatctcgatcaaattggaggtcgaaattaaatatatccggtgagaagagatcacgagatcgatcgctacctatatatcacagatagaaatcagagtcctatcgatattttcgccgagcatatataagtagtgctgtcgatggcgagcccaattcgtgctttataaaaacagaacaaaaaaaaaaagaatatgagtttgtgtgcgtatcattttttctgggttaattgtattttgatcaatcagcatcctgtaaaatgaggtcgtgtagatcatgtgctggtaatgatatactggaactcctttttatgggctccataatggccgcacttggcatccgactatctgagcacggaaattttcagtggcaaaaccttactgcgaatagaagcaaagcactgcaaaatctagagctttgcatgggtcaagtactcaagtttatgacctttttcagacaagggatacaatctggcttggcccaaagaacacattacagagacagagacaatgggctccataatcttccattgaaaagaaaaataagaaactggagctggagtgggagatgtttcaagaagaattgagccatcaatctctctctctctggtttcctactggccctggagcctccatatgcaaacattcttttaataaatatgcaaattttctgcactaaaatccgccacacatcaataaaaagggcagtccttttgatgataaaaaaaaaaaacaaa

SEQ ID NO: 47665 - DNA, 5298 bp, Oryza sativa
  Clone ID: PAT_MRT4530_50411C.1
atggccgagcagggaaaagcgcacgacctctctccgagtgtgagcggcgacgacggggagccgaatccacgccgtcgagctcgtactcccccacctcctccgcgccaaagccctaagcagggggaggcgcttgagagggtcgacaaatccgtggcatcaccagtcgcaggtgatgcaggagaacggcgagatggggagcgtcgcctcctcgtctacggcgacggcagcacgcctcagggtgcgcttcaggctgctggcgcgctcctacgacacccgcctgtcgtccatgacccggagtctccagcccaacgatggctggaagacgtggccaacttggtcatgacggcacagcagcgcctgggtgctggtggacggtccgccaccaccaagacctccggcgccgctaccaccggctccgtgtcatcaaggcggagggcgcggcgagcggcggcggctgcacgtcattcggctgccactccctcgtcgacaccgtcgactcgggaggatcagcatggggagccggatgcccgcctcaacatcgagcgcaggcgtaatagccggcgtactccccgtgcaacggagggcgcctcctcgtccagaatgtcacctcgacacggacgtgaagatcagccctccgtgcccccggccggtggtgttggctgtagagcctttgtggcgagtcttcggaatgtccgttggcccccaaggttccggcccaccatcaccgagaagtacgatgggagcgtcaaccccaccgagtttctccaggtctatacgaccgggatcgaggccgctgggggtgacgacagggtcatggcgaacttctttcccatggccctaaaaggacaggcgcggggttggctaatgaacctgccacccgcgtcggtccactcctgggaagatttgtgccaacagttcaccatgaacttccaaggcacatatccgcgcccaggcgaagaagcggacttgcatgcagtacagcgaggcgatgatgagtcgcttcgctcgtacattcagcggttttgccaagtccgcaatactataccatgcatccctgcacacgcggtgatctacgcgttcagggggggtgtgcggcacaaccgcatgctcgaaaagattgcctccaaagagccccagactaccgcagagctttttcagctcgcggaccgagtggctcgtaaggaggaggcctggacctggaacccctccggttccggtgtggcagcttcggccgcccccggatccgccgctcagacagggcggcgtgacaggaggaggaagaaaaggtcggcccattccggcgacgaggggcacgtcctcgccgtcgagggcgctccgcgggccacccgaaaggggaggcctgcgagcgacaaaaagaaagaggctggtactcccaaccgggagcgcccagccagcaagtggtgctccgtccacaacacctccctccacgatctcgcggactgtcgtgcagtcaaaaatttggctgagcgaacgaggaagtgggaggaggacaggaggcaggaacgccgtgagggcaagtccgcggcagttccctccggtagacggcgaagtgaggccagacagaaggcccccgccgttgaccccgatgacggtgatgatgacctaggtttccaagaacctggggccaccattgccactgtcgacgggggagcgtgtgctcacgtttctcgccggagcttcaaggctatgaagcgagagcttctagccgcggcccctactcatgaggcgacgcgtcgggcgcggtggtcggaggtggccctcacctttgatcagaccgaccacccaccgtgcgttgcccggggagggcagattgcgatggtggtttcccccactatctgcaacgtgaagttggggcgtgtcctcatagatggaggagcggctctcaacatcctttcccccacggcctttgatgctatcaaggccccggggatggtgctccagccgtctcaaccgatcatcggtgtgacgccggggcacacatggccgttaggtcacatcgacctaccggtcacctttggtggatcagccaacttccgcacggagcgggtgaacttcgatgtggcggacctcagtctgccctacaacgcggtcctggggagacccgcgttggtgaagttcatggcggcggtccactacgcctacctccagatgaagatgccgggccccgggggccccatctctgtccgtggcgaccttaaagtcgcgctcgcttgcatggagcagcgcgcggaccacctcgctgctgcgaccaagcccgagggtggtgacgagaggcttggcacctccgcccccaccgccccgaggcagcggattgccacatgcgacgaggtcccggaagacgcgctcgtctccttcctgcgggcaaacgctgacgtcttcgcatggagaccagcggacatgcccggggtccccagggaggtgattgagcaccgtctcgccgtgcggccgggcgcaaggccggtccggcagaaagtgcggcggcaggccccggaacgtcaagccttcatccgcgaggaggtggcgagacttctggaggccggattcatccgtgaagtcatccatccggagtggctggcgaacccggtggtcgttcccaaggcgaacggcaagcttcggatgtgcatcgactacaccgaccttaacaaggcatgtcctaaggatccttaccccctgcctcgcatagatcagatcgtcgactccactgcggggtgcgaccttttgtgttttctagatgcatactctggttaccatcagattcgcatggctagggaggatgaggagaaaactgcgttcattacccccgtaggaacctattgttatacatcaatgcccttcgggttaaagaatgcaggtcctacttttcaacgtactactcgaatttctttgggtagccaaataggacgtaatgttgaggcttatgttgatgacttggttgtaaaaacgcgcaaccaagaaactttactttcagatctagcggaaacttttgagaacctccgctccgcccgcataaagctgaaccctgataagtgtgtgtttggtgtacctgcgggcaagcttctcgggttcttggtctctgcccgaggcattgaggccaaccccgagaagattcgagctatcgagcggatgcgcccccccagcaaacttagggatgtgcaatgcgtcaccggttgcatggccgccctaagtcgtttcatatcaaggctgggagagaaggcgctacccttgtttaagctcctcaagcgctccgggccgttcacttggacggaggaagctgaacatgcccttactcagttaaaggcgtatcttagctctcccccggttctagtcgccccggagccaaatgagtccctgttactttacttagcagcgaccccccaagtagttagtgcagcgttggttgtggagcgcgatgaggacaatcctcattctgcgcacccccactctgtgccgacttggcccgggagcaggcagggaggagaggcccccgagtcgaacggtggcctaaggcccccgacgaccggagtcggccctctgcccgcttgtcagacggtgctgggtgcccccgaccctcaggaaggccccgaggccactgagggaaggccgcacttatcgccctttggccccgaggctaaccctgtgctgactcgacccgggagagagcagggagaagaggcccccgagccgaaaggaggcctgaggcccctgacgaccggagctggccccttgcccgcttgtccgatgacgccaggagcccccgacccccaggacggccccgaggccactgtgggaaggccgctcctgtcgtcctccgaccccgaggtcatcggcacagaagacgagtgcaccccgagaggccacttggatgaagaacgccccggggatacggcccctagcgaaggggatcggccccgccgaaaggtgcagcggcccgtctactttgttagtgaggccctccgggacgccaagacccgataccctcaggcccagaagatgctttacgctattctgatggcctcgaggaaactgcgccattatttccaggcgcatcgggtcactgtggttacgtcttaccccctcgggcaaatcttgcataatcgagagggtacaggacgggtggtaaaatgggcaatcgagctttctgaattcgatctgcactttgaaccacgccacgctatcaagagccaggccctcgccgattttgtggtagagtggaccccggctccagagaccgtctcaatccccgaggccagcacgaacccctcgcagctgcctcacaccacctactgggtgatgcagttcgatggttctctgtccctccagggtgccgtcgatctggtccggcgatgcagagcgtgtcagttccacgccaagcaaatccatcagccggcccaggccctgcagatcataccactgtcatggccatttgctgtctgggggcttgatatcctgggaccgttcaaacgggccccgggcgggtttgagtatctgtatgttgcgatcgacaagttcactaagtggcccgaggcttatccggttgtcaagatcgataagcactctgctctcaaattcattaagggcatcacggcccgttttggagtacctaaccgtattattacggataatggcacccaattcactagtgaactcttcggcgactactgcgaagacatgggcatcaagctctgcttcgcctcacctgcccaccccagaagcaatggccaagtggagcgcgccaatgcagaaatcctcaaaggccttaaaaccaagaccttcaatattctcaagaagcacggcgattcatggatcgaggagttgccagcggtgctctgggcaaaccgaaccacaccaagccgagcgaccggggaaacgcctttcttcctcgtctacggcgcagaagcggttctcccatccgagctcaccctgaggtctcctcgggccaccatgtactgcgaggctgatcaagatcagcttcgcagagatgacctctactacttagaagagcgaaggcggcgcgcggccctccgagccgcgcgctaccagcagagcttgcggcgctaccatcagcgccacgtccgggcccgatcactctgcgtcgacgacctcgtcctacgccgcgtccaaacgcgtgctggattgagcaagctctcaccaatgtgggagggtccgtatcgagtgatcggtgtcccccggccgggctcggtacggctggccacgggcgacggcacggagctgccaaacccgtggaacatcgaacaccttcgtcgcttctacccctga

SEQ ID NO: 47666 - DNA, 6574 bp, Oryza sativa
  Clone ID: PAT_MRT4530_50412C.1
tcagctctcagctctttcctctcccctcacctctcctcctctccccgacgctgacggcggcggagggcggcagctaccggtggaggcggcggcggagggcgggggccggcggcgctcccctcccttgctccctcccagatctggcctgaggggggcggggggagggtggtggccacgcgtgcggcggcagcgacggcagcggcgggaggttggcggcggagggcagtggctaccggtggaggcggtggcggctcctggctcctccctaacttccagatctggcccgaggggggtggtggcccgcggcgctcccctccctcgctccctcccagatctggcctgagggggcggggggagggcggtgaccactcgtgcggcggtggcggcggcgggaggttggcggcagcgggaggaagggggccgcgtgtcacgccagaaattgactcctgcagcgggcgactccattccacaggcaatacttgacggcagcgacaaaaccaacctcaacgagacagctccaactaggaagatcttcagctctgttatgggggaaaagagagcaagactgagtactacccactatactcagcaagtcataccggaagaggagggggaggcactcgagagagtcgaaaaatccgcagcatcgccagtcgcgggtggtgcaggagaacggcgagatggggagcgtcgcctcctcgtctacggtgacggcagcacgcctcagggcgcgcttcaggctgttggcgcgctcctacgtcacccgcctgtcgtccctgacccggagtctccagcccagcgatggctggacgacgtggccaacttggtcatgacggcacagcagcgcctgggtgctggtggacggtccgccaccaccaagacctccggcgccgctaccaccggctccgtgtcgtcaaggcggagggcgcggcgagcggcggctgctgcgcgccattcggccgccactccctcgtcgacacctccaactcgggaggatcagcatggagagccggatgcccgcatcgacatcgagcgccggcgtaataaccggcgtactccccgtgcaacggagggcgcctcttcgtccagagtgtcacctcgacatggacgtgaggatcagccctccgtgcccccggccggtggtgttggctgtagagcctttgtggcgagtcttcggaatgtccgttggcccccaaggttccggcccaccatcaccgagaagtacgatgggagcgtcaaccccaccgagtttctccaggtctatacgaccgggatcgaggccgctgggggtgacgacagggtcatggcgaacttctttcccatggccctaaaaggacaggcgcggggttggctaatgaacctgccacccgcgtcggtccactcctgggaagatttgtgccaacagttcaccatgaatttccaaggcacatatccgcgcccaggcgaagaagcggacttgcatgcagtacagcgaggcgatgatgagtcgcttcgctcgtacattcagcggttctgccaagtccgcaatactataccatgcatccctgcacacgcggtgatctacgcgttcagggggggcgtgcggcacaaccgcatgctcgaaaagatcgcttccaaagagccccagactaccgcggagctttttcagctcgcggaccgagtggctcgtaaggaggaagcgtggacatggaactcctccggttccggagtgacagcttcggccgcccccggatccgccgctcagacagggcggcgtgacaggaggaggaagaagaggtcggaccgttccggcgacgagggtcatgtcctcgccgtcgagggcgctccgcgggccactcgaaaggggaggcctgcgagcgacaaaaagaaagaggctggtactcccagcagggagcgccccgccggcaggtggtgctccgtccacaatacctccctccacgatctcgcggactgtcgtgcagtcaaaaacctggctgagcgaacgaggaagtgggaggaggacagaaggcaggaacgccgtgagggcaagtccccggcggttccttccggcaaacggcgaagtgaggccaagcagaaggcccccgctgttgacatcgatgatggtgatgatgacctaggtttccaagaacctggggccaccattgccaccgtcgatggaggagcgtgtgctcacgtctctcgccggagcttcaaggctatgaagcgagagcttctggccatggcccctactcatgaggcgatgcgtcgggcgcggtggtcggaggttgctctcactttcgaccagaccgaccacccaccgtgcattgcccggggagggcaggttgcgatggtggtttcccccaccatctgcaacgtgaagttgggacgtgtcctcatagatggaggagcggccctcaacatcctttcccccgcggcttttgatgccatcaaggccccggggatggtgctccgaccgtcccagccgattatcggtgtgacgccggggcacacgtggccattaggtcacatcgacctaccggtcaccttcggtggacccgccaacttccgcacggagcgggtgaacttcgatgtggtggacctcagtctgccctacaacgcggtcctggggaggcccgcgttggtgaagtttatggcggcggtccactacgcctacctccagatgaagatgccgggccctggtggccccatctctgtccgtggcgaccttaaagtcacgctcgcttgcatggagcagcgcgcggaccacctcgctgctgcgaccaagcccgagggtggtgacgagaggcttggcacctccgcccccaccgccccgaggcagcggattgccacatgcgacgaggtcccggaagacgcgctcgtctccttcctgcgggcaaacgctgacgtcttcgcatggagaccagcggacatgcccggggtccccagggaggtgattgagcaccgtctcgccgtgcggccgggcgcaaggccggtccggcagaaagtgcggcggcaggccccggaacgtcaagccttcatccgcgaggaggtggcgagacttctggaggccggattcatccgtgaagtcatccatccggagtggctggcgaacccggtggtcgttcccaaggcgaacggcaagcttcggatgtgcatcgactacaccgaccttaacaaggcatgtcctaaggatccttaccccctgcctcgcatagatcagaccgtcgactccactgcggggtgcgaccttttgtgttttctagacgcatactctggttaccatcagattcgcatggctagggaggatgaggaaaaaactgcgttcattacccccgtaggaacctattgttatacatcaatgcccttcgggttaaagaatgcaggtcctacttttcaacgtactactcgaatttctttgggtagccaaataggacgtaatgttgaggcttatgttgatgatttggttgtaaaaacgcgcaaccaagaaactttactttcagatctagcggaaacttttgagaacctccgctccgcccgcataaagctgaaccccgataagtgtgcgtttggtgtacctgcgggcaagcttctcgggttcttggtctctgcccgaggcattgaggccaaccccgagaagattcgagctatcgagcggatgcgcccccccagcaaacttagggatgtgcaatgcgtcaccggttgcatggccgccctaagtcgtttcatatcaaggctgggagagaaggcgctacccttgtttaagctcctcaagcgctcggggccgtttacttggacggaggaagctgagcatgcccttactcagttaaaggcatatctcagctctcccccggttctagtcgccccggagccaaatgagcccctgctactttacttagcggcgaccccccaagtagttagtgcagcgttggttgtggagcgcgatgaagacaatcctcatttcgcgcacccccgccctgtgctgacttggcccgggagcgagcagggaggagaagcccccgagtcgaacggtggcctaaggcccctgacgaccggagtcggccctctgcccgcttgtcagacggtgctgggcgcccccgaccctcaggaaggccccgaggccactgcgggaaggccgcacctatcgccctttggccccgaggctaaccctgtgctgactcgacccgggagaaagcagggagaagaggcccccgagccgaacggaggcctgaggcccctgacgaccggagtaggccctttgcccgcttgtccgacgacgccaggagcccccgacccccaggacggccccgaggccactgtgggaagaccgctcctgtcatcctccgaccccgaggacatcggcacagaagacgagtgcgccccgagaggccacttggacgaagaacgccccggggatgcggcccctagcaaagagggtcggccccgccgaaaggtgcagcggcctgtctactttgttagtgaggccctccgggacgccaagacccgataccctcaggcccagaagatgctttacgctattctgatggcctcgaggaaactgcgccattatttccaggcgcatcgggtcactgtggttacgtcttaccccctcgggcaaatcttgcataatcgagagggtacaggacgagtggtaaaatgggcaatcgagctttctgagttcgatctgcactttgaaccacgccacgctatcaagagccaggccctcgccgattttgtggcagagtggaccccggctccagagaccgtctcaatacccgaggccagcacggacccctctcagctgcctcacaccgcccactgggtgatgcagttcgacggttctctgtctctccagggcgccggtgcaggggtcacgttgacctctccgaacggagacgtcctcagatacttggtccgtctcgactttcgagcgactaacaatatggcagagtatgagggactccttgccggactcagagtggcggccggactggggatccgccgcctcctggtgttaggcgactctcagctggttgttaaccaagtctgtaaggagtaccggtgctctgacccgcagatggacgcctacgtgcgccaagtacggcgtatggagcgccattttgacgggatagagcttcggcatgtgcccagacgggataatatgattgccgatgaactctcacggctcgcgtcctcgcgagcccagaccccaccgggcgcctttgaagaaaggcttacccagccgtcggcgcgacccgaccccttaggggagacggatgcgcctgaccggcccccgaggcccgtcggagtccaggtctcgggacccgaagggagcgctccaagctcccttagattgattgcttggatctctgagatccaagcatacctcacagataagactctacctgaggaccgcgaagggagtgaacgcgtccaacgcatttccaaacgctatgtgctgatagaagggaccctctatcggcgtgcggctaacggaatcctcctgaaatgcattcctcaggaacgaggcgttgagcttcttgccgatatccatgaaggcgaatgcggagcccattccgcctcgcgcaccttggttggcaaggcctttcgtcaagggttctattggccaacagctctcaatgatgcagtcgacatggtccggcgatgcagagcgtgtcagttccacgccaagcaaatccaccagccggcccaggccctgcagatcattccactttcgtggccatttgctgtctgggggctcgatatcctgggaccgtttaagcgggccccgggcgggtttgagtatctgtatgtcgcgatcgacaagttcactaagtggcccgaggcttatccggtcgtcaagatcgataaacactctgctcttaaattcattaagggcatcacggcccgctttggagtgcctaaccgtattattacggataatggcacccaattcactagtgaactcttcggcgactactgcgaagacatgggcatcaagctctgcttcgcctcacctgcccaccccagaagcaatggccaagtggagcgcgccaatgcagaaatccttaaaggcctcaaaaccaagaccttcaacattctcaagaagcacggcgattcatggatcgaggagttgccagcggtgctctgggcgaaccgaaccacaccaagccgagcgaccggggaaacgcctttcttcctcgtctacggcgcagaagcggttctcccatctgagctcaccctgaggtctcctcgggccaccatgtactgcgaggctgatcaagatcagcttcgtagagatgacctcgactacttggaagagcgaaggcggcgcgcggccctccgagctgcgcgctaccagcagagcctgcggcgctaccatcagcgccacgtccgggcccgatcactctgcgttgacgacctcgtcctacgccgcgtccaaacgcgtgctggactgagcaagctctcaccaatgtgggagggcccgtatcgagtgatcggcgtcccccggccgggctccgtacggctggccacgggcgacggcactgaactgccgaacccgtggaacatcgagcaccttcgtcgcttctacccctga

SEQ ID NO: 47667 - DNA, 558 bp, Oryza sativa
  Clone ID: PAT_MRT4530_50413C.1
tatggccttttttcctattttgagtcgggccaaaaagcagattttgttcttcatccttcctaagtgaattcgaagcctttacagttgcgtgcaagttccagcgggacacgtaatgagatatgtccgaggatgcctaaagagcttagctgtactaacattaagttacaaaccgcttactgtgagctggacaccgggaatgcttcagccgacaagagttttagtgattcactccacaatacacatacaggtgcagaaactggagcgaacaaacaacctaaccaagctggttttaacttctgatggggcatttaaccacagggaattgcttcttccaaaagaaaagaaatgcctttgttcttgggggggctacgttacttgtcgccgtgaaccgtgtgtgaatactggagcttccagaaccggagctctgccatggccacgggttaccctgcttgcctatggtgctgaggcatgaccagcattttatatttcgactcttcagtgcaagatccagattgctctttggactataactagaccactccgggaagatggaaacag

SEQ ID NO: 47668 - DNA, 495 bp, Oryza sativa
  Clone ID: PAT_MRT4530_50414C.1
atgtttgaagaaacgctgatcgcgtcgctgctatctaggtgcatgccgacgccgcgtcaacaatggaggatactacgtagcggatagcgcccatccatccccacaaacgtctgcctggtcttggccaagggacgtacgctgtgaggcagcgttccagcgaacgcagggtgccaacggacaagggctataactactgctcctgtgggccttgccactattgctatgtggaggttaccgccgacaacactgctatggattcatgcaagacctgtttcttccaggtgctgacagtcacacctaaataccccggtcactcggggaaattatcatggcctgggcaagctcagtaagatagtgacggagcgtgctccaatgagtatggtatggttgacgagcttggtatggacgcctactcatatgatgtggccaataccaatgtttatgacagcgagaaacacatcagccctaactagcgtgatcatgctcgcgaagacc

SEQ ID NO: 47669 - DNA, 383 bp, Oryza sativa
  Clone ID: PAT_MRT4530_50415C.1
aaaggggaagaaaccaccacattagatttggcggaagaaaccaccacacttttaaggcttaaccacgggaccacaggtgaaaaaatcggggggtttttttaacataaaccaggggataataaaccttgggacggactggcaattaagtaacaaaacacagggcacatgttaaaagaagttcatttataagcacgagaattcgaacagagacgggcccgggaaatttgggccaagaaaaaaaagacgggggccatttaaggcttgggaaaaaaaaaacaggtttgggggaaggcaaaaaaacacacatggcgggaaaaaaacgctggtaaaaagctacgggttttttttttggggggaggggtccacttgggatatgggaaggg

SEQ ID NO: 47670 - DNA, 602 bp, Oryza sativa
  Clone ID: PAT_MRT4530_50416C.1
tttttctttctttttttttttttttttcttttttttttttttttttttttttttttttgggaccaaacaaatgcgggggaaaatttttttttcaacccggggggtaaatcccccatttaaacaatccccccttgaataatttgaaacctaacgggggcttatatcttcttgcttgaatcccaaataacatagtcctggtttttatagagagccaactaaacaactcgattttaatttcatggaagggaaacacccaaaacaccgggtaaatagatagatagatagataacccgataatttcaccccctctgttgcatcgcctattgttcgggggcccccttgttgggcttaccatgataaattgcaggggatcctgaacccccctatttccctggtgggtaagacccctgggttagttcatccccattgtttttcgagccctgcttgattaggatagtccttaagggcctttttaacaacagccttgctggttgaataaatggttgcatgcccaagggaggggagattttccaaacctaaatcttttaagccccccctccttaggctggtccaaatacaaataaaaagcctttcaagggggg

SEQ ID NO: 47671 - DNA, 284 bp, Oryza sativa
  Clone ID: PAT_MRT4530_50417C.1
gagggaggtgctgccaaaatttttaacaattttttttgtgttaatatacaaatttgaggtctctaaaaggttaatggatcggtaacggatgtacgcggaccggcggtcaaaagagtttattgacggcgtgcattattttttgggtgtggccaatgataaaaagtgtaacggtttcataagctgtccatgcaacaagtacaaaaccagaaggagtattccactgcacgaagtattcatggcaacctgtttcagtgggggttcatgtgtagctacaattgtgacca

SEQ ID NO: 47672 - DNA, 540 bp, Oryza sativa
  Clone ID: PAT_MRT4530_50418C.1
atggagaggagagagaatggccgcccgcgctggtcttctctatcgctgccgctggatgtagccttccgcaggcggccgccgcagtcctccttcgcctccgccaagggagtgggggccggaggggagggcagcagacatggaggcaacaccgcaaccacctccaccgactccggccaccacctcgcaacagagccgaccaactcctccactccggtcaaggacagctgcccgagttccgccggcatggccccgtctccaccaccgccaccccgccctgcttcgctgtcgtcggaggacagatgccacttcatcgcctcgatctactccgccgacccagttgtcaggaggccaacactggccgtcgtcccatcgtgggatcccccatcggctggccctggcctctggcgcgtcagcgtcgctccagtggaacatgtctctgccgccggacttcccggctccggttggcaccttctcctgcgaccaccgccgaccggttcctcctccccgccgctcccgtcgcgacctggagagcactcctag

SEQ ID NO: 47673 - DNA, 958 bp, Oryza sativa
  Clone ID: PAT_MRT4530_50419C.1
gtgccctctggtgggaggcgcatccggctgccggagcgaaggggaagcagagccggcgtccgacggttgggaggcggccgcgttcggcggcccgggacgtgaatccacgtcccccgaccttgtggaggcgggatccggtgggggaggcgggggaggcgtccggcagtcagtgtgggaggcgctggcggccggatccggcttcccagaggccagatccggtgtccgacggtgaggagcggccgcttccggcggctgggatgcggatccacgccccccgacctcgtggaggccggatccggtggggtaggtgggggaggagtccagcagtcgatgggggaggcgctggcgaccgggacgcggatccacgtcccctgacccggcgcggcatcgtttggaggaggggtcggagaccggcttggcgcagagaggtgcagccaatggcagcggaggccggctcggcgcgagaggcgtgagcggcggagatggaggccagcttgacgcgagaggcacggccgatggagggaggccagattggcgtgagaggcacgtccagtggagaaggccggcttagcgcgagaggcgcggttggcggtggaggaggcaacctcggtgcgaagaggacctgccgatgggtgtggcgcggtcttcagcacacgaaggctggccggcgggggcgccggtgcaggggtcccacatgtcggcagagcttgagtggtggaggagcatcggtgcgtggagatctcgtatgtgttcctttgttggtctagcggcggtcggtcacacttagcggcggccggtccggtgctagccttcttccggacttgtgtgttggcattgtcggtgtgtgggttatggtataaatataaccctccagggttgtaaacttgtaattttttcatgctctatcaatagaacttcgcaccgtctcgtgcgagtcgttaaaaaaaaaattgcagag

SEQ ID NO: 47674 - DNA, 609 bp, Oryza sativa
  Clone ID: PAT_MRT4530_5041C.1
atggccaagatatggccatttgaaccgctcggtccacggtggaccgggcgcacgcggctggcggcggtcggcgccgtgggtcccgcgcgtcagccgcacccgcgggcgcgggcggctgacggccgggcccacttggcagccgcgagggcgcgcccgagggcggcctcgccggcgcggccgacgggagcggcgcgcaccagcgccccgatggtcgccgccggcgaccaacggcgcggcggagtggcacccgagagagaggagggaagggggaaggcgaacggcggtcttcggctcaccccgagacaacggcgacgacgagaacggcggacggagaggaagaaggtggcggcgcggctcgggatgacgacgacgacggtgctccggcggtcggcggacgaagcggagcggcggacggggtcggcggcgatgcggcgatgccgaaggaggggtcgccgagccgggaggaagagcggagcgacggcggcggcgaaccgacggtcgacggcgacggcggagagagaggagcacggcgctagcacgattccgacggcgagagcgagcggcgaacggcggaaacggaggaggagagcacgggcaacgtttttatag

SEQ ID NO: 47675 - DNA, 416 bp, Oryza sativa
  unsure (1)..(416): unsure at all n locations
  Clone ID: PAT_MRT4530_50420C.1
ggncgcntgtgcaacgcatgggccntaantccncgcctctccagccgtcccgtnctccgctccactggcgcccttntggaaccctcaccccctcctaaatccaaccaaatttccctcttctnttagcccaaataacttccccttgttccaaatcccgcttcgatccagcagccgcggtcgggttcgtggcgaggttggagtgctcctgccgaattcgggcggttttnctgggggcaccgagagttgctgccatctgtggtgatctnatccggcggcgcgcggcgggagtggtggtggtctccgttggttctggaagtggtggtaagagctatgtggattnaggcgtcgccgnattgagcatnaggggtggggttactggtggtggtggtggtggtggcggcggcgncggtgttcgt

SEQ ID NO: 47676 - DNA, 768 bp, Oryza sativa
  unsure (1)..(768): unsure at all n locations
  Clone ID: PAT_MRT4530_50421C.1
atgtcctccctgccgggcccgcggctgcccgccagcgaagtcctctccggcgctggctttctcctccacgggtctagggttccggccaccgccgccgccgccgcacgggggagagagagtgagaggatgagcgggagcgcgttcaacgcgttcaagtcgcgggtggcggtggcgtggagccccaagctgtacatcacgctggtgcggggcctcccggggacgcgccgcctccaccgccgcacgctcgaggccatgcgcctccgccgctgccaccgcaccgtcgagcaccgcaccaccccttccctcctcggcatgctcacccaggtcaagcgcctcgtcgtcgtcgagacccaggagatgtacgccgcgcggaggcaggccgaggacgaccgccgcgcgcccaggccacccctcgtcgtctcccaccgcccgcccgccgctgccacgcccacgcccacgcccactgcgggccactagactcaccagtgggcaccagaagccattcttcaatcaagactggctactatatgcttgagactatctttgctctcaatgatgatttcattgaacctgttctggtaactcattatttaccaaagtggtctcatcaagcttgtacctttgaagaccgtaatgtcttggcctttgtagtcagttaaatgaataaagcctttttgatatgttggtgccactgttccaatcttgaaaaattactgaaaaaaaaaaaatcgaaattattgctgcaaaattcacattccaaaaaaaaan

SEQ ID NO: 47677 - DNA, 251 bp, Oryza sativa
  unsure (1)..(251): unsure at all n locations
  Clone ID: PAT_MRT4530_50422C.1
aaaaaaaaagaggtgaaaaaaaagcagagcgntttcgaanggccacggccgtcctccgccgcccactcctcgccgccgccgccgccgccgccgccgtctcctccacctcctcctccttccgnccctcccgcttncatctccggcgatgtagatacccaccncctgtattcgccgtntcctncgantccnnaaagccggttacctnctnttctaccggnggtgacaaccccgangaggagcctgtncttccg

SEQ ID NO: 47678 - DNA, 1056 bp, Oryza sativa
  Clone ID: PAT_MRT4530_50423C.1
atggaatctcgcgcgcgccttctagggttttgtggctggcttacccttatcccggcgattcgggaggaagaagaccaggtgcgccagcgtggtgcacccggtccaccacgtagatgcgtggactggttttcgtggaccgagtccacggtccacgggccagcagccaccaacctgcctggcccacggcccactacctcctctgcgcaaccgaagcaagatgctacctgtgatttgggatgtcttttatgtctagcgatgccaccaaaaggattaagagtacagatttgtcggtacactattgataagttgcaaactactttccatcgatgggagaaaacaccgtcaaacacaggagaacatgttcatttgacaaaggagcttcataccagctgtgaaagcattgagtggcaggaagaagccgctgttgcatttaatatattagagttacttatcggaatatctgttttcttcttcctgcacagttgttctggtataactggtgtttttttatgttggaaggtggatgagttggaaaagacaatcttagttgcatcaagagatccagcgtactatggactggacgaagttgagctttctagacgacggaactggattggttctgctcgtaatcaggttgctgcagtcaggagatctgttgaaaaggggaagagtaattcaactttctcggcgcaccaagacatgggcacaagcagaagtaaccactacactgcacaagacaatgatgacttcattgcttcagaatcagatagacagcttctacttatgaggcagcaggatgaggaacttgatgagcttagcgaaagtgttcaaaggattggtggtgtagggctaaccatacacgaagagctgtctggacaggaaaggatcttaaacgacctaagcttggagatggaaactacttcaaacagacttgacttcgtgcagaaaagagtggcgatggtcatgaaaaaggctggcataaaagggcagattatgctgatcctcttccttgtggttctgttcattatacttttcgtgttggtgttcttgacataa

SEQ ID NO: 47679 - DNA, 417 bp, Oryza sativa
  Clone ID: PAT_MRT4530_50424C.1
atggggcccgcatcgttttccccttcttctcttcctctgatcgcaggaggaacaggtgaggtgaggcacatggcaagcttgacggtggccgaccgtgggcggcggcgacaagggaaggagatgcgtaggtcggctatggacgaacgggaagcggcgagcatagaggagggttctggctgtacaagggagcggagggtcggggagccaggcatgctagtgaggcaacataggagacatgccgacgggagtcgacgaagccctccatccccaacgaggtcggcggaggcggaggggccaccaagcagtggggtccatgggaaaaagccagctggcggcacagtcgtaggaaaggctgtcggcggtgaagccgatgtcgacgaggtccgcagggaaagcgctggatccaagaggagataa

SEQ ID NO: 47680 - DNA, 1443 bp, Oryza sativa
  Clone ID: PAT_MRT4530_50425C.1
atggcggctggagcgattccaatggcgtaccagaccactccgtcatcgccagactggctgaacaagggcgacaacgcatggcagatgacatcggcgaccctcgtcggcctgcagagcatgccagggctggtgatcctgtacggcagcattgtcaagaagaagtgggctatcaactcggcgttcatggcgctgtatgccttcgctgctgtctggatctgctgggttgtctgggcatacaacatgtcgttcggcgaccgcctcctgccattctggggtaaggcacggccagcgctcgggcagagcttcctcgtggcgcagtctgagctcactgctaccgctattcgctaccacaatgggtcagctgaggcgcccatgctcaagccgttgtacccagtcgccaccatggtgtacttccagtgcatgtttgcgagcatcaccatcatcatcctcgcaggctcactgcttgggcgcatgaacatcaaggcgtggatggcctttgtgccgctctggatcaccttctcttacacggtctgcgccttctcgctctggggtggcggtttcctcttccagtggggtgtcatagactactctggtggctatgtcatccatctctcttctggcatcgcaggcctcactgctgcctactgggttggaccaaggtcagcatcagatagggagagattcccgcccaacaacatactgctggtgctagcaggggcggggctgctgtggcttgggtggacaggtttcaatggaggagacccatattcagccaatattgattcatccatggcagtgctcaacacacatatctgcgcatccaccagcctactcgtgtggacaatcctggatgtcttcttcttcgggaagccatcggtaattggcgcggtgcagggcatgatcactggcctggtatgcatcacccctggtgcaggcctggtgcaaggttgggcagctattgtgatgggaattctctctggtagcattccatggtacaccatgatggtgctgcacaagaaatggtcattcatgcagaggattgatgacacgcttggtgtcttccacacccatgcggtggctgggttccttggtggcgccaccactggactcttcgccgagcccatcctatgcagtctcttcctatctatcccagattctaaaggtgcattctacggtggccccggtggatcacagttcgggaagcagattgctggcgcactatttgtcactgcctggaatattgttatcacctccatcatctgtgtcatcatcagcctaatcctgcccctccgtatagctgatcaagaactgcttattggagatgatgctgtacacggtgaggaggcatatgctatctgggcagagggagagctcaatgacatgacccaccacaatgagagcacacatagtggtgtctctgtaggagtgacacagaatgtttga

SEQ ID NO: 47681 - DNA, 402 bp, Oryza sativa
  Clone ID: PAT_MRT4530_50426C.1
ctctcccatctcgtcgagcggcggcatgaggtcagcgcgactttttctcaggtatttaggcttcatcagccacccatcctcctcccatttgttcttttgctcttgcgcctctgcttctggaacgagggagtggctatccctccgtttcaaaatgtttgacaccgttaactttttggggggtgagcatcgtgctggagaagaaggcgttcgtggtggagctgttcgacaagtatgtcaagacgctcggctccgggatcgacgtgctcgcccccctcgtcgaccacatcgcctacgtccactcgctcaaggaggaggccatccccatccctgaccagtccgccatcaccaaggacaacgtctccatccagatcgacggcgtcctttgcgtcaaggttataactc

SEQ ID NO: 47682 - DNA, 537 bp, Oryza sativa
  Clone ID: PAT_MRT4530_50427C.1
acttaatattttatttttgtttttctttatttttttaacgggatttttaatatgaacataactattctgattgatattggataaatccattgaagttacagctcaacggtacatttaaaaaaaaaggtgcagtggcaaaaaaaaactgaagtatacacaattggctcactaataaaagctatctacagctttctacatgtagaactgaatcattggccggttctcttttcatctgcaatcggaaaatcctttagtcttatatatcctctcacagttgtaggcaagtgaagcctctgctaaacgtttcttttcccctgtgtactcctgatgcttccagttgacagagtatcatccatttgatgcacatgcgcaggtacatatccattgagcatttgacaacccgagcaaaaccaaattagagggaacatcctgattcacaaattcttaccccaaagaggaggctgacgatgtcaacttttgatatttctgcggggaatgaaatgctgcaaaccggccggggtccctccagccactgga

SEQ ID NO: 47683 - DNA, 1021 bp, Oryza sativa
  Clone ID: PAT_MRT4530_50428C.1
ctaccgatttgggtaggatacattgagcttgcccttactctttcctcctctcctctctctcttcaccgacggcagcggcgggctcggcaccggcggcggcggcctcgaccgccgaccgccgacgccccgcgccgcctcctcgctcatcaggatgggctcggcggtgtatgccggtgccggcgtgctcgacgacttcctccggcggcagtccactttgttcgcggtcgcggcgacgtccccaacctccatgacgtcgtcgccctcggctactccggagcccgctgcccccggccggatttggaagccagctccacaacgacgggcgccgttcttcgccctcggcctccaccggcttcccttccgacgtcgccgccttgagctcctcctcacgccctccccgccggcccttcccgatctgctccacccaagccaccacgacgaccagatccaggaagtctctccatcgctctggtcctgacagtggctggaggaccccggccggttgcagcacttcatccccgcaaaaatatcaaacttgacatcgtcagcctcctcatttggataagaatttgtgaatcaggatgttccatctaatttggttttgctcgggttgtcaaatgctcgatggatatgtacctgcgcatgtgcatcaggttggtgtgcttcggcatgtggtgggttgattttcttcagccaagatggatgatactctgacaactggaagcatcaggagtacacaggggaaaagagacgtttagcagaggcttcacttgcctacaactgtgagaggatatagaagactaaaggatttacagattacagatgaaaagagaaacggccaatgaatcagttctacatgtagaaagccgtagatagctttaattagtgagacaattgtgtgaacttcagtttttttttgccattgcacctttttttttaaatgtaccgttgagctgtaacttcgatgatttatccaatataaataaaaatagttatgatccaaaaaaaaaaaaaaaaaaaa

SEQ ID NO: 47684 - DNA, 1504 bp, Oryza sativa
  Clone ID: PAT_MRT4530_50429C.1
tctcctttcctcggatcaaccgccatcagcttctcctcagccttcttcgccttcccttctattggcttggcctcctgtggcacaaaatgcgcttcagcctcggccgcgcgctccacaacctcaccccacgttgggtccgacaagtccaacccatgtatcttgaacttgatctcccccttcctctgcggcaaggctgcgagcctgggcggcgggagcgcgacagggttagcggccgcctcggcctgggcgcgcatgtcgtcgaggccccgcgttcgaggagtacgttaaggagtggaaggcgaagaaggcggcgctcggcgtgccggccggacgctgcgagctgcctttcctaaccggcacgcctaaggcggttgaatgtcgattatgttctaagattattcatcctggagaagaaataaagtgttcggttagtagatgtggagaattgttccacctgacttgtgcagcagaagataccacaaatttcattgctgaaagcttcaaatgccctcaacatggctgtatggtctgtaagcaaaagatgtttttttggcgttgtggacggtgtacggttgcagcacatacaaaatgtgcaccatggccagtaattcatttaaaagatgaccaaggaagtgctatctgttggaggcatccctctgattggctccttcaaaatgaggtctatccttttacccttaagattgacgaagtattttgccgactacctgttccatatgttaatgaagacttcaagattgattcaaccatcagggatttcactgcagctgtctgcaaaccaccacactttacgtttatcagacgcaatgtatatttaatcaagaaaaaacgtcctgattctcgcgcggaagctgggtgcacaaactgcagtgctgattctacgtgcaaagatgactgcgaatgcaggggcctttacatgagttgttccaagaattgccactgctcagatatgtgtacgaacaagccattccgcaaggataaaaaaataaaagctgtcaagacaaaacgttgtggatggggtgctatttcattggagccattggaaaaaggtgattttataattgagtatgttggtgaagtcatcaatgatgcaacatgtgaacaaaggctttgggacatgaaacggcgaggtgataaaaatttctacatgtgtgaaatcagcaaagattttacaatagatgcaacatttaaaggaaacacatcacgttttctgaaccacagttgtgatcccaactgtaaattagaaaaatggcaagttgatggtgagacaagagttggtgttttcgcctctcgttccatccaagttggagaacacttaacttatgactacaggtttgtgcatttcggggagaaggttaaatgctattgcggggcacaaaattgtcaaggttacctgggcaaccaaataaagaatcctacgcagcgtgctctcgcaattgcagcattggagaacgagtggcttgaatctttgaagatacaacaggac

SEQ ID NO: 47685 - DNA, 404 bp, Oryza sativa
  unsure (1)..(404): unsure at all n locations
  Clone ID: PAT_MRT4530_5042C.1
gttcgcggggccgagggtggggaacgcgaggttcaaggagaggttcgagggggagctcggggtgaaggcgctgcgggtggtgaacgtgcacgacggggtggcgcggatgccggggatcctgctgaacgagggggcgccggcggcgctgcggcgggtggcggagggcatcctccgggtgccgtggtgctacgcgcacgtcggcgtggagctcgcgctcgaccacaagcggtcgccgttcctcaaggacacgctcgacccggcctgcttccacaacctcgaggcgcacctncacctnctcgacgggtaccacgggcgcggggagcggttcgtgctggcgagcgggcgcgacccggcgctggtgaacaaggcgtgcgacttcctcaaggaccaccactgcgtgcccc

SEQ ID NO: 47686 - DNA, 525 bp, Oryza sativa
  Clone ID: PAT_MRT4530_50430C.1
atgcgccgccgctgccccgccgtggccgagccgtcccagttgcgagccacgatgcgttgccgccgccgccgcggccgagccgtccaccaagccgccccgccaccgctcggcgaggacgaagaagccatcgacaagtgtgcgcgcttactggggctcatctcgccggagagcttgaagacgggggacttctgtggtggggattggaacatagggttggtgggggcggcagcgcctccgcgtgctggtgaccatgggttcgaggtgggacgaggcggagaggtcaacgagaagggcaaggagcacaccgacgagggagaagaggccggcgaaggggaagtcctgccaggggtgtcacgtggcaacggcgtagtcggcggtggcggcgctaccaggcgtgcgccgcgccggtggcgagacgccggtgctgatgagtggcacgaggcacgacgcgatggcgatggtgaggctgacaaagccgaaggactgaattttatggttgttttggtgaagtggcatgtggcatga

SEQ ID NO: 47687 - DNA, 1353 bp, Oryza sativa
  unsure (1)..(1353): unsure at all n locations
  Clone ID: PAT_MRT4530_50431C.1
cctcctctccccacgtgcggcgngggtgactccctcctcgggtccccacctccgctgccggcgacgacgacgaccgcgacgccgcctccgtgcgccggcgacgatgacaaccgcgacgccggctccggccacgtcaacccgctcctccgcctcggccgccgcctcgccgccacgggcctcctcgtcaccttcaccaccgtccgcctcgccgccggcggcggccgcctccgcgacgtgccggaggacggcgcgtgcgccgacgtcgggctcggccgcctgcgcttcgagtacctgcgcgacgacgacgacgacggcgacgagcggtgccagcagctggcgcccaacgacgtgctgtcgcacgtcacggccgtggggccatcggcgctcgccgagttcatcgacggccaggccgacgccggccggccggtgacgttcgtcgtgaacaacatcttcgtgccgtgggcgctcgacgtcgccgccgggatgggcatcccgtgcgccatgctgtggatccagccgtgctccgtgctgtcgatatactaccacttttacgagtcgcccgaggcgttccctaccgccgccgaccccgacgtgccggtcgagctccccggcttgccggtgatggccatggtcgagctgcctttcatggttcgtcccgagtacgcgcagtgcctgtggggcgacacgctccgggcgcaggtcggggcgatcaagaggacggtgtcctgggtgctcgtcaactcgttctacgagctcgagcgctcggccgtcgacgcgctccgcgcgcacacgacggtcaagctcgcgcccatcggccctctcctggagcatggccatggggccgaggacaacgaccgctgcgtggcgtggctcgacgcgcagccgccgcgctccgtggtgtacgtggcgttcggcagcctcgtgaacatcggccgcgacgagacggcggcggtggcggaggggctcgtcgccaccggcaggccgttcctgtgggtggtgcgcgacgacagccgcgacctcgtgccggaggccgtcctcgcggcgtgccgcggcgacaaggccggcaagatcacggcgtggtgcccgcaggggcgcgtgctcgcccacggcgccgtcggctgcttcgtgacgcactgcgggtggaactccatcatggaggcgctcgccgcgggcgtgccggtggtcgggtacccgtggtggtccgaccagttcgcgaacgccaagttcttggtggaggactacaaggtcggcgtccggctacccgtgcgtcgaccgcgtgatgagcgggccggaggcggcggtgatccggaagagggcgatgcattggaagcgagaagcggcggcggcggttgc

SEQ ID NO: 47688 - DNA, 550 bp, Oryza sativa
  Clone ID: PAT_MRT4530_50432C.1
gcaggggaaatcgagggatcgacctttttccttaacttgtttttaattctcatgtccaatcaaaaaaacacacccccccacccacatgcgtgcactgattttttttgagcaacaaactcgattgatttgattttgattcgctagggattaaaaaaaagctgaaataaaaatttcgacaatcatgcaaccctaaaggagctggttgcgctttcaaaaaacttcctggggcccttgaaccaccttttgtcgccggcctgccccttgaaaatgtacagtttgccgtcgttgacgggggccgggatcagttggtgcttgccgcccttgtcgccgtccgccgtccttgtaagaaccgttacgctgaagaactgtttccctcccaccaccggggccgagttttccaggatgtgtcgccgtcgccaccgggtccgattaaaacccacccttggaatttgttttgcccgaagtaggcctgcttgccaagcaaaaagtcgacctgggcgaggaactcctcgggggagccaactcggggatggtctcttggggggggggg

SEQ ID NO: 47689 - DNA, 1473 bp, Oryza sativa
  Clone ID: PAT_MRT4530_50433C.1
atggagcctcacgtcctcctcgtgtccttccctatgcagggccacgtcaacccgctcctccgcctcggccgccgcctcgccgccacgggcctcctcgtcaccttcaccaccgtccgcctcgccgccggcggcggccgcctccgcgacgtgccggaggacggcgcgtgcgccgacgtcgggctcggccgcctgcgcttcgagtacctgcgcgacgacgacgacgacggcgacgagcggtgccagcagctggcgcccaacgacgtgctgtcgcacgtcacggccgtggggccatcggcgctcgccgagttcatcgacggccaggccgacgccggccggccggtgacgttcgtcgtgaacaacatcttcgtgccgtgggcgctcgacgtcgccgccgggatgggcatcccgtgcgccatgctgtggatccagccgtgctccgtgctgtcgatatactaccacttctacgagtcgcccgaggcgttccctaccgccgccgaccccgacgtgccggtcgagctccccggcttgccggtgatggccatggtcgagctgcctttcatggttcgtcccgagtacgcgcagtgcctgtggggcgacacgctccgggcgcaggtcggggcgatcaagaggacggtgtcctgggtgctcgtcaactcgttctacgagctcgagcgctcggccgtcgacgcgctccgcgcgcacacgacggtcaagctcgcgcccatcggccctctcctggagcatggccatgacaacggcggcggcgacgacggcgcgccggcgccggcgctaggggccgaggacaacgaccgctgcgtggcgtggctcgacgcgcagccgccgcgctccgtggtgtacgtggcgttcggcagcctcgtgaacatcggccgcgacgagacggcggcggtggcggaggggctcgtcgccaccggcaggccgttcctgtgggtggtgcgcgacgacagccgcgacctcgtgccggaggccgtcctcgcggcgtgccgcggcgacaaggccggcaagatcacggcgtggtgcccgcaggggcgcgtgctcgcccacggcgccgtcggctgcttcgtgacgcactgcgggtggaactccatcatggaggcgctcgccgcgggcgtgccggtggtcgggtacccgtggtggtccgaccagttcgcgaacgccaagttcttggtggaggactacaaggtcggcgtccggctaccggcgccggtgaccggcggcgagctccgagcgtgcgtcgaccgcgtgatgagcgggccggaggcggcggtgatccggaagagggcgatgcattggaagcgagaagcggcggcggcggttgccgacggcggttcgtcggatcggagcctccaggattttgtcgaccatgtacgacgttccaaaggaccggaggagctagctcgattagctcaagacatccagattatgaatgggccggtcaatccggtcctagtttaa

SEQ ID NO: 47690 - DNA, 734 bp, Oryza sativa
  Clone ID: PAT_MRT4530_50434C.1
atgcggaagctcctcgtcatcgagctaacgagcatccgccgcgtccagtccttcgcctacgcgcgggccgccgaagtggcccgcctcgtcgacaccctcgccgcctccccggcgggcgtccccgtcgacctcagtagcgctctctacacgttctccgacggggtcatcggcacggtggccttcgggaaggtgtacggttcggcggcgtggtcgtcgtgggagtggggcgcgtcgttccaggaggcgatggacgagacgatgcaggtgctcggcagcttcagcttcgaggacttcttcccgtcgtcggcgctggcgcggtgggccgacgccctcaccggtgcggcggggcggcggcggagggtcttccaccgcatcgacggtttcttcgacgcggtgatcgacaagcacctcgagcctgagaggctcagcgccggggtgcaggaggacatggtcgacgcgatggtgatggtgtggagggagcagaaagacgaggcctttggactgacgcgcgatcatatcaaggcaatcttgctgggactaaagatcgacaaggcagtcttagggcagttcccattttctttttattttctcccaaatcaagttggatgggtggtgcgtgagcggggggggcggtgcggcgggcggggcggggtgcccgcggggttgcacggggcggtgctgagggtgtgggtcgggtggcgggggctggggcgcgggcagtgccacgcgtgggg

SEQ ID NO: 47691 - DNA, 513 bp, Oryza sativa
  Clone ID: PAT_MRT4530_50435C.1
atggccgccgtccgccgcccttctccccaccggtcattggccgccgtccttctctctctacgtgcgctcaccggcaagccagggagctcggggagggaggaaggatgccgggagggagaggggagaaaggcgatgggcggatccaccgtcgccgctcgaagggacatgagaaatttcggaccaaaattatttcgtcatatcggcattgcccgatacaaaggccgaaaacgagaaagtgaaccctggctggaggtggggaagagggtgaagactgaggaggcgtccaagaggaggaaaaaagatgacatcatggtggcgacggtttggaagccaaccaagacaaaagcaagggccagcagcagtttgaacgattataacgagtgtaaaaaagagagagttgtttgtctggccaaatgcattaagcacttctgttgtatcctaaattacaactcttggaacagcttggccaaagatttttggtcattaagctcaaaagattctacactctgctga

SEQ ID NO: 47692 - DNA, 459 bp, Oryza sativa
  Clone ID: PAT_MRT4530_50436C.1
agccgagttgagggatgatactctttttaatctcgtctggccagcccatgttaaggccaacatcccatgccttataactcataaataacctaccgtcatgatatgatcatagccactattgatgcaaccgttgctcacatcatagctcaactgggagacatcaagatcaagccacatgagttttggaatctgattcggccacctgctacattgctgacttcaaacggccgccaaatatgcatacaacctctgttttcggcctgtgattacttgatggaaagatctcggagtcctctttccaaaggatccaacctcatcttaaaattccatcttagtcatccgcccaaggtattgtgtcatctataatgggcctatgagcccgtaacttcgtcttggaccctagcctaagtgggacccatatggggtgcgccccaatctggtggagcatgaccttagaga

SEQ ID NO: 47693 - DNA, 1047 bp, Oryza sativa
  unsure (1)..(1047): unsure at all n locations
  Clone ID: PAT_MRT4530_50437C.1
gcgcgtagccgacgcacacgaactagcagtgccctcgcgagagtaaaacacctactccgcaacacaacccgcgcagttacgtgtcgaacaatcacgtgtgaccaggcaacggctcgccaaccccgacaccaaacactcaccgctcgacgccaccactaaccggcgacagaccgacagcacacgcaggtccgtctcaccaccggccacagtcaccgacaggccccgccccgcacagccccacgaccagcatacacgcggtaccaccaccaaaacatactcccgctcgaacctcgaccagcaggcccaccagtgcgccccagaactacaccacacggccagacaccgcacgccaaccgacccccgcagacccacccccacgcgtggcactgcccgcgccccagcccccgccacccgacccacaccctcagcaccgccccgtgcaaccccgcgggcaccccgccccgcccgccgcaccgccccccccgctcacgcaccacccctgcacgccacccaccccagccccgcacaccccccagtggcccactcccacccgcccacatacccgataacctctacctgacccccacagcaagcagcgcccagacacactcaagccgaaagagcgccacaagccctcacgcaaaaccaccaaaagcgcaacagaacaaanaaaaataacattcctcctcctccccctcctccccttcctcctcctccccctccctccacaccatcaccatcgcgtcgaccatgtcctcctgcaccccaccctccgccgccgccccgccgcaccggtgagggcgtcggcccaccgcgccagcgccgacgacgggaagaagtcctcgaagctgaagctgccgagcacctgcatcgtctcgtccatcgcctcctggaacgacgcgccccactcccacgacgaccacgccgccgaaccgtacaccttcccgaaggccaccgtgccgatgaccccccggagaacgtccttggccgcctccggcgaatggaccaccaccgtgcggatgctgccgagctgcacctgcaccaccg

SEQ ID NO: 47694 - DNA, 266 bp, Oryza sativa
  unsure (1)..(266): unsure at all n locations
  Clone ID: PAT_MRT4530_50438C.1
aaaaccctttctgaaaaatacaaacatcaaaacgttataagagttctctagcatccatcacatagccatgaagatctttgtcatcctctctctcctcgccctcgcagcgagcagcgcctcggcacagnttgatgcttgcacctatgggcaatgccagcagcagccgtttatgccaccgatcgtgaaccgcgggcgatgagttcctgagggaacagggcagccgatgagcctaccttgggagcagccccgcaggctacaactgagca

SEQ ID NO: 47695 - DNA, 429 bp, Oryza sativa
  unsure (1)..(429): unsure at all n locations
  Clone ID: PAT_MRT4530_50439C.1
nctcgggccggccgggagagagcactggtacggaaactactctactattactagctacgacgccaagagagtaagtacgtgaactaggggagcgggcgcgcgagtctctcatctggccagcagagcaggtgaagggaggggaggggatccaccgtggattctcctgccactgtcgacttaccacgcaagctattgatggggggaaagaactatggggggtggataaccagcactcgaatgagaacatgtgaccaaagttattaatgactgcaaatgggacagtgaggatctgtatttccagagtggcataaaaatgcataatgtgatgggttcacagatcggttattctctgttagaggagcccgaaggggaaaagagaggatacgatgagtacatacgttttgtcagacctcctgctgatccccgata

SEQ ID NO: 47696 - DNA, 254 bp, Oryza sativa
  Clone ID: PAT_MRT4530_5043C.1
ccgggccgggtaacctttctattctctttcattactactgcgttataggggtatgccttgaagggtctatttggagagcgagacatcggtaagcttataggctatggagcctatcttgtttgtggatatggtagaggaagaggtgtgagctggagaataacatgcaggagggggactatttaattgacgccctggacgcgatctaccgttacgacgaggcggtgtagtcgcgtatgcaggaggagaggccctgg

SEQ ID NO: 47697 - DNA, 257 bp, Oryza sativa
  Clone ID: PAT_MRT4530_50440C.1
ggaagaagggaaaccattttttggcaatcaccaaatttacaatggtttacatgcctaatccttctcttataattgccaagaacgccaggcgaaatgatgagaatgggtaataatcgatatgtccaaacaaaaacattacccgagcgaacatccagcctctgggggccgctcacgagcaggagcaccgccagtctttcttcatggcgctggcctccatgaaggagcccccttccaacgtggtccctttaagtgacagt

SEQ ID NO: 47698 - DNA, 300 bp, Oryza sativa
  Clone ID: PAT_MRT4530_50441C.1
atggtggagtcggcgatggatttacagggacagagcgtgacatggcctcaccgtctcctgcctctagcgctgctggtgccgactgctctcgtcctgttgttgcggggttctccatcggatcaccttcgaacggcgagctatgacgacggcgggttcccttccctagccaccggcaagagtgctactggttttgctcaagtaaaggttgtgccggcccacttcgtcttctccggcgagcccctttcaagaaaagcggtcttcttcctgatctccggcgaaactttctcaagaggtagctga

SEQ ID NO: 47699 - DNA, 213 bp, Oryza sativa
  Clone ID: PAT_MRT4530_50442C.1
atgcagatgcagatgcagcagctgcagctgcagcctctgcaggggttgcagctgcagcgcagcttgccaaggaatggccggagttctgaagctgctgctcgtgctggcgaggctgtcatgatgagagccgtgatggtgagcaaggcaaaggctgggcactctggctgcacctacgaccccaacaccaccattggacggcgctgccggccatga

SEQ ID NO: 47700 - DNA, 329 bp, Oryza sativa
  Clone ID: PAT_MRT4530_50443C.1
gtgcggcgcctccccaaccaaaccgtgagtttcgtcgcgcgcggcgcggccacagggttggtgctgaaggcggccaggtccagacctccacgcggggctgcccccggagggaagcggcggcggcggcggctcgagcgcaatctgtgtccatagaggcgcgttacgatggcggcggcgctggcgaggcgtggcggtcgggggctggcgcgcgccctggcgcgggggagggggatgttccttacccctgccgcggagcgcgccgtcggggcggcgctgacgttcgaggaggtcatgcggaaggaacgcgagcgcagcgcgcacaactacca

SEQ ID NO: 47701 - DNA, 387 bp, Oryza sativa
  Clone ID: PAT_MRT4530_50444C.1
atggcgctgacgtcgacgatgacgtcatcaccggcggcgactcggcacctcgtgctcgccggcgaacgacggcgcggcggcgcaaacgagggcaccagcggctttgaagtcgttctcttggtgctcatcacagctcagccagcaatcatccccatcagcgacacggaaaaaaagaacatcctgctgtgggtgcatgagaggctcgcagaaggagacatcgagggcgtcactgacccgaggataagagcagattatgatctcaactctgtatggaagctggagacctcatggcgttctatgaggggcagctccactgggacacttggtgatgctgagtctgttggtgtgcctgagtctgaacacatcggagaaacatctgcccgttga

SEQ ID NO: 47702 - DNA, 2250 bp, Oryza sativa
  Clone ID: PAT_MRT4530_50445C.1
atggcgacgccgccgccggccgccgccgtggccctcgccgacctcctcgagtccggcaccttcgcgccaccgtcgccgcctcgaccccccgccccgaccaccatcctctccgcgtggtcgcacctccgcaaccccacctcccccgccgccgccgacgccctcgccgccctggagaccctccacctccaccgccgctcgctccgcctctcctccgcccacgtcgcgctcctcctcccgctgctcccgctccacccgcgcctcgtctcgccgctgctcgccaccagcccgcacctcctcccgccgtctctccccgcctctctccccgtctcacctcgcctcctcctcctcggcgcactcgcctcctctaggagtgctaagagcctctccagccatgccaattcggggagcacagcagcagagaatctcggcggcggcggcggcgagtccggcgatggccatgatagcgatcctgttgtggctgtagctcgcattcttgatgacatggagaaggggagcgagagctgccatgatcttgatcacctggctcttgctggtattggttgcgtgttggcatctgctgatgagctgcagtttagaagaattattggatccttgcttacgatttgcgggaggatcgggagcctgtctgttggtgttaggatgcttaagctggtggagtggttgttgctgggcttcattgagtcgaggaagatgcgcaaagttcaggttctattcgagatgatttcaccggagtcgtgtcagagccagggctatgttatgtctccggtggtgatggtagcttgtggtgccctgagggcattgagggttgcttcagcgagataccggctggattttgatccacggttgaaggaggcgcctgagcggactatccgatttgcagctgagaaggcagttttagaagggaaacacgtcgatgataggcgtttacttcttcaatgtgttgcattgggcttgacgcagtgtgggcaggtcactcctcatgagtcagtgttgcgttgtgtctgtatggcgctactggaggagcttcttcctctgccagatttgctcaagatgtctgtgcaatgtccagatgggaattcacctgaaattgtcaagaatcgggtgaagcaacatctggatagtgtgcttttcaaggaggctggacctgttgctggaattctctgtaatcagtattcatttgccagtgataaggctaaaacttctgttgaaacgtgtgtatgggaatatgcacaagtgctgtattgtcatcttcgtgcagcagtaattttgcatcaggggaagcaggatgatttgatcacagatattgagaagatcgccgaggctgcattccttatggttgtagtcttttcagccgaggtcactaagcacaggttgaatgctaagtcctcagagggattccaaccagatgttgctgttaagatcttggtgtccttctcttgtttggaacatctgcgacgcttgcgccttcctgagtacactgaggcagtccggcgtgctgttcttgtcaatcaggaaaatgcggcagttgctgctttgttcattgagtcaattccttcttatgctgaattgacaaatttattaaccttggatggaacaagatatatctggcacggagatgtggttcagacatcacgcatattgttttatctgcggattttcgatattaagaaaaagtgtccttatcataaaattgtcagatacatacagcattcaaatgagaaagtaacacgtgcctcacactcagtggtggtatctttcttgtcatccggcaatgatactgatccggatgatcgaatggctttgaaagaacaacttgctttttactatatcaagagaactttggaggcctatcctggggtaactccctttgaaggattagcatcaggagttgcagcactcgcccgacatcttcctgctgggagtccagccactcttttctgtatccataaccttgttgtcaaggctaaagatctttgccatacctcaatggtagaggacaaatccttgtggaggtcatgggaaggtagcacagaaccttgtaagaaaatattagacctgttgctgcggctcatcttcctcgtggatattcagtcattcccttatctgctgaaggagctggcggaattcgtcagtctgctaccgaaggaaggtcaggatgtgctccttgacgacatgcatgctcatgttgcagaatctgatgatgtcacacggaagccgaagtcatactag

SEQ ID NO: 47703 - DNA, 1278 bp, Oryza sativa
  Clone ID: PAT_MRT4530_50446C.1
ctaagcgaaaagagcgatgtatacagctttgaagtcgttctcttggtgctcatcacagctcagccagcaatcatccccatcagcgacacggaaaaaaagaacatcctgctgtgggtgcatgagaggctcgcagaaggagacatcgagggcgtcactgacccgaggataagagcagattatgatctcaactctgtatggaaggtggccgatctcgctctgcactaggcgtgcagggcgtgatcggccaaagatgacggaggtggcagaaggtataagggagagtttgcagctggagacctcatggcgttctatgaggggcagctccactgggacacttggtgatgctgagtctgttggtgtgcctgagtcagtgtaattagccttcttatcatagtacctatcatagacagccaaaccaccatagttaggcagcttggtaacaaactgcagatattcataataaagatccttctgaaaaacccacgcctcgtcctgctccggcgacgccaccaaccctatatacaccttgcttcccggatacgccgccgcccatttctcccacgaatacctcgacgatatcacgcaccgccgctcgatctcgccggcgccgtacatcctcacatgaatccgatcaaacaccttcgtcgccagcgccttctccagccgatgatccgggtacgagcacctcgtcgtcgccgtccagatcacgccggcgccgtagccgtggaggcggcgagcgagttcgtcgtagtgatcggcgccgccctggtcgatgaagaagtcaacgccgtcaacggcggcctcgtggccaaacggacgcgacacgccggcgcggcggccggcgaggaaagcgttccagaggttgtcggcgacatcggcggcggattgggaggtggggagcgagtatccgccgccgtagccgccgatggcgaggaggatcgtgacgtttcttgatttctggcagtggatgatgtcggcgccgacggcggtgacgtcatggccggagatgtcgaggttgtagttgccggggtggtagccgaagacgttgtagaatgtgatgattacggtggtgtagcggccggtgtcgcaggcctggcggagggtgccttcgtcggcgtcggcgtgacggccccagtagattgctaggccgccgacgtagccgtccgccgtcgccggcgcggcgagatggccggagattattgtgagcagcaatgctgctgctagtgcaaagggtaagggagggagagccattttgcaacgacagtgtcagtgtacggt

SEQ ID NO: 47704 - DNA, 4578 bp, Oryza sativa
  Clone ID: PAT_MRT4530_50447C.1
atgtcggctccgacaccgcgcgtcttgcgttcgccgcgtcgtcaatcccgctcgcctcctctgcgccgtggtcgccgtaggcctggcgacgcctgggacatggttctgctcaggcgcgtggtcaaggaggtggggggctcagccaactatccgatcatcacgaagacgaactacagcgattggtccctcttgatgagggtgatgctccaggcgcgcggcctctgggaagctgtcgagacgggtgatgtcgacttccaggaggacaggatggcattggaggccgtccttaaggcggtccccgctaacctgctgccggtgctcgctgtcaaggagacggcgaaagacgcctgggatgccatcaagacgatgcgcgtcggcgtcgaccgcgtccgcaagtcgaaagagcacgagctgcgcaagcagttcaacgcgatcgagttcaaggaaggggagtccatggaggagttctccgtccggctgagtgggctcatcaacaaccttgccgtgctcgggatccagctcgaggaatcaaaggtctgtgaaaaatttctccatgttgttcctgaacatcttgaacagatcgccttgtccatcgagactttgctcgatctcgataccctgtcactggaggagctgacggggcatctgaggaacgccaaggagcaccgccccaagaagaagtccggcgatgagggcggcaaactgtatctcactgaagaacagtggatcgctcgcgccaaggaacggcagtccagcgagggatcgtcgagcaagaaggcgggcaacaaccgacgacgccgcggtggccggaagaaatcggaggccgctgcggatggcgagcgtggcgtgcacgacacgcgcgatcaagggcatgacaagtgcaagaactgtggccatctcgaggaggatgatgagccagcgttgctgatggctcatgccattgagttggcgccacctccgtcgccgtccccaccatcaactgaaccgctcgaccttcttgagcccaaggtcttcgcgcacctgcaccgcgaggaacatgtagacgctggtgtttggcatctcgacaccggcgcgactaaccacatgactggtgttcgtgacgtcttcgccgagcccgacacggcggtgtgcggcaaggtccgttttggcgacggctcggtggtcgccattgagggccaaggtaaaatcatctttgagtgtaggaatggtgaacaccgggcgctcacaggggtgtactacatccccaaagtcaacgcgaacctcattagtctcgggcagctggatgaaaacggctgcgacgtctgcatcttccatggcgtttgcacgatccgtgacgccgtgcggcagctccttgctcacgtgcggcgtacacgcaatcggctgtacctaatcaagatcaccgtcgctcggtcggtatgcctctcggcgcgcacgcaggaggctgcatggctctggcatgcccacttcggccacctccactttgacgcgctccggcagctcgctcgacaggacatggttcgcggtcttccaccgatcgaccaagtcgagcagttgtgtgactgctgcgttgtctccaagcaacgacgttcgctgttccctgggcggtctctgttccgggtggaagaccgcttggagctcgttcatggcgatctctgcggtcccatctcgcctgcgacgcccggcggcaagaaacactttctgctactggtcgacgatgcaagccgcaatatgtggctcactcttcttcagaacaagggggaggcggctgcggctatcaagcgctttcaagcctgcagcgaggctgagtccaggtgccgtctcaagctcctccgtaccgataacgggggcgagttcacctccgccgagttcgccgcgcactgcgccaagagcggcatcaagcgacagctcaccgcgccgtattccccccagcaaaacggggtggttgagcgccgcaaccagatgattctggtgatggtgcagagtcttctcaaggccaagtcagtgccggcgtgctattggggggaggcagtcactacggctgtgttcttgctcaatcgcgcgctgaccaaatgccatgacaacaagattccatatgaagcttggtttgggcggaagccggctgtcgggcacctacgcacgtttgggtgtctcgcgtacgtcaaggatgttcggccgcacatcaccaagctccaggaccgcggcaagcccatggtcttcctcggctatgttgatggctccaaggcctacaaggtgtttgacccaaagtccgggcgtgttcacgtatcacgtgatgtggtgtttgatgagggcgccggatgggactgggacgctactgctggtataatgagccctcctccaccgtctgactttactgttgagtacgttgtcactcaggagacggctcgtgaggagtcacccgcgcccacgaccacggcggccagcccgggacatggcgcggctacacccagcgcgatgccaccgacgccctcgcccacgtcattgctcaatgcggggtccccgggcttcgttagcccaccacaggacggcgacgacaatctcgacgccgacgccaacgactgctcgcctcggtaccgctccatcgatgggattttgggggaggcatacacgccgggtctagctgcaagggacctggcggacggcgagctttacctgctagcggcggaggaacctgccaccttcggcgaggccgagcatcaccaagagtggcggcacgccatgctggaggagatctcctccatcgaggacaacaagacctggcgcctcgtcgacttgccacccggccaccgcgccaacggactcaaatgggtctacaagatcaagaaggacgcgcatggcatgatcaccaagcacaaggctcgtcttgtggcgaagggatacgtgcagcagccgggggtggactttgatgaggtgttcgcttcggtcgcacggctggagtcggtgaggatgctgctcactcgagcggcgcaggcaggctggcctgtccaccacatggacgtcaagtcggcgttcctcaatggagagctcaccgaggaggtctacgtcaagcagcctcccaggtttgttgtggacggacgcgaacatcaagtgctgcacctggacaaggccttgtacggtcttcggcaggctccgcgcgcgtggaacgcgaagctggacgcgagcatgttatcgctgggcttccggcgaaatgactgcgagcacgcagtctacgggcgcggcagtggtgacagccgactgctcgttggcgtgtacgttgatgacctgatcatcaccggcaacgtggcgatggagatcgaccgcttcaaagcggagatgatgtccttgttcaagatgagtgatcttggtcccctctcgttttacttggggatcgaggtcgaacaggtggcggacggcattcatctgtcgcagaaatcgtatgcgcaacacatactggagcgagccagaatgcaggaatgtaattcctgttcaacaccgatggagcctcgtctcaagttgaccaagacgagcacagcggcgctggtggatgccacccagtaccgtagcatcgtcggctgtctgcggtatttggttcacacgcggccggacctcgcgttctctgttggctacgtgagccgcttcatggaagctccaaccaccgagcacgacacggcggtgaaacgcatcctgcgttatgtcgccggcacggttgattacggctgctactacaagaggatggagacgccgcccgagcctgtcggatactgtgacgcagacatggcgggcgatgtggatactcgcaaaagcaccagcagggtcgtcttcttcctgggtgccaacccagtcagttggcagtccatcaagcaaaaggttgtcgtgctctcgtcttgtgaggcggagtacatagcggcgacgacggcggcgtgtcaggggatctggctggcgcagttgctggcagaaattgagcaggaggagccacaaagcttcaagctcctcgtcgacaataaatcggcgatcgccctcagcaaaaatccagtgtttcataaccggagtaagcacatcgccacgcgctaccacttcatccatgagtgcgtggaggacgggagagctcaggttgagttcattggcaccgatggggaggttgctgacattctgaccaaggcactcgggcgggttcgttttcaagaattgcgagctcgtatcggcgtcgttgagctacgtgcatggagcgggatacctggaggtggatgtggacgttgctggtcgtcggcggtggcgaacggggtgctggggttggtgtttggggtggtgacaacgttggtggtggacatggcgttcctaatacaggccaacacctacgaggagctctccgagcagcttgagcagattgcaatcacgtcggcgtggccggaaagctcggagtcggaggcaccggcgattaggcacttagattatctagttcagttggttggctgcttgcctgcttcacacaggttgcagacttgcagtcgtagcatcgtaggtgaagcaaatggcagaccagcaggagcaggggacaaggaaaaagctcggccagagaagtag

SEQ ID NO: 47705 - DNA, 1260 bp, Oryza sativa
  Clone ID: PAT_MRT4530_50448C.1
atctcgccggaggcgatgccggtgacggaacaccagggctcgtcgtcgtccccgtcgaccttgtccttcggccgctccctcctctctctgcgccgcgaccacgtggccatgccgacgggcgaggaggccgtcctggaggcgatccagcgccatttcgcggcgagcctcggcgagctcctgcctggggaggtggaggggggaggcggcggtggtggtggtggtggtggtggtggaggggaggagatcttgtccgtggcgtggatccggcggcttcttgaggcgtttattctgtgccaggaggagttccgggtgttcgtggcgcaggcgcgacgccgcggcgcgctcccggcggccggggagaagctggtggtggagttccatgagagggcggtcaaggcgctcgatgtgtgcaacgcggcgagggatggcgttgatcaggtgaggcggtgggagcggctcgcggacatcgcggcgtccgtgctgctcgcgccgggggagatccacgagggccagctccgccgcgcgcgcaaggcgctgtccgatctctctgtgctgctcgtggacgacaccgcggcgtccgggagcggtggcgtcgcgtcgttcctcgcgtcccaccgcaaccgctccttcggccgcgcgcgcgcgtccccgtcccgcgcgtcgttcgccggcgccacctcctcgtcccacttccgctccctctcgtggagcgtgtcccgcgcgtggtcggcgtcgcggcagctgcaggcgatcggggccggcctggccgcgccgcgcgcgcacgaggcgggcctcgcggcgcccgtctacgccatgggctgcgtgctccacctcgtcgcgtgggcgctcgtcgccgccgtcccgtgccccgaccgctccaccgcgctccaggcgcaccacctccccgcggcgccggcccgcgccgcgttcccgtgggcgccgccgctcctcaccctgcaagaacgcctcgccgaggagggaaagcgcaaggacaggcgcaactcctgcggcctcctcaaggaaatccatgtcctcgagaagtccacgcagaagcttaccgacgccatcgacgcggcgccgatcccgctcttcggcgacagggaggccgacgtgcgggaggccgcggcggagctcgccgccgtgtgcgccgccatgagagacgggctcgagccgctcgagaggcaggtgcgcgaggtgttccaccgcatcgtgcgcagccgcgtcgagggcctcgactcctccatgcgcaatgccgattga

SEQ ID NO: 47706 - DNA, 279 bp, Oryza sativa
  Clone ID: PAT_MRT4530_50449C.1
atggttgctgcctctatcgctgcccgcggctgtgctcgcacgggctcgagcacctcctaccactggccactgtgcggtaccatcggcctggtcctcatagcccggttcggcaccggccctccactggtctaccaggtcaagtctggtcttgagctctacgatgtgccgaacatagagggatacatgggacggataaggctatcaccacgtaccgcctacctcactttccgtggagtacacaacaacaaagataatttcaaacctaaacaccatgcctaa

SEQ ID NO: 47707 - DNA, 628 bp, Oryza sativa
  Clone ID: PAT_MRT4530_5044C.1
atgtgtcttgccttgctcgttttcccaatcgacggcttcgacttccacgaagagcggatcttccgaagctgcagcggagcgggcgcgcggaccgggtccacgggaagtggggcccacgcgtcagccccacggtccacggtggaccgggcgcacgcggctggcggcggtcggcgccgtgggtcccgcgcccgcgagggcgcgcccgagggcggcctcgccggcgcggccgacgggagtggcgcgcccgcgccccgatggtcaccgccggcgaccaccggcgcggcggagcggcgcccgagagagaggagggaagggggaaggcgaacggcggtactcggctcaccccgggacaacgacgacgacgagaacggcggccggagcggaggaaggcggcggcgcgggtcgggatgacgagggcgacggtgctccggcagtcggcggacgaagcggagcggcggacggggtcggcggcaacacggcgaagcggacggaggtgtcgccgagtcgggaggaggtcctgagcggcggctgctgcggaactgatcttggcggcgacggcggatagagaggaacacggagcgagcactattccgaccgcgagagccatcggtgagcggcggaaacggaa

SEQ ID NO: 47708 - DNA, 468 bp, Oryza sativa
  Clone ID: PAT_MRT4530_50450C.1
aaagcaagcaaacaaaacataaatggccaagactttagcaaacggaacccggacccccccctgaaacccgcgattgcctacaaacaagccttaaattttaagggggggggggagctatggggaagcaaccgggatgatgtccaggcaaacaaattaggggaaccaggggggggggaaaccagggaccattgcccaaacaggctttaccccgggatgggggcctttttttcctaggacccggccttgggggggggggggccccgaaaccggggggacccggagacgagggcgctcatggtgccccccccctgggggaaccccattttggccatgcccttgcccggggaccaagggaagaaccccctcctcctgaacaagggccgaaactggttcttgacccgggggaacaatttctggaaggggggggagttgcccaccaacgtaaaccccctggggaggccccccggg

SEQ ID NO: 47709 - DNA, 585 bp, Oryza sativa
  Clone ID: PAT_MRT4530_50451C.1
atgcaaagtgaggggaagttactttcccatccagccacgtggctctatagcctggccctcaccccgtgcctcgtgagtcacagaagcagccggggggcctcagggtgccacgtcacgcccctcgggccctcgcgctacctcgcctcgaggccctcgcccaactgccatgtggcggggggagcgagcggggaggagacccaggctgaaccgccattaatgcgtacggcgccccaactgtccctcaccgcgtttaatacgactgtgaccgccctatcgccggtcacgtccgattggacggacggccgtgcccccacgttcgcctctgtctccgacgaagtggaggcagggctgtcccccgtgttaggcggggagcggcgctgggtcccactcaaggacggactgctgcttagcttccgggcgaaggcacggatcatggtccggtcgaggttaaatgtctcaggcgaaaagacctgtagcctagtggttacaagagcctcagtagcacctgaggtcctgggcgacgtacccgtcgacagcgaggcgcctgtggcgacgtacccgtcgacagcgaggcgcctgtggtga

SEQ ID NO: 47710 - DNA, 765 bp, Oryza sativa
  Clone ID: PAT_MRT4530_50452C.1
atgtcagctccagtgtcgacgcaggcgtcgatgtgcttgggggagaggcgggtgctggagctgaagcagagcgtgtcgcggatggtgaggagcgggaagaggacgtcgcgccgggtgacgggggcggtggttggcggtggtggcggggacgccgttgaggaggagcaggtcgggaggcggggaggggtggaggcggccggtgaggatcttgagaagggtggactttggcggcgccgctggggtcgacgatggcgaggagctcgctggggcgggcgcggcaggagacattgcgggtgtttaaatgttcgatgtgacagggtgaaaaaatttagagtgggatctaaacatggccttagaacgagtacaataacagactacaagttagctataaatacaagtgaatgtgataagagggccttagagaagagtaagagcacccgcaatggtaaaaataagaggcgcgccacgcgagtagtacgcgacgcgacgcggtggtggtggcgaggtggtgacgcgccgcgaggcgagacggggggaagaagtggtgggcgacgcgacgcgacgcgagttccggggcgcgcgcgagtaccggcaaaacctgtaaagaagcagaaggccgcgcgactgcaagagggtgcaagccacctgggtgtccggctagctggattcctgggcatgtggcccatgtggcctctctccccctctcgcttccaactggataaaacacctgaatttctcgcggttattccctccgtctcacaataa

SEQ ID NO: 47711 - DNA, 410 bp, Oryza sativa
  Clone ID: PAT_MRT4530_50453C.1
atcaaacaacaaaccatatttttatttagacttcctttattaaagcactaaatacaattatctacacataataataacacacagtatataaactataaatcccatcttttattgacattgaacataataactcaattcacttacattatcttgagaaactttacatcaaaactgaactttaatcttcatacacaccttcttcttcatgccccctacatctccaaccaaaaaaaatacccattcaaaccttatgacatactcataaccacctctccactagacatacttactggacttgtgtttatacataaaactccatttcaccagatcaaacatgtacctcaaacttaacttgaatgaaggaatgaattcccgcttaaattcaaagaataactaattctattataaaa

SEQ ID NO: 47712 - DNA, 726 bp, Oryza sativa
  Clone ID: PAT_MRT4530_50454C.1
tagtggatcccccgggctgcatacaaacactacagtttgggagaagagaatccatgaagagctcttcagttgcaccaaggctgaaacaggagagacaagatgactgtaagtttcaggaaggtgatgtgaacagccttgagcttcggcttggcatatcttccgacaatgaccagatcagtggtggtggtgctgctagtccatggcttggtgtgttagtgcacccttggagcctggctgcaaggcaagggaaggcagccttggagcaagctcaccagaggcctaatgaatgtgctgtccaaagagaaaaccgcgcggcttcatcagctcagctggtgggatggccaccggtgcgcgcattccgcaagaacctgtccaccccaaaacctgcagatgcagatgacctgatgaacaaggtgaagctctgctctgatgagggccatggctccagatgtgcagcccaagagaggaggtcatcatcaaccatgtttgtgaaggtgaacctggagggctatgctgtcggaaggaagatcgacctgaaggcgcaccgcagctatgactctctgtcccaggctctgcagagcatgttccatggcttcttgtcagatggcattgcaactaagagacaatgagctgcagcagatggaggagggcagcaagaagaggtatgtgctcgtgtatgaggataatgagggagaccgcatgctcgtcggcgacgtcccatgggag

SEQ ID NO: 47713 - DNA, 643 bp, Oryza sativa
  Clone ID: PAT_MRT4530_50455C.1
gtttggccctggggttttaggccccgggcacccctcacttgtcagttgtcaagaacagtaaatggtgcaagatcctgatgatccatcgcagacattgtatgacactatgattcgccaccatcctccgattgatagagtggctggagcgggaacagtccgtgcagcttttctacaatatattggagtaccttcacttgacatgtcttacggaacaatggaagattaccctgtttaccactcactgtacgatgattatgtttggatggagagattcggagatccgttgtttcacagacatgttgcattggcaagtgtatggggtctgattgctttgaggcttgcagatgatgagatcttacccctcaattatgtctcttacgcatcagaactggagaaatgcacaaaacttgtggaaggtgggtgtacaggatgtcctgtcagtttcgctcctttacacaagtcaattgaccagcttagaaaagcagccaacaaaattcacaaagaaaagatgatgctacaagcagaaaactggagcctaaaaacgagagcgtacacagtaaaagtcagagatatcaacgaccggttaatgatggcggagcgaggcttcatcaaccgggaagggctcgacggtaggccgtggtac

SEQ ID NO: 47714 - DNA, 398 bp, Oryza sativa
  Clone ID: PAT_MRT4530_50456C.1
ccgaaaggggcacccctttaaaaaaggaaaggggccaccaaaagcaattttgtttggaactgtgccccggccaacctggaaaaataaattgggaaatttaaaaggccccctttcacttgggttggaaaccccctttgggggaaagggggtttccctttttaatacccttgggggacaaaaaaaaattttttattttttccaaaaaggggaaacaaaaatttcctcctttttttaaaacccccagtttggggaccggtttttattataaaatttttttttgacctaaggattttttgaaaaagattaattggggggcttggggctgattttttttttaatctccggaaattaaaaaagcccttttttttatctttttgactcattaaaaaattcttttt

SEQ ID NO: 47715 - DNA, 2960 bp, Oryza sativa
  Clone ID: PAT_MRT4530_50457C.1
atgtctcgccacggcaagccacagcagcggcagccgctgatcctccccgatgctgcgcccatgggaggcggcgacggcgggcgcggtgatgcggccacgaggaggcgcaggttcgtcgccttcctggccatctccgtggccctggtcgcctcctaccaccacctcgcgccggcccccgcgtcgcgctaccacgcgctcttcctctcactcggcaacaacgacaccgccgccgcgcacctccgcgcgctcaccctccggccccacgtcgccgggacggaggccaacgccgtcgccgccgagtacgtccgcgccgcgctctcctccttctcattccccacccgcgtcacgccctactccgtgctgctctcctaccccatccaccgctccctctccctctccgtgcctggccgcgcggccgccttcaatttcgctctggtccaggagacctaccccggggacccctactccgaggcggcggcggaggtcatccccacgtacttcgcctactccgcctccggctccgtcgccgccgaggtcgtgtacgccaactacggcaacaccaaggactacgagtacctcgcctcccgcggcgtggacgtcgccgggaaggtcgcgctcgtgcgctacggaaacctgcactgcgaggacatggtgcggaacgcccgtgccgcgggcgccgccgccgcgatcgtctacaccgacgccaaggactttggcggcgcaggagcgaaggggaagcggaagtggttccccgacgcgcgctggctgccgccgaccggcgtgcaggtggggaccctgtactacgggaacggcgacccgaccacgccgctgtggccgtcctgcgcagccggggaggactgcgagcggctgagccagggggagctcgacgggagcgccgcgatgcccagcatcccagcgctgccggtgtcggcgagggacggggagacgatcctcaaggcgatgggcggcgacgcggcgccgacggagtggcagggcggcgagggcgcgcccatgtaccgcctcggacccggtcctgctgtgctgaatctcacgtacattggaaatgacaccttagcaaccatcgaaaatgtctttgccgtgatcgagggaaaagaagagcctgatagatatgtgatcatagggaaccatcgtgatgcctggacattcggagcagttgatcccaacagtggaacagcagctatgctcgagatcgcagaaaggctgtccaagcttgagaagaagggatggaggcctagacgaacaatcattgtgtgtagttgggatgcagaagagtttgctctgatagggtctactgaatgggtcgaggacaacatggatatgctggcttcaagagctattgcttatttgaatgtggatataacagtgtttggccctggaggttttaggccccgggcaacccctcaacttgatcagttgatcaaagaagcaagtaaaatggtgcaagatcctgatgatccatcgcagacattgtatgacactatgattcgccaccatcctccgattgatagagtggctggagcaggaacagattttgcagcttttctacaatatattggagtaccttcacttgacatgtcttacggaacaatctctgctgctgtcactcctttagcatctactaatattattgctcttgcagtggaagattaccctgtttaccactcactgtacgatgattatgtttggatggagagattcggagatccgttgtttcacagacatgttgcattggcaagtgtatggggtctgattgctttgaggcttgcagatgatgagatcttacccctcaattatgtctcttacgcatcagaactggagaaatgcacaaaacttgtggaaggtgggtgtacaggatgtcctgtcagtttcgctcctttacacaagtcaattgaccagcttagaaaagcagccaacaaaattcacaaagaaaagatgatgctacaagcagaaaactggagcctaaaaacgagagcgtacacagtaaaagtcagagatatcaacgaccggttaatgatggcggagcgaggcttcatcaaccgggaagggctcgacggtaggccgtggtacaaacatatgatatacgcatcgtctgaccaagacgactggggcaccaaggcattccctggtatcgtgtcggccatcgacaaggcaaataagctcaacacaaccgaatcttggcagctcctgcagcatgaaatttacagggctgcaagggctgtgtccaaggcttcagctgtccttgatggtagactaacatgagagtacataaattaagatcactacacgattccattttgtgcagtttaaagtaccagataccagctctacacgtagttttgtgcagtttaaagtaccagataccagctctacacgtagttacgatgatatgatatagttacacaagtacctgtgaagatactgaagaactatcctcagttagtatcataattattgatgttaatgaattgtggagatcttttacggtgcttgagaggtatcccagggacctcctaaactaattaatatccaccattgattcctaaagggtaatttaggattatgaaataatattaacaagggtagcttagtaattgtccaatccccatccgctggctgacgttgtcgtttcaatgagattgttttttttcacgatattagcgtgacctcaatctctctatgtctaaccctaactttaaatcccaagtgaaagaacggaccaggagcaggggcagcacgcaaggtggctgcgatcggcaggcacgtacggttgcgttcggcagcgacgaccggcgggcatgtacgatggttgcgaccgacggctggatgctggctctgctgatggttcctaaatgctgaagcattatttcatttttgttaagcattgattggctcgaaagctgttgaatggaattgaaaagtttggtcattgatttcttgcg

SEQ ID NO: 47716 - DNA, 911 bp, Oryza sativa
  Clone ID: PAT_MRT4530_50458C.1
atggcagcggagaccccggcggcagggaggagtggcgtgctgaagcacattgtgctggcgcggttcaaggaggaggtgacgccggagcgactggaccacctcatccgtggcttcggcggcctcgtaaacctcgtcccttccatgaaggccttcaactgcggttgcgccccctccgttcggtggctctgcgggtgtcccgtgtctgtcgcctctgtgacgcgcggcaggacaattggcttcctgtggatctttaatatgttcgtgacccatgagattgtttttgcactgtgtaaaagaaatggaaaatatcctatgatcaggggcctcatgtttcccaatggaaaccatattttgttacacaaacaggcctggcccggggtcgagcggacgcaggaggccaacatggctggagatggccagggcaacaacaacggggtggcacggtcaccggaggcgggagagacagacatggctgatggcacgacatcgggaaagtccagcgtggccaatgacatgtcagtaggagaggcaagcggcggaggttggtgggcatggtagttggcgatgtccaactacatcgacgacaaacattgacggcgggcaacggtgatggccgggatgttgagcacgacgtcatcgctagccaacgtcacccctatttcctctccatggagctcctccctgctatggccaatccttccggtcatggggagctttgttggggaactgacgtgagcatagagaacatgcaccatggattcacacacgtattcgagtgcacttttgaaagcacagaaggagtcaaggagtacattgaacacccagcacatcttgaatttgcaaaggaaatcttgcttgcaatggagaagacactcataatcgactacatgccaactgctgtaaataacagc

SEQ ID NO: 47717 - DNA, 500 bp, Oryza sativa
  Clone ID: PAT_MRT4530_50459C.1
gcaccgtgttggtagcaatcatgtggtgggacatggagctcacagcatgatatgtaccagtgcactacacgtacgtacccactgtctaacctaagggaagagctggtccttaagagattgagatatactatgcaaactacatgacacagcgcttacagaaacactacccagtcttcaattcgcgacagtgaacgtacatacctgcacagattgattatccagtgaggacgctttaagactactgctgtgctagagccagacgatattgcttactatcagacggactatggatgccatgcacatactatgacagggcctacaccagacacactcaatacagagcctattgcacatagcatgcacgggcagactatatagggtgtgcggtgctctcatgcatgtcaggaacagccacagcatgcatcgaatgcagcaaagtagatgtgagacatactcgcatttaagagtgctatctcacaagacctaactcttgatgagca

SEQ ID NO: 47718 - DNA, 1812 bp, Oryza sativa
  Clone ID: PAT_MRT4530_5045C.1
atggcgcccatctcctgccgcgaactctccccgcacctctcctctctcccccgcgccgccgccaccaccaccgcccacacgcacctctccttccgacgcgctccacctccgtgccgcctcctcaccggcacagccagcgacgacggcgacaggctgcgcctcctcccctccgcggccacgagggacgatgcgctcgcctccctcgtcggccagctcgagcacgacgtcgtcgttcgccacggacaagcggcggaggaggaggaggaggaggaggaggatgaggagctgtatcaccacgatagccaggacctcggggcggcgcggaggcgccatcaccggcagcaccaccaggacgggcacgagctggcggcgcggtggcgggagatccacgggcgcgacgactgggcggggctgctcgacccgatggacccgctgctccgctcggagctcatccgctacggcgagttcgcgcaggcgtgctacgacgccttcgactacgacccgtcctcccgctactgcggcagctgcaagtacccgcgccgcgccttcttcgaccgcctcggcatgcccgccgccgcgcggggctacaccgtgacccgctacctctacgccacctccaacttccgcttcccaaacttcttctcgcagtcgcgcgcgggtgccaagatctggagccagcgcgccaactggatcggctacgtcgccgtctccaccgacgaggagaccgcgcgcctgggccggcgcgacatcgccatcgcgtggcgcggcacggtcacgcgcctcgagtgggtctccgacctcatggacttcctccgccccgtcgccgacgagggcatcccgtgcccggaccgggaggtgaaggtggagtccggcttcgtggacctctacaccgacaaggaccccacctgccgcttctgcaagtactccgcgcgcgagcaggtgctcacggaggtccgccgcctcgtcacccgctacgccgcgctcggcgaggacgtgagcgtgacggtgacggggcacagcctcggcagcgcgctggcgatgatcagcgcgtacgacatcgcggagtcgggcgccgcgagcgcggcgcacggcggcgggaaggaggcggcggcggcggtgtgcgtgtactcgttcgcggggccgagggtggggaacgcgaggttcaaggagaggttcgagggggagctcggggtgaaggcgctgcgggtggtgaacgtgcacgacggggtggcgcggatgccggggatcctgctgaacgagggggcgccggcggcgctgcggcgggtggcggagggcatcctccgggtgccgtggtgctacgcgcacgtcggcgtggagctcgcgctcgaccacaagcggtcgccgttcctcaaggacacgctcgacccggcctgcttccacaacctcgaggcgcacctccacctcctcgacggctacctcagctacgaagctttgttatatctgcagaaggcaaatatgaacacgtgtgttgtgcagaggattgaagataggtaccacgggcgcggggagcggttcgtgctggcgagcgggcgcgacccggcgctggtgaacaaggcgtgcgacttcctcaaggaccaccactgcgtgcccccgtgctggcgccaggacgagaacaagggcatggtccgcgcccccgacggccgctgggtccagcccgaccgccacagctggcacctcgacgaccacgacgaccaccacggtgaggggcaacacgggcacgacggcgccgtcgacggcgcgcaccaccgccacagcagccacatccgcctcgtccggcgccagcctaattag

SEQ ID NO: 47719 - DNA, 602 bp, Oryza sativa
  Clone ID: PAT_MRT4530_50460C.1
gcacgagggaaagacaggagggctcgaggagattgcggtggagaagaacggcgagcccgtcgccgccgccgccgccaccgtcgcctctacctcagtgttcgacaacgagagccacacgaggactcccgacctcggcgttggcctgagcctggtgttcctcctcgccaagacatccgacgagttcaacaagatggcgaaggttcgcgcggagatcgagacgctgctcagagagatcaaagagcaggtgaggcagagcagcagcggaggggttggtgacgacgacgcatcgaaaccccgctgcaacctcgagtccgccgcgtcgagctgcctcacggacacgaacgagaacgagagggcgagcgcgcgcatgatggaggatcaggccacctcgtcgtccaaccacatggaggaggaggaagtgagctgcgagaaatcagcggaggagtacgagtgctgcttcccgaggatggatgtgctcgaggaggagttccatgccgagctcgatcttctccaggttaactatcgttcagatgttcagctgttcttgcctgaagaacatgatgcagagcaaccggatgagatcactgaatgccgggaagaat

SEQ ID NO: 47720 - DNA, 417 bp, Oryza sativa
  Clone ID: PAT_MRT4530_50461C.1
atggcggatcaggctattgtggcgccagcggtggctgatccggccatcgcgactggccgcctcttcctcatcggcgacgacagcgacgtcaggcagggatcgggatttagtcgcctgctcctagtcgcttccttgtcatcggcggcggtgccgctcctggccgcctcctcctcttcatcggctgtggcggcaccgggtggggatgagaatgacaccactcctagccgcctcctcgtcgttggcggcggcgccaccctttcccggctgcctccttgtcgagcggcagcacagccgcccactgccaccagctcccgctcatatgagaggagaggagaggaagagagagaggagagaaaaaataataccaggagagaaaaagggcgagagaggataggaggagaaaattttttgaagtga

SEQ ID NO: 47721 - DNA, 4400 bp, Oryza sativa
  Clone ID: PAT_MRT4530_50462C.1
agcactcagaaccaggatggttaattagaaaatgattttcttctcttttacaaactagtggtgtgcacacactgtattacacttatttatttcttgagcataatctgaatgtcaattgtcaaaccacagatcgatcgattgcacacggtatacagacttgccacacaatctgcctggattattattcttccataggttttgatcaatcctttcagcaaatcagtgggggatagcagccaaaattggcggatcagcgtaagggccgtagagagccaccccttggcgatgtagcggtagatggcctccgtgtagtgaccaccgtcccagtgcacggacgccgacgggtcctcgcacgcgaccgcgcccgccatgccgcagatggcgttgccgttccagttgtacggcccgccgccgccgcagcaagccttgaggatgccaccggcgataccaaaacggacggggtcttagagaacttggatgatgggtcggtagaagtcggcgaagatgatcttggcatgagggtacttgcccctgagcccgtcgagagccgcacggagcattgcgttgtggcgcttggacatgcggttgacagcacgcaggcaaccgaggccatcgtagtctgtcgtgttcgggctcatgaagagcgtgaggacaattggcgagcacccccattggcgggtttcccggcacgacctagtaaaccgcgccttggttgatcagcctctccacggccgtggtgattttttccacgacttgaggcaccaacgatttgacctctttttcggtcttcttggccgtccacatgaagttgtagtcattcaccccgaactctccaacgatgaagagggatttgctgaaatagttcttgaacccttcatctgtgctgttgcaaatcgacggcttgagatgctcgagccaaccaagctgcacatccagcgaattgttcagaagcttatctgcaatgttatttctcttgaagaatgcagagtcgatcgccggcgcggtgccgacggcgaagttcacgccatgagagatgcttgagctgttcgccatgaaggctggaaggaaagggagaccaaactcctcggcgatgaaatcgacgatgactctcccattgcagacacggcccgtggggtggccaaagaatgtcatgccgtaaggaggcttgtcgatccacacgggcataaccggagttgccatgataacgaagttaccggtgtcgatgtaggagtttccaaaggaaaacatcgaggtgaaatagtgtgaggttgagctcacaccagagagacagtagaggaaggtgatagaaaatacaagtttgagctccatgatgctacctaacctactagaaatgtgaagagcagagctgagtgggccatggagccacccctgggcgatgtagctgttgatggcctccgtgtagtggacaccgtcccaggagacggcggcagatggatcctgacaggcgaccactccgggcatggcgcagatggcactggcgttccagttgtaggcgccgccggtgccgcagcaagccttgagaacgccatcggcgataccgaaatggctgggattctggaggactcgaatgatgggattgtagaagtcagcgaggattatcttggcatggggatacttgcccctgagcacgccaagagccgcacgaagcattgtattgtggcgttcgaccacgtcattgatgaaacgcaagcagccgaggccatcgtaatctgtcttattggggctcatgcgagacgtgagaagtgctggtgcgcatcctgttggcgggttccctggcaccaccacgtaagctgcaccttgggtgatgagcctctcaacggctgtggtgatttttttcacgacttgagggacatacgaatcgacctcttgtttgggctttcccgccatccacatgaagttgtagtcatttaccccaaactctccgacgatgaaaagggttttaccaaaacaattaccattggtttcatcagtgctgttgcaaatggatggcttgagctcctcaaaccaacccaactgcacgtccaaagaattgttcagaagcttaaacggcacaatattgttattctcgaagtattcaacgccagtcgccggcgcgccgccgactgcgaagtttacgccatgggagacacttgagctattcgccagggaggctggaaggaaagggagcccaaattcctcggcaatgaaatcgatgatgactctcccatcactcatgcggcctgtaggatggtcaaagaaggtcatgccgtaaggaagcttgtcattccacacgggcacaaccggactggccatgatgacgaagttgccggtgtcgatgtacgagtctccaagagaaaacatcgaggtgaaaaactgcgaggtagagctcacacgagagagacagaagaggaaggctggatcagcgtagggaccatagagccaccccttggcaacatatcggtagacagcctccgtgtagtgaatcccgtcccaggacactgatgctgttggattcttgcaagcgaccactccaggcatggcgcaggtagcgcttgcgttccagttatacacgccaccagtgccacagcaagccttgagaactccatagtatgtaccaaatcggcgaggttcttgggtgactcgaatgatgggttggtagaagtcggcgaagatgatcttggcatgagggtacttgcgcctgagcctgacgagagctgcgcgaagcagcgtgttgtgcctcttggccacgctgttgatggcacgcaggcatccgaggccatcgtagtccgtcctgttggggctcactcgttgcgtgaagtgctggtgcacaccctgttggtgggttccccggcacgaccacataaaccgcgcctccaaactctccaacgataaatagggacttactgaagcagttatttgcatcttctttggttgtgttgcaaatcgatggcttgagctcctcgaaccagccaagctgcacatcaagtgaactgttcagaagcttaaatgccacaatgttgttcctctggaagtagtcgatgccagtcgccggcgcgccaccgacggcgaagtttacgccatgggagacacttgagctattcgctagggaggctggaaggaaagggagaccaaattcctcggcaatgaaatcgataatgactcttccatcacttacgcggccagtgggatgaccaaagaatgacatgccgtaaggaggcttgtcattccatacgggcgctaccggagttgccatgatgacgaaattaccggtgtcgatgtacgagtctccaagagaaaacgggatcagcataaggaccatagagccaccccttggcaacgaaccggttgatggcctccgtgtagtgaatcccatcccaggatatcgaggccgatggatccttgcaagcgaccactccaggtaaggcgcacgcggagctgacgttgaagttgtaggtgccaccggtgccgcagcaagcagaaagcttggaatgtagcataccgaaatggctagggttccgcatgacttggatgatgggttggtagaagtcggcgaagatgatcttggcatggggatacttgcccctaagcctaccgagagctacacggagcatcatgttatggcgcttggccacgccgttgagggcgccaaggcagccgaggccatcatagtctgtcctgttggggctcatgaggacagtgagaagcgccggtgcgcacccgtttggtggattcccagccaccaccacgtaaatcgcgccttggttgatgagcatctccacgcccatggtgatttttctcacgacttgtggcacataagactcaacctcttgtttgctcttccctgccatccacaggaagtcgtaatcgttcaccccaaactccccaacgaagaaaagtgatttaccaaaacaatcattggcttgttcagtagtggtgttgcaaatggatggcttgagctgctcgaaccaacccagctgcacatccagagaagtgttcagaagcttgaacgacacaatattgttcctctcgaagtagtcaatgccagtcgccaatgcgccgccgacggcgaagtttacgccattggagacactcgagctattcgccatggaggctggaaggagagggagctcaaactcctcggcaatgaaatcaacgatgactctcccatcactcatgcgacctgtggggtggccaaagaaggtcatgccataaggaagcttgtcgtaccgcaatggcagaccggaaggtgccatgatcacgaagttgccggtgtcgatgtacgagtctccaagggaaaatatcgaggtgaaatagtgcgagatagaactcgcaccagaaatacagaagaggaagacgaggaagaatacaagtttgagctccatgcttaatttgtttgctac

SEQ ID NO: 47722 - DNA, 107 bp, Oryza sativa
  unsure (1)..(107): unsure at all n locations
  Clone ID: PAT_MRT4530_50463C.1
accaacttttctcccaaggaaacttctccacttctntcctcgcttccgncgcctcctacgncgccgccgacatggacaccacgatcggctcggtgacgacggcctcc

SEQ ID NO: 47723 - DNA, 1422 bp, Oryza sativa
  Clone ID: PAT_MRT4530_50464C.1
atgatgatgcgccgaagagggcggcgaccggcgccgcgcatgccctcgcgatggacggcgcgcggaagacggcggcggccaccacgcgtccggcggaccgcagtatctggaaacaagcgcctgcccgatctggacggcggcgtggagcaagaacggccaggagagccagacgagcgccgcgacgcacagcacggcggcgatcaccagcacgtacgggagcgccgcgccggccgcggcgcggagccagcgccagaacgactcgaggcgcggcgcgagctcgtgggcggcgccggcgagcgtggcgaggaggctggcgtagaggcgcttgacgaggggccacaggccgtcgagcctgaagctgatgtcggcggcggcgtcggcggccgcggtcttgagccacttccagaacgcctcgaatggttggacgagctcatgagctgcgccagcgagcgtggcgaggacgctggcgaagaaggaccgggtgttctgccaaaagccgtcgaagccgaagctgatgccagtggcggcgtcggcggccgcggtcttgagccacttccagaacgcctcgagtggttggacgagctcgtgagctgcgccggcgagcatggccacgacgctggcgaagaaggaccggatgtactgccaaaagccgtcgaaaccgaagctgatgccggcgcctgcgtcggcgacggctgtctggatccacttccaaaacgcctgaaacgggtggacgaggtcgacgagcccgtgggccacgctgacgagcgccgcgacggcgtcggcgaagaagccctgtatgccatgccacatgccgtcgaagccatggctgatgccggcggcggccgcctggatccaccgccagaacgcctcgaacggcagcacaaacaggtgcgcggcgctcccgagcccagccacgatgctggcgaagaacccttgtattccctgccacatgccctcgaatccatggccgatgccggcgacggccgcctggagcccgcgccacagcatctcgaacggcaggacgagcaggtgcgccaagctcccgagcccagccacgatgccggcgaagaacacctggacggcgtgccccagggactcgaatccatggccgatgccggcgacggccgcctggaccccgcgccacagcatctcgaacggcatcacaagcaggtgcaccaagctcccgagccccgcgacgacgccggcgaggagccactggatggcatgccccagggcctcgaagacgtgggcgatggccccggcgagcgcctggaacgggaggagaagcaggtggatgaggccgccgaagaggccagcgatgagctgccacaggccgtcgaggccgaagctcatgccgacggcggcgtcgccggcgagggtgcgggctcggccgacggcgccatgaaggagcttccttgctgc

SEQ ID NO: 47724 - DNA, 1716 bp, Oryza sativa
  Clone ID: PAT_MRT4530_50465C.1
atggtggtcctcgccgactcagcagcaaggaagctccttcatggcgccgtcggccgagcccgcaccctcgccggcgacgccgccgtcggcatgagcttcggcctcgacggcctgtggcagctcatcgctggcctcttcggcggcctcatccacctgcttctcctcccgttccaggcgctcgccggggccatcgcccacgtcttcgaggccctggggcatgccatccagtggctcctcgccggcgtcgtcgcggggctcgggagcttggtgcacctgcttgtgatgccgttcgagatgctgtggcgcggggtccaggcggccgtcgccggcatcggccatggattcgagtccctggggcacgccgtccaggtgttcttcgccggcatcgtggctgggctcgggagcttggcgcacctgctcgtcctgccgttcgagatgctgtggcgcgggctccaggcggccgtcgccggcatcggccatggattcgagggcatgtggcagggaatacaagggttcttcgccagcatcgtggctgggctcgggagcgccgcgcacctgtttgtgctgccgttcgaggcgttctggcggtggatccaggcggccgccgccggcatcagccatggcttcgacggcatgtggcatggcatacagggcttcttcgccgacgccgtcgcggcgctcgtcagcgtggcccacgggctcgtcctgccgtccgaggcgttatggcggtggctgcagacggcggccagcggcatcggctctggcttccaaggattgtggcagagcatacaaggcctcttcgccagcgtcatcgcatcgctcgccggcgctgctcacgacctcgtccacccgtttcaggcgttttggaagtggatccagacagccgtcgccgacgcaggcgccggcatcagcttcggtttcgacggcttttggcagtacatccggtccttcttcgccagcgtcgtggccatgctcgccggcgcagctcacgagctcgtccaaccactcgaggcgttctggaagtggctcaagaccgcggccgccgacgccgccactggcatcagcttcggcttcgacggcttttggcagaacacccggtccttcttcgccagcgtcctcgccacgctcgctggcgcagctcatgagctcgtccaaccattcgaggcgttctggaagtggctcaagaccgcggccgccgacgccgccgccgacatcagcttcaggctcgacggcctgtggcccctcgtcaagcgcctctacgccagcctcctcgccacgctcgccggcgccgcccacgagctcgcgccgcgcctcgagtcgttctggcgctggctccgcgccgcggccggcgcggcgctcccgtacgtgctggtgatcgccgccgtgctgtgcgtcgcggcgctcgtctggctctcctggccgttcttgctccacgccgccgtccagatcgggcaggcgcttgtctccgccgtgtcaagcggcgcgcactacctgttcgtccccttcgggcagtgctgcgtcccgctcaccatgatgagggccccgggcgccgccggcctgatgatttcgcgagcagcattcgaatcactcccggagctctacttccagatactgcggtccgccggacgcgtggtggccgccgccgtcttccgcgcgccgtccatcgcgagggcatgcgcggcgccggtcgccgccctcttcggcgcatcatcatga

SEQ ID NO: 47725 - DNA, 1571 bp, Oryza sativa
  Clone ID: PAT_MRT4530_50466C.1
gggcaattacgccacagctcactgaattcgatcgcctctctctctcgttgctgccttctggcaaaccatggccgtccaggttcaacgaacgcccctcccccggtccacgtacaccggccatcgggtctatctcctgcgggccccacctgcagtgacacggtgcaccgtggaccgcgcctttccgcgcagtcatggacctccccttcctcctctcctgtataaaacctcgcgtcctgatgcttcctcctccaactccacgagccgccatttcccaaggaggagcaaggattgttgttgtttcgctgtcagatcgattcctgacgggataatgggtgagaccatcgccaaggatgtcaccgagttgattgggaacacgccgttggtgtacctcaaccgggtgacggatgggtgcgtcgggcgcgtcgcggccaagctcgagtccatggagccatgctccagcgtcaaggataggattggatacagtatgatcactgatgcagaggagaaggggctgatcactccaggcaagagtgtgctgattgagccaactagtggcaacacaggcattggactggccttcatggctgctgcaaagggttacaggcttgtactcacgatgccggcctccatgagcatggagaggagaatcatattgaaggcttttggtgctgaattgatacttactgacccactcttgggaatgaaaggagctgtccaaaaggcagaagaactggcagcgaagacaaacaactcatttatcctccaacaattcgagaaccctgctaacccaaagatccattacgagaccactggacctgaaatctggaaaggaacaggaggtaaagttgatggtttagtttctggtattgggacaggtggcactattactggagctggacgatacctcagagagcaaaatcctgatatcaagatctatggtgtggagccagtcgagagcgctgtcttatctggtggaaagcctgggccacacaagattcaaggaattggagctggttttgttcctggggtcctggatgttgacctcatcaatgaaactgtacaagtttcaagtgatgaagctatcgagatggcaaaggctcttgcattgaaagaagggttgctggttggaatatcttcaggtgcagctgcagcagcagctgttaggctcgctcagaggccggaaaatgaaggaaaactttttgttgttgtcttcccaagctttggtgagcggtacctttcgtcggtgctcttccagtccatcaagaaggaagctgaaaacatggtggttgaatgaaatgcacaatatccgggaatccacaggaataaaagtttggtatctctgcttgtgtgattaaacatacattgtcctgccattttcaagttgttctgcttgtgtagcaatggggaacacagtgtgttagccttgtagtgttaaacagtttacattttatcttccctgtatatcagaaccctttacatgggcatttgtcagccagtgtgaatgaaataaagcatcatatgatttgtctcaaaaaaaaaaaaaaaaaaaaaaaaaaaaaaaaactccaaaa

SEQ ID NO: 47726 - DNA, 300 bp, Oryza sativa
  Clone ID: PAT_MRT4530_50467C.1
gcttttctctccaccattgcttgcaaagctggtcgggtcactcttaccgttaagctggccgcggcggcgagagcaagctaagctaggtcgggcatggggaaggacgaggtgatggagagcggcggcccccgcctcgcgctcgccgccatggactacacggacgccgagcctgtgccggtggaagaggcgcccgccgtggacaggtcgtatgaggtggtggccgtagaggacgagctgtccggaccggcgctgtgaaagaacttgccgcagccgcttcccgggggctcagcgaccaaacgg

SEQ ID NO: 47727 - DNA, 487 bp, Oryza sativa
  Clone ID: PAT_MRT4530_50468C.1
aggagaagaaggagaggagcagccatggcgtcgtcggtggcagcggcggcgagcacgttcctggggacgaggctggcggacccggcgccgcagggcgggaggatcgtggcgaggttcgggttcggccgccaccggcaaggggcccctcaacaactgggccacccacctcagcgacccgctccacaccaccatcttcgacaccttctcctcatcctcttaatttaagctctttcgcgcgcaattcaaacgggatcgatgcgttggtgtgcgttcgcgcgcgctgtttagttttgtgatgacgagcgagctgggagggtatggagagaggagaggtcatccttttgttgattactacttaaattaggaaagctgggttggtggttaatggcgacttgcatggtggtgatttgtaatataagaacacccaagatgatgaattaatgcatccacttgcacatcaaaaaaaaaaaaaggagggcgaaagaca

SEQ ID NO: 47728 - DNA, 668 bp, Oryza sativa
  Clone ID: PAT_MRT4530_50469C.1
acccggggggtccttacttcgacccgctcgggttggcgtcggacccggagaagaaggagcggctgcagctggcggagatcaagcacgcccgcctcgccatggtcgccttcctcggcttcgccgtgcaggccgccgccaccggcaaggggcccctcaacaactgggccacccacctcagcgacccgctccacaccaccatcttcgacaccttctcctcatcctcttaatttaagctctttcgcgcgcaattcaaacgggatcgatgcgttggtgtgcgttcgcgcgcgctgtttagttttgtgatgacgagcgagctgggagggtatggagagaggagaggtcatccttttgttgattactacttaaattaggaaagctgggttggtggttaatggcgacttgcatggtggtgatttgtaatataagaacacccaagatgatgaattaatgcatccacttgtacatcgatcgatcgatcttggtatttgactaagtgagtgtgactgtgaatgcacatatgcacactgcatagactttacctgacatgtattgatattaataaagttataacaggtgtctcgctatcaataagtatattgtttatcagggaaaaaaaataattagttataaataagaatgccttgctagctgagctacgttaggttcac

SEQ ID NO: 47729 - DNA, 329 bp, Oryza sativa
  Clone ID: PAT_MRT4530_5046C.1
cggggcggggaatcccccatatatataaaccccctaaaaaataaagaaggccccccccattttgggcccccaccctttttttaaaattttttttccaaaggggggaaaacccccccccctttggggaccgggggaccgacctaacccatatgcaggcgggcgaccccccaaaacgcggggccccaggcatgggctgggggaaatttaaagggggaccaaccattcaaatggaggggggaccagggggcaaattaaagctggggctggggggcaatggcaggggccccgggacccacccggttgccgttgttctggggggcctcgacccc

SEQ ID NO: 47730 - DNA, 2980 bp, Oryza sativa
  Clone ID: PAT_MRT4530_50470C.1
cggacgcctgggcggacgcctcgccaccacccacacattctcgaagaaggagaagaaggagaggagcagccatggcgtcgtcggtggcagcggcggcgagcacgttcctggggacgaggctggcggacccggcgccgcagagcgggaggatcgtggcgaggttcgggttcggcggcgggaagaaggcggcggcgaagaaggcggcgaggccgtcggcgccgacgacggacaggccgctgtggttccccggcgcggtggcgccggactacctggacgggtcgctcgtcggcgactacggcttcgacccgttcggcctcgggaagccggcggagtacctgcagttcgagctggactcgctggaccagaacctggccaagaacaacgccggcgagatcatcggcacccggttcgagaccggcgaggtgaagtccaccccgttccagccctacaccgaggtgttcggcctccagcgcttccgcgagtgcgagctcatccacggccgctgggccatgctcgccaccctcggcgccctctccgtcgagtggctcaccggcgtcacctggcaagacgccggcaaggtggagctggtggatgggtcgtcgtacctggggcagccgctgccgttctcgatctcgacgctgatctggatcgaggtgctcgtcatcggctacatcgagttccagcgcaacgcggagctggacccggagaagaggctgtacccgggggggtcctacttcgacccgctcgggttggcgtcggacccggagaagaaggagcggctgcagctggcggagatcaagcacgcccgcctcgccatggtcgccttcctcggcttcgccgtgcaggccgccgccaccggcaaggggcccctcaacaactgggccacccacctcagcgacccgctccacaccaccatcttcgacaccttctcctcatcctcttaatttaagctctttcgcgcgcaattcaaacgggatcgatgcgttggtgtgcgttcgcgcgcgctgtttagttttgtgatgacgagcgagctgggagggtatggagagaggagaggtcatccttttgttgattactacttaaattaggaaagctgggttggtggttaatggcgacttgcatggtggtgatttgtaatataagaacacccaagatgatgaattaatgcatccacttgtacatcgatcgatcaaaaaaaataaataacaaaaaaaaaataacactaaatccacatattccccctgcatagattttatctgacatgtattgatattaacaaattataacacggggtccccttcccgctatcaaaaaaaaaacgacggcgaccacctggcttttgaagaagaggatgatcaccagatttctgtcaaagaaaaggattattaccccaaagattataaacagatgcaacttacaggcatgcagatccttttaaagctctcctacgacaagaacaacttgttcctcatgagcaacacagatgatccggccttgatcaacaagattgtggcacttataacgtccaagggatcacttcacaaaaaacaacataacgaatggtcctgtatggcagagctcggggtgaagatactaagccgatttatgcgatttatgtatggccctacaaaatcaaacaatattctgtggcatgaaatatcaacaagcagcaaagcaatcggcaccttggagagtattcttgagtgtgaccaatgtgactctgtgctgaagaaacacgccataaggattctcaaaaggatattcatggatacatcttcggctatgggtgaaggagacagagaaaggttcattggctccttgatggacatgtctcttcacaacagtaatggtgactttcaaaatctggcaggtgtagatctggcgctcaagaaacaagggttaagcattctcaaagaaatatacttgaatccatcttcgattatgggcgaaggagacagagaaaggttcatcggctccctgatggacatgtttcttgacaacagtaagggcgactttggaaatctgccaggtgaagatctggacctcaagaaacaagagttaagtattctcaaagaaatatgcatggatccatcttcgtttatgggcgaaggtgacagagaaaaattcatcggcaccctgatggacatgtttcttcacaacagcaagggcgacttgtttgaaaaactagcaggtgatgatctggtgcagatatgtagaagaagtggaagcagtgccacgatcatattgaggaaatatggtcatgatattgttgattgtattgctgatactcgttcaagcgtatatagcagcatgcacagaaaaattgcagcaaagatcctcaatcatctgtgtagtccctactccactgacgaggaacatcttcagaatctgaaggaggccatcattgatttgatacccaaggtgctaagagaagcacttggttgggggttgacaggagaagagatactgcgagtggcagtttcaggccttgaaggtacccaagatgatgactggaaattgcaggaagcattggcgtccctctgtgcaaccgtgtttaacagaattgtcagcaaggatgcagatttgactgctcggttcaacaacatcgccgctggtatctgcgaccagacaacgaagcctcgcatgaccttcgcagacctcatcaatgaagctgtaaaagttcatcgcatcgaatttaaaaaaccagaaaaaccaaaaccagctgccaggccggaactgtacgagtttgtgactgcgaaatacaccccgccccactttatgtttttgggcgaggaagatcccaacgcgtgttgtatctcttgataacaccctaatttgtactttctccgtttcacaatgtaagtcattctattatttcctatatttatatggatattaatgaatctatatatatatatatatatatttgtctagatttattaacatcaaaaaaaaaaaaacctcgtgccgaattcctgca

SEQ ID NO: 47731 - DNA, 510 bp, Oryza sativa
  Clone ID: PAT_MRT4530_50471C.1
cccacgcgtccgtgttagctgaagttgaaagtctaaatgctgatggacaaacacacaagttgcgagatgcccagctgcaaaaattaaaaacccttgaagcacagattctagacctcaagaaaaagcaggagaaccaagttcaacttctgaaggaaaagcaaaagagtgatgaagctgctaagaagttgcaggaagaaattcattctataaaggcacagaaggttcaactacaacataaaatcaaacaagaagcggaacaattccggcaatggaaggctacccgtgaaaaggaactcctgcagttgaggaaagaggggcggcgaaatgagtatgaacgccacaaacttcaagcacttaatcagcggcagaagttggttttgcagaggaagactgaagaagctgcgatggctaccaaaaggctgaaagagttactagaggctcggaaatcatcaggacgtgacaactcaggcatgaatggtacttctcctggctctcatatgactgagaaat

SEQ ID NO: 47732 - DNA, 2283 bp, Oryza sativa
  Clone ID: PAT_MRT4530_50472C.1
atgccgtgggtaacacctgacaatcgaggcggaagggagaagaagaagaagaagaagaagaagaagctgggaggaggggaggagtgggggaagatgtttggcagcctgctcaactccaagttctacaacaaatgcaagcacgcattcaaatgcattcgtacgcggctggctctcatacggcggaagaagcaggcgatgattcgattcatgaagaaggacatagccgacctcctcaccaatggcctcgacacacatgcatttggacggatggatgggctgataattgagatgaaccatgcttcttgctatgatatgatcgagcagttctgtgagtacattggtaaacagctcaacagcctacagaaacagggggattgcccccaggaaactcgggaagctgtgtcgactctaatttttgctgctgctcggtttccagatttgccagaactgtgtgaccttaggcatattttcacagagagatatggacattttcttgagccttttgttagccttgagtttgttcagaagctggacaataaagtgttcactaatgaggaaaagatacaagccatgcaaagtgtgtctgaagaactattggttgattttgatatcaaagcatttaagatcaaactatgggccactccagaaaccaaacatgatttgcctgcaaaggactcaaagaaacaggtagaactggcagtgcctttgtccagcaagaagggggatgatgctgctccatcaggaagaaaatctgaagctgctactcttggccacaagaataaattggaagcgtccttaaaacaacaaaaggatgttcatcctgttgctgatggcattgaccggttacgtgaaaacaccaggagacagcatgcggataaatctgatggtaaggggcatgtggagaaaccagtgtccgattcagagatgaaaagaaggaacattcaaaaagaagttcagaaagctaacaaaaaagatgttcgcccttgcgaaaaggaactaatggaagcggtggagctagacctcaatggcctgcctaagaaggaatttggttcattgaaagttcctgaagcagaaagcaagaagacatttgcactaaatgtcaagcctaagaaagacaatgatcttgagaaggagaacgagagcaaccttggtcaccaccacagatcacatattccttgtgctgctgatcatgcagattcaggtctcagaacccttggcctagataagcaggggcttcaatcagtgaatcctttgaatggtaacactaaaaacaggatgcctccttattctaagctggatggatctaccggcaagaaatgttctgaaaaggaagagaacactggttgcttgaatgctagaccacatcatttagcagataaggggaatccagtgcaagatagacagccagtgccagagagggcagcttatgtgcgacctccttacatcaaaccaaaactcaacatggaaacagtgaatgatgatcctgcagagcgagctgctagtgactacagcaaacgtgctatccctgaacaaacagatcacctgtctgacaaagatcctcttcgacctgtttctgttagaagtaaatatgccaagccacctgcacctgctgctgtctatgatgaggcgcctgccaatgaaaaggtttcaagccgaacacccagtagtcacagaagacacacaagcaggcagaatgctgttaatgatggcagtgcccggagagatgggtctagacaacctcatggaggcaaaggaatggatgatgttaatggagagaatgttcagagaactcctagtagccggccaaggcactcaggcaggagaaatggagctttgtacaccgaggactacgatggattcatgcagcgccataaatcagaagaggatgaggctgcaattgactttggtaatcttttacccagaactggaaatggccataggagacacaaaagccgcaatactgatgcgcgcagtggagttgatgaggaggagagaatgatggataagcttctgaggcactacagcaagaaaggtttagatgcggaaatcaatccagctccaaccaacaaagcagaagaacaatctgagcaaaagggctccatgcatcctccaggaagagcaatctcactgccaggggaatccgtctgccgcgatgaagatgtgaagtttcctgcccggtctacctcactgcagccggactgtcccaaaactgtacatgtgcacccgaaaatgcctgactttgatgagcttgctgctcgagtcagagctctgaggaaggcctga

SEQ ID NO: 47733 - DNA, 232 bp, Oryza sativa
  Clone ID: PAT_MRT4530_50473C.1
atcccatccccgccgccgccgcgccactcccagggccatttaaaggcctttcggcgtcctcctcctcctcctcctcgccgtctgcgcgctgccgctcgctcgatcccaggcggcgccaagaacggccgagggtggcggaggtggcgcggcggatgacgacactatacacgagctcctgcggacgcacgagctgtcggaggggctgctgtcgcaaggggaggagtctaacagc

SEQ ID NO: 47734 - DNA, 4312 bp, Oryza sativa
  Clone ID: PAT_MRT4530_50474C.1
gaatcggcacgaggcttcttcttccccttcttctcctccatttccatttctccacccaccaccaaacatctccggatccttcgctccatcctcctcctaagaagagcccaagaagccagcaagatccaaagatcaagagcagcatttgtagctgcaactgctggtgctggtgctgttgctgttagatcgaggaggattcaacaagtgtgttggtggtggtggaagttgttacagaattgcgggtgagagaagtttcttcaccgcacctcaccaaaatctccatccatccgtctgaatcccaactccacctgcaactgcaactgcacggcgagattgcagtacaacccaagaaaccatgatgaagtggcagcatcagtagcagtagcagcagcaggaggaggaggaggaagagggctcctctttaatccttgcttcactcatcttcatcagaatcctccttattggctccgcctcgcattctgtgctgcatcggctgttgtatggtcggtggcgaagatgacgatggagcacggcgaggattgctgcgtcaaggtggccgtccatgtccgcccgctcatcggcgacgagaagcttcagggctgtaaggactgcgtctccgtcgtctccggcaagccgcaggttcagatcgggagccattccttcaccttcgaccatgtgtacggcagctccggcacgccgtcggcggccatgttcgaggagtgcgtggcgccgctcgtcgacggcctcttccagggctacaacgccaccgtgctcgcatacggccagactgggtcagggaagacctacaccatggggacggcctgcaaggagggctcacacattgggattatcccgcgtgccatggccacgctgttcgacaagatcgacaagctcaagaaccaagtagagttccagctgcgcgtttcgtttattgagattctgaaagaagaggtgagggatttgcttgatcctgctactgctgctgttggcaaacttgagaatggaaatggacatgcaaccaagttgtcggttccaggtaaaccccctgttcagatccgggaggcgtcgaacggggtcataacgttagcaggatcgaccgaagtgcatgtcactacccagaaagaaatgacggcatgccttgagcaaggatctctgagtcgtgcaactggaagtaccaacatgaacaaccaatcaagtcgttcccatgccatcttcacaatcacattggagcagatgcgcaaagcagatcccatcatgactttagatggaatgcctattgaagagatgaatgaagactatctctgtgccaaactccacttagtagatcttgctggatcagaacgtgctaaaagaactggttctgatggccttcggtttaaggaaggtgttcatatcaacagaggacttcttgctcttggcaatgtcatcagtgctctcggtgatgagaaaaagaggaaagaaggcgctcatgttccttaccgggacagcaaactcactcgccttctgcaggactctctaggtggaaacagcaagactgtaatgatagcctgtattagtccagcagatatcaatgctgaagaaacactgaacactttgaaatatgctaaccgcgctcgtaacatccagaataagccaattgtaaatagaaatcctgttgctgatgagatgaaaaggatgcgccagcaaattgaatacttgcaagcagaactcgtttcagctcgaggaggagttgtcttagatgatgttcagggtctcagggaaaggatctcaatgcttgaacagaaaaatgaagacctttgcagggaactgtatgaccttcgcaaccatggttacactgatccttgtgaacctgaactgcaaaaaattggaactggttacactaaaggtgaagggctcaaaagaagcttgcaaagtacagaaccatttgatgtccccatgactgactcagtaagaggcagccctaaagatattgatgatgaagtggccaaagaatgggaacacacaatgctgcaggatagcatgggcaaagagttgaatgaattaaacagacaactggagcaaaaggagtctgagatgaaaatgtatggatctgacactgttgcacttaaacaacactttggaaagaaacttttggagcttgaagaagagaaaagagctgtacagcaagaaagggacagattgttagctgaagttgaaagtctaaatgctgatggacaaacacacaagttgcgagatgcccagctgcaaaaattaaaaacccttgaagcacagtacatgttggtcatacaagacttggacctgcagattctagacctcaagaaaaagcaggagaaccaagttcaacttctgaaggaaaagcaaaagagtgatgaagctgctaagaagttgcaggaagaaattcattctataaaggcacagaaggttcaactacaacataaaatcaaacaagaagcggaacaattccggcaatggaaggctacccgtgaaaaggaactcctgcagttgaggaaagaggggcggcgaaatgagtatgaacgccacaaacttcaagcacttaatcagcggcagaagttggttttgcagaggaagactgaagaagctgcgatggctaccaaaaggctgaaagagttactagaggctcggaaatcatcaggacgtgacaactcaggcatgaatggtacttctcctggctctcatatgactgagaaatcattgcaaaaatggctagagcaagatttggaagtcatggtgcatgttcatgaagttcgaaacgaatatgaaaagcaaagtcaattgcgtgctgcacttggtgaggagcttgccattttaaaacaagaagatgtcatgtctggtgcagctagtccgcccagagggaagaatggaaactctagggcaaatactttgtcaccaaatgcaagacaagctaggatagcatcacttgaaagcatggtgacaatatcttcaaatactctcgttgctatggcttctcaactctcagaagctgaagaaagagagcgtgcattctctgggcgtggtcggtggaatcagttgcgttcaatggcagaggcaaagagtttactgcagtatatatttaacgttgctgcagatgcaagatgccaagtaagggagaaagagatggagatcaaggaaatgaaggagcaaatgacagagcttgtgaccatccttcgacacagcgaatcacgtagaagggaaacggaaaagcagcttaagcaaagagagcaggcagctgtaactgccactacatctccaggaaacggaaatggttcagtgaagcactctgctgatgactccaacacaccattgtcaccagttgcggtgcctgcacagaagcagctgaagtactctgctggaattgtaaatagccccagcaaaggggttcctgcattcaacaaacaacatcttaagatggttcctatggcacagttgcctgttggcaagaaggtttcaatagcagggcaatcaggaaaactttggagatggaaaagaagccaccaccagtggctactgcagttcaagtggaagtggcaaaagccctggaaattgtccgagatgattcgacacagtgacgaaacgatgacaaggactcgacccagaccccagcttcttcctcatagacctcaaagagtgatgtgaaaaaggcttttcttttcttttttttcttcgtctccacatggactgacacggtttacacagctaactacctccacaagggtaacaatgcagctaaaagctccaggagatctccttcgtgcttcgattttacttagccacgggatcgaaaaaaaaaaagtatatgttcatagggtgactgtctttggatgtaaatttcttgtgcctatatagtgagtgtgaatgttagagatgaaaatttagcgagtgagcgagggagggagtggccgttcttcgcgaaagcactgactgagcacaatgcttcatgtttcagcactcatcaactggtgagatgtcatacttgttgtccttctgcatataaggaaaaatctgtcgaaggatggcgtcttgtaaagtcctttctggtgtgcttttgtgatcttgcatgggtatagttgcaagaatgatgatgaaagttgagattttgggtgcttgggcagtgcttattttcttgtccttttttcttttttgttggatacaacactaagattacattggtttggtttgtgttaggagtctattgatgtactacagcaacttgtgcccctatattttggccaaaaatgtaaaaaaaaaaaaaaaaaactcgagactagttctccctcgccccgaattcctgcag

SEQ ID NO: 47735 - DNA, 420 bp, Oryza sativa
  Clone ID: PAT_MRT4530_50475C.1
atggctaccacagtggatggggatggtggcgacggcgaatggcaaggcggcgacggcaaggcggcggaggccgcacgaatccacgccgcgccgcccgaatccatgtcgccactggtggggacggaggcaacggaggtcggccgccgctggatccagatgacagcaacggcaacctcggggacgactggcgacggtgcacacgacgacgacagcggctggcgacctcgacaacgatggtggcgctctggcgtaggttcaagatgctcgtcgtcgtgctctccgccgccggctccccaacaaccccgccacggccccctcctcgccggcggcagcggcccagtgcccgcggtcgaggagcttcgccgtaccatcctggagatgcaagcggcgcacagaagttgtggactcccgtttttataa

SEQ ID NO: 47736 - DNA, 1044 bp, Oryza sativa
  Clone ID: PAT_MRT4530_50476C.1
atggcggcgccgcggtggatagggccgctgcttcttctgctgctgcacttcgtggcggccgtcgcggggaagagctactacgacgtgctgcaagtgcccaagggcgcgtccgaggatcagatcaagcgttcctaccgcaagctcgcgctcaagtaccaccccgacaagaatcccaacaacgaggaggccaacaagcgattcgccgagatcaacaatgcttatgagatcttgacggatcaggagaagaggaagatctatgaccggtatggcgaggaggggctgaagcagttccaggcccagggtgggagaggtggcggcggcgggatgaacattcaggacatctttagcagcttcttcggtggtggtggtggtgggatggaagaggaggaagagcagattataaaaggtgatgatgtgatcgttgaactggatgcttcattggaggacttgtacatgggcggctcactaaaggtttggcgggagaaaaacgtcataaagccagcaccaggaaagaggcgatgcaattgcagaaacgaagtttaccatagacaaattggtccaggaatgtatcaacaaatgaccgagcaggtctgtgaccagtgtgcaaatgtgaagtatgtgcgagaaggtgattttttgactgttgatattgagaaaggaatgcaagatgggcaggaagtttcattctttgaggaaggagagcctaagattgatggtgaacctggagatttgaagtttaggatccgaacagcaccacatgagcgattcagaagagaaggcaatgacctgcacacaactgttacaatctccctgctccaagctctggtcggcttcgagaagaccattaagcatctggacaatcatatggtggaaattggcaccaaggggatcaccaaacccaaggaggttaggaagttcaaaggggaaggaatgccattgtaccagagcaacaagaaaggcgacctatatgtaactttcgaggttttattcccgaaaaccctaaccgacgaccagaagtccaagctgaagagcattctcacataa

SEQ ID NO: 47737 - DNA, 194 bp, Oryza sativa
  Clone ID: PAT_MRT4530_50477C.1
ctcacgcgtacgcatgaacagcgccagcctggtgacgctcacgctgtgagccctcgtcctagacggcatacacatagccttggacgatgacacccgcaacaggaacatccgtgtcctcaccgacggaggagacgaatggacgtcaccggcgtgggactgctgcgacaagctgaagcagtcgccgctcaggatct

SEQ ID NO: 47738 - DNA, 457 bp, Oryza sativa
  Clone ID: PAT_MRT4530_50478C.1
gtcgagtttataatagcacggatcaattttgaaattatgatctatgggtcaaggtgaggtgaaaattttccttctgaaagaaaagtaggcaatatctaccctgatcttgaaaacttggatacgccttcctaatcgtataatttctgtatccgtactgaaagttcacttgctatcctttacatcttttcttgtgtcaagcttgattttggaacaccattttgtcatattaacatcacaaatgtgctagtagtaaatgtcttgattatctcttgtatccttcagtgttcctttgtttgtagttagtacgcatgcccttcagtatgttatttctctgttttctttttcagtacaatggagctggttcacacagcaatcaccactacaggggccgtggaagaggtagaagcagcgcgttttcgcagtcagtaacaaattttactgaagaaattgatttcat

SEQ ID NO: 47739 - DNA, 766 bp, Oryza sativa
  Clone ID: PAT_MRT4530_50479C.1
ttccccttctgttgggtgtttttttatagacatatataatgaaggcgtatataacaaagggagaagctgtttgagggtggctgcctattgatgtaaaaacacgaggcatgtgagatctgcttaacttcagtgcatgtccaaaagcttgcctttaggttcgtgagtgtgccagttgatttgatcaaaatatgtccatgttggacacgactcttatctctaacaaactctaagataccataagtccttgcggcagacttttgcctaaacatatcatattgttggatttggctcaatcggctaaccttgtccaactcggactctgccaatcctggtcgtagccgattcgtactttagccgatccttgctctgtttccggaacgatttccatcttgcatcctactccgctcctatcttcatctccgatactcagattaccaaatttggttgttaacaccgccgcacctccgtgcaagctggaccgcgaggacatcgtgccgccctgcacgccgggcccgcgaggccgccacgccgctacgcctcctgcgtgctagccagcgaggccgccgcctcgcctcctgcgctctggctggcgaggccgccgcgtcactgccgccgcttgctcgccggccaccgcgcctccctgtgcatcgctgccgctgcttccttgcacgcactgccctcgcctggcatatcttgagggggagagagctgtaaaaaggaactgctttggaagctggagtgtcatcatagaagtgttgttgaatcg

SEQ ID NO: 47740 - DNA, 1494 bp, Oryza sativa
  Clone ID: PAT_MRT4530_5047C.1
atggagatggatgaagtcgggggtcgatggacattctctaggacaaatgaaggctacacgagctgcggcccggtagtcgagatgtcatggcacagggttggtgccctgctgctaggggctcagtcctgcctgcctgtcccgggggttccggccgtaggtgggattgggtcggtactcttgtctatggctaggatgggttggaaactatgtcacagcttccgtctgtataccgtggtgatgtttaacagagaaaaaggaaagaatgtcagcgggtatgactcaagtaactcaagttttcaactcaatctgccactggcctcaagagagttaaccagggcacacccttggtccattccaagcatgctgcttagttcacagctaccattggttggaagtcaagaccaaaatcagtatgtgtttgatcgagcctttgccacccaggtcaatgagcttccaatgccagaagagcaggttcccttttgtcatgattgtagagagcaaggacactatgccctgaattgtccatgggtatatgtcaaagaagccccttcccttggtttagcagggcggacatcgctaaaccagcctcctcacaccaagtcaagcttgcagcctagtgtgcaaagtagagagctcaacggagagaatccattgaatcccgggaaatgctttcctcctagcctctcgtaccacgtggggtcacatactaagcaagccaaaggcaagaagagtaagaatcagaagagaaaagcaccgatgcgaactgaagaagaagtacgtaagatgactattaccagcaccgaatggcctccagcagggataactattcctagacgtcaaagaggaaataccttccgaggtgcacgacagttgacccagcacctcctaagccgtggtggcagagtatctgatagtgaagggtcagatcaagtctcctcggatgaagaagatgagtctccccgacatctcggcgaggaagagatggaatccaaagcatgcccccgttgtggagaaattggacacgttgctagcatgtgtctcacactctgccctcattgtgaggaagaccatccaccaggtgaatgtcccacccgcaaggtcacatgttttctgtgcgaaggtacaaaccatgtgcccaaggattgccaactcagtgtgttgttgaccaagaccgcagaaatccaacgaacaaccctacgattgtctcatcagctagtcagctccaacagcaacatcgacgatatcatccacagcaccaatgctcctcccgctgcacctgactctgcaataaatcatagcgataataccttcagcaccaaccattctctgcaccgacagcctcaacaaagaattgtcatcgatggaagaagttgtgtctctccccgacctactccaggccgagccaagggcaatcaacctccggagggcgataccaagcagaagaccgttattcgcctcaaccagcaaccagaaggaaacttctcctgtgaatga

SEQ ID NO: 47741 - DNA, 343 bp, Oryza sativa
  Clone ID: PAT_MRT4530_50480C.1
aatgagacagatcttcttaaaattaagtcatgcacgagtgatacattgatacatttggctgccaaaccagcattaggctgtgaagctgacaaattttcttccttgcaaattaccaagctacgggtaactaacaaaccttatgtgatcagtcagtcccccgattgcatgcaaactccggtcatcatccagaagaaaattcagctgcttcactgcctttagcttctcctcggcaacctagctccataatcttattgcattttgtgtgggtgtgtgtgtgtgtgtaaactaagggggaagtgtacatgcaattagctatagctaggttacgatcaagaacaattaa

SEQ ID NO: 47742 - DNA, 1299 bp, Oryza sativa
  Clone ID: PAT_MRT4530_50481C.1
gcacgaggcctcgtgcccgaggcggcacgaggctctctctctctctcttccgttccaaaattccaacgagttccccgttttgctccgcttcctcctctgctccaggaataatattttgctggagaatagtcggatgcaggaggcgaaaaaagattcgatctttggaggccttgcctctggggcgcccgtcggagcggatcgcttcccgtttgatcctcgggagtattcgccggcgatgagctccgactccagggagctgctcgggatcgatcccccggagctcatcttccccttcgaattaaagaagcaaatctcgtgttctctgcacctaacaaacaagacagatgaatatgtcacgtttaaggttaagacaactagtccaaagaagtactgcgtccgtccaaataacggcattgtggctccccagtccacatccaatgttcttgtaacaatgcaagctcagcgggaggcgccaccggacatgcaatgcaaggacaaattccttgtgcagagtgccatagtgacacaagagctcacaccgaaggatatcaccggagacatgtttacgaaagaatcaggtaatgtggtggatgaggtgaagttaaaggttgtttatactcaacctcacccgacatctctcaatggcgggtctgaggaaggtctaggaagcttgagttatcaagaagcaacaaaaggatctagagaatcagaaacagtaacctctgagccattggccttgatttcaaagttgaaggaggagaagagttctgccattcaacagaacatgaagcttcgagaagaactggatcttctaaggaggcaaatggggagtcagcacggtggtttctcactagtttttgtgctggttattgctattctgggaatcctgcttggttttctcattaagagatgagcgtctgtgatcatatatcttgttccacttttctgtgaaagagttgatagtcgtgggccttgtctgttgtgttagccatttgtaccaactcatgatcgtcttatcttaggacctgattcctcttgtaatttctgactatcaaattccaatcagtagctactgcatccagtcaataagtcgtctgtccatttagcatgtttgagtataagttttttttggtcaattgtattcatcttttgacacctgtaaatatgacacttcccttaacattatggcttgcgatatgtatatgctggatccttgtgaatcttatggagcaggattttcgttactgttggttttcaatatatatgaacagtgttgcttcaaaaaaaaaaaaaaaaaaa

SEQ ID NO: 47743 - DNA, 351 bp, Oryza sativa
  Clone ID: PAT_MRT4530_50482C.1
atggctgccttcaacaaggagatgactagacgtggtgctcgggttgatggcggcagaagcgattggcgatccaatcgatgggtcggacacttcgggcgggtggctcggactttccgattgatggcgttcaatcggatgtcggagcgggtggatcctataggctgttttggaggtgttgacagtggtgctaggttccgctggagatacgaagaagcccaggaggtcagggtcgcggcggtgtgcgcgttttgcgtcgaagccgagctggcggcggagatcagggtgatgccgagaaggagcgggctgagccaggacgtgcaaggttcggtggttgtcggattcgtgatgtag

SEQ ID NO: 47744 - DNA, 393 bp, Oryza sativa
  Clone ID: PAT_MRT4530_50483C.1
atggcgctggctttggaggcggcggcgcggaggacgggaggaggacggttcgcgctgtcttatatctttgtcaccgaattcaggccgaaatttctcttcgtctacaaattcggcccatctatggcaatggcgtgtttggttgcctgcacgtccgtccgagccaggctcaactcgtgcaaatcacaccccggagccaggctcggaggaaacgcggacatcgaccttcgctactcagccaggctccgttcgtgcagacgcgggtgcggggatgcatgcgcggatgcaagcgcggggcagggggccgcttatgcaatatggtttttagttatatatttggtaaaggtaacctcaccctgtaaaattgaggagacgatcggatgggagcctcaatga

SEQ ID NO: 47745 - DNA, 2360 bp, Oryza sativa
  unsure (1)..(2360): unsure at all n locations
  Clone ID: PAT_MRT4530_50484C.1
tcggcacgaggctataaaccgccacacgccctcgtcgctctcgcccccgcaccaccactccctcctcctccatctcctccgctcccgatctcacaaccaccgactcctcctcctcgcgcggcggcggcggcggcgtgagccagcagcagccatggtgctgttctcggtgacgaagaaggccaccacgcccttcgacggccagaagcccggcacctccggcctccgcaagaaggttactgtattccagcagcctcattacctccagaactttgtgcaatccacatttaatgcccttcctgccgacaaagtaaaaggtgcaaccattgttgtgtctggtgatggccgctatttctcgaaggatgctgttcagatcattacaaaaatggctgccgctaatggagtaagacgtgtttgggttggacaaaacagcctcatgtctactccagctgtatctgctgttatccgtgaaagagttggtgcagatggatcaaaggctactggtgccttcattttaacagctagtcacaaccctggtggtcctactgaggacttcggaatcaaatataacatggaaaatggtggacctgcccctgaatcggttactgataagatcttctctaatacaacgacaattactgaatatctcatcgcggaagaccttccagatgtcgatatttctgttgtaggtgtcactaccttcagtggacctgaaggcccttttgatgttgatgtttttgactctactatagattacataaagttaatgaagacaatctttgactttgagtcaattaaaaagcttctggcatctccgaagtttacattctgttatgatgctctccatggtgttgctgggacttacgcaacacgcatctttgtggaagagcttggtgctgctgaaagctcattgttgaactgtgttccgaaggaagactttggagggggccatccagatcctaacctcacctatgcaaaagaacttgttgaccggatgggccttggaaaatcctcaaatgctgaacccccagaatttggtgctgcagctgatggtgatgctgatcgcaacatgattctgggtaaaagattcttcgtaacaccttcagattcggttgccattattgcagccaatgctgttcagtcgattccttacttttcttctggccttaagggagttgccaggagcatgcccacatcagctgcccttgatgttgtcgctaagaatttgaatctcaagttctttgaggtgcctactgggtggaaattttttgggaacttgatggatgctggaatgtgctcaatttgtggtgaagaaagctttggcactggttctgatcacattcgtgagaaagatggtatttgggctgttctagcatggttatctattcttgctttcaagaacaaggacaaccttggaggcgataagcttgttactgttgaagatattgttcgccagcactggggtacttatggtcgccattattatacacgatatgactatgagaatgttgatgctggagctgctaaagaacttatggcaaaccttgtcagcatgcagtcgtccctttctgatgttaacaaattgatcaaggagattcggtcagatgtttctgatgtggttgccgcagatgagtttgagtataaggatcctgttgatggttctgtctccaagcatcagggtgtccggtacctcttcggagatggttcccggctggtgttccgcctctctggaactggctctgttggtgctactatccgtgtctacatcgagcagtatgagaaggattcttccaagaccggcagggattcgcaggatgcccttgctcctctggttgatgttgcactgaagctgtcaaagatgcaagagtacactggccgatctgctcccaccgtcatcacataaacttttcaagagccattctagaatgcttttgaggctacccatgaactttctttatggcctcctgtttgatagcctttttacatctctccccgaataaacgtgtatgtatcaactgttctcgttttcttgccaatactgcgtttctgctgcaggtccggtaaagtgtgcggcgataatgttgtcagttctgaaactgaagagggtactttatataagcgatatatcgatgttttttttgcttataaaaaaaaaaaaaaaaaaaaaaaaaaaaagggggaacagaaaacaattcgcccanaggngcgatanatcaacgggcggngttanaaggcgnacnggnaacccgggtaccaataangctgnggaaccccttggaanggggaaatgnaaggcccccgtgcctccaaaggnngnaanggggggaattaanggaaatttgaaaaccggaaattgaaannnt

SEQ ID NO: 47746 - DNA, 2856 bp, Oryza sativa
  Clone ID: PAT_MRT4530_50485C.1
atggtgctgttctcggtgacgaagaaggccaccacgcccttcgacggccagaagcccggcacctccggcctccgcaagaaggttactgtattccagcagcctcattacctccagaactttgtgcaatccacatttaatgcccttcctgccgacaaagtaaaaggtgcaaccattgttgtgtctggtgatggccgctatttctcgaaggatgctgttcagatcattacaaaaatggctgccgctaatggagtaagacgtgtttgggttggacaaaacagcctcatgtctactccagctgtatctgctgttatccgtgaaagagttggtgcagatggatcaaaggctactggtgccttcattttaacagctagtcacaaccctggtggtcctactgaggacttcggaatcaaatataacatggaaaatggtggacctgcccctgaatcggttactgataagatcttctctaatacaacgacaattactgaatatctcatcgcggaagaccttccagatgtcgatatttctgttgtaggtgtcactaccttcagtggacctgaaggcccttttgatgttgatgtttttgactctactatagattacataaagttaatgaagacaatctttgactttgagtcaattaaaaagcttctggcatctccgaagtttacattctgttatgatgctctccatggtgttgctgggacttacgcaacacgcatctttgtggaagagcttggtgctgctgaaagctcattgttgaactgtgttccgaaggaagactttggagggggccatccagatcctaacctcacctatgcaaaagaacttgttgaccggatgggccttggaaaatcctcaaatgctgaacccccagaatttggtgctgcagctgatggtgatgctgatcgcaacatgattctgggtaaaagattcttcgtaacaccttcagattcggttgccattattgcagccaatgctgttcagtcgattccttacttttcttctggccttaagggagttgccagctgtcactggtctaggatccaagaatctgaacagaaactggacgtttcttttgatcgtggcattgatgtttcaattcacttgctttctgatattatgtcaatatgcaagaataatgtaattctcatccatcaaaggagcatgcccacatcagctgcccttgatgttgtcgctaagaatttgaatctcaagttctttgaggtgcctactgggtggaaattttttgggaacttgatggatgctggaatgtgctcaatttgtggtgaagaaagctttggcactggttctgatcacattcgtgagaaagatggtatttgggctgttctagcatggttatctattcttgctttcaagaacaaggacaaccttggaggcgataagcttgttactgttgaagatattgttcgccagcactggggtacttatggtcgccattattatacacgatatgactatgagaatgttgatgctggagctgctaaagaacttatggcaaaccttgtcagcatgcagtcgtccctttctgatgttaacaaattgatcaaggagattcggtcagatgtttctgatgtggttgccgcagatgagtttgagtataaggatcctgttgatggttctgtctccaagcatcagggtgtccggtacctcttcggagatggttcccggctggtgttccgcctctctggaactggctctgttggtgctactatccgtgtctacatcgagcagtatgagaaggattcttccaagaccggcagggattcgcaggatgcccttgctcctctggtccgaacagggggtgttacattggaaattgggagatcagatcgcatggacgagccgcgcgtcgcccccgtgccatgcctggccctgaagcacggcgctgactcggacaagccagtgctgttcagcatctcggacgcaacggccatcgacaacaatggcggcgtcgacatccccggcctgacgaacggcaacgcctgggtgacgccgcaggggtggatcctagtccgctcggcctcggacgcctccacgttcctgcagaacccccaggatcccgacggcaagatctccctgcctcatcttccccgtgaattgccgagcacctgctcctgccggctctccggcaagcctaacggcagcgaaagctgcatcgtgctcctcgtcgagactgaagaagatgtcactgtactctggtattgccgttttggcggcggcggcggcggcggcgagggtgaggggtgggtgaggcacgagtacgacgtcggcacgcagtgggacatccgcccgggcaaggagggccagcgcgagaaggtgccgatacgctcgatcgccgcttgccggggcaagttctacttcaacgccacgcccgagagcgtcggcgtgctggaattcaccccgacgccgacaacgccggtgttcggctccatcgcgatcgccgaccccctccccggtgggtacggcgtgctgggtgccgcgctggggttcctcgtcgaggccgaggatgacctgtacatggtgcgcctgttgctggaccgggacttcgagaccgtctacgacctcatcgtctacaaaatggatttctccgagcagcagtggcatgaagtggacgacattggtggccgcgcgttcttgctagctccggcctacttcggcgcttcacgtgcggctgatgaatgtgggttggaaaaggacagtgtttacgtcccttacgcacataagaagtgtttcgaggtgtgcaaggtagaagagaaaggagatatcgatgtggttaatctcatcgaagctccagatgcgaagatcgggatgtggatcatgcccactgattag

SEQ ID NO: 47747 - DNA, 355 bp, Oryza sativa
  unsure (1)..(355): unsure at all n locations
  Clone ID: PAT_MRT4530_50486C.1
cccacgcgtccggagaagagaagctcactgctgaggaattacatgccatttggaggaggcatcaggttgtgtctcggcgcagacttcagcaagctttttatcgcacttttcctccacatcttggtgaccgagtacagatggaaggagattgaaggaggggaagtattgcgcatctcagagattatgtttccacaaggctatcacatccaactaattcctcgtacttaacatacctatcttatatattccaggaccgtaataaaaaaaaatgtgtgaatccaacactntgttgcacatcttatnntgcactgtatatcatcctgtatgtatgtgagtatgtcgtcagtttgcatga

SEQ ID NO: 47748 - DNA, 1075 bp, Oryza sativa
  Clone ID: PAT_MRT4530_50487C.1
acaccttcagatgtttcatgagggattatggaaaatatatcttacactgtacttttttctgtgtctttcttttctggaaatactaaggtatgtagaaataaaatctagacttacatgagtgatgtacatggacaacattctacaccaaagaagaagcatccttatgagctgaaagctcttgagattgcatatatgaagtccaataaaccagtccccttgagaaggcctttcccagttaaaagttcaaagtctattaacaagagaaagccaattatagcggctttcccattaattagttcattcttattagtgaaaccaaaacctccgacatcctcatcaatcaccattctcacctcttcgatattgacatcggatgcagtaaatccaggttgtgctttcccactgaatataatctctgcggatccaccggaggtaacagcccccttgatactgatgtatatattctccccatcgattttcacagggtacacgaatagttttctcaatgcaggtgtaagagcccttaaaacagggttgttgggataccattcctttatttcaccagtacgaagatcaaatgtactatctgttgttgggcaaacaatgcagccgtcctgggtgagcttggcgttgaggaggccctcggtgtaggcgccctcggcgggggatcgattctcgacggcgtacacctgctccttgtaccacagcagcaggatctcctccccgtcctgcacgatcacccgccgctccccacgcggcagcgccgccagcggcaccaccggcacccagttcccatccccgctcgcctcccccgccgccgccgacggctccgcccccgacacctccgccgcgcggcaaccgacgaccctctggtggtgccgcagggtggctgtggctgtggcgcgcgggggcggcgaggcggacgcggcgacgcggcggcggtggaggaaggaggaggcggctgcggctgcggcggtggtggtgatggacgccatgtggagaggatgcggagatggcgcgtggtggggttagggttcgagggggaggaggaggccgcgggccgggtgcctcgtgc

SEQ ID NO: 47749 - DNA, 3178 bp, Oryza sativa
  Clone ID: PAT_MRT4530_50488C.1
cacaagcacgaaggcaagcgtctctgatgaggcgcatctcgtcggcggcgacgctcatggccatcctctcgtagggagctcgccgggagcagctgagcccgaccctaatggcggatgccaagcaatcgcgcaccgtgacgcgcgcctcgctctcctcctccgacgtcgtcgacgacgctgctccgtcgagctcctcggcctgcagcagcagggccacgtcgaggatctcctcgatgttgtccgggaacgcgccggcgacgaactccggcagcgtcaggccgtcgcggagctcgccgtccgtcggcgccttcccggagaagatctcgaggagggttatcccgaagctgtacacgtcgccggaggccgtgaccatccccgtcgtgccgtactccggcgcgacgtacccaatcgtgccgcgtatgccgatggtgctctcggtgttcgccgccgcggcgccatggctggccggatcaagaaggagcttggcgaggccgaagtcgccgatgcaggccgtcatgtcctcgccgaggagaacgttgctcggcttgagatcgcagtggatgatcggagggttgcagctgttgtggaggtagttgagcgcgtcggcgatgtcgacggcgacgtcgagcctctggatcacgcccaggccgccggcaccgccgcaccatttcccggtctccgtatgcttcgcacgatgcagccacctatcgaggctgtagttgggcatgaagtcgaacaccagagctctgaactcgttgccctccatgtcgatgctggagcagcaggtgacgatgttgatcaggttccggtgcttgacgctgcgcagcgcctcgcattccgccatgaacgtcttggaagctccgacttgccggaggtcgagcaccttcacggccaccacggcgtcctcgcgcgcgaactcccccttcgtcttcagtgacagggtccccctgtacaccgacccgtacttcccggcgccgacgaggttggcgtcggcgaagtcgtcggtggctttcgcgagctcggcgtacgtgaccctcgggtagtagttgccgttgagcacgctgcgagcggcggcgtttccggttctcgaactcctgatcttgcggcgccaccggagcaaggcgaacatcacggcgaagcaaagggccgccgcgacgacaggcagagcgatcttgaggaagagatgagctcgtcgtgtggagttgcccggcgccggacatggcggcaaccgtagccgcgccgcgccgccgcagagcgcggtgttcccggcaatcctcagcccggtcgtgttcgcgaacacgccgtggactggaacctggccggcgagacggttgtaggacacgtcgagctccatcagcgagctcatggtctcgaggctcgccggtatgccgccggacaggtcgttccgcgagaggtacagctcttgcagtcccggcatcccgccgagctccggcggaatgctcccggacaacctgttgcccgtcaggttcagcctcctgagccctttcagcccactcagagatggcgggatgcttccgacgaacacgttgcgggccaaatcaaggaactccaagctctggcagctctccagctcggtcggcacctcgccggagaagcggttccccgacaacgccatgaacgcgagcttcgtgagctggccgacgtcgggagggatcgggccgtccagctggttgtccgacaagtccatcagcagcgacagcgacgagagggtgaacagctcactcgggacatggccggtgagctcgttgccggagaggttaagcagtgtcagctgatgcagattgccaaggctgggaggaatcgatccgttcagcgagttgccgctcaggtcgagcttgagcagctgcgtgaggtcgccaatggcggatggcaccggcccggccagttcgttctgctctagcagcagctctcgaaggttcttgagcttgccgatcgcttccgggatctcgccggagaagagattggactggaggcacaacgtttgcagcccgacgaggctctcgatctccggcggtattacgccggatatgcggttgccggcaaggttcagcgcctcgagctgcggcgagaggcggacgacggagggcggcatcacgccggcgaacttgttgccgtcgaggagtatctcggccaaggcgctgcagttggtcaggttgtccatgaactcccagccgccgccggcgtcgtcggtcgccgtgagctggttgttcgacagctccagcgacagcgggcagagcgtgccgatctcgccgggcacctgcccggcgaagctgttgttcgcgaggctgagagccaccagcgccgtggcgttcgacagcgacgccgagatcgggccggcgaggaggttgccgccgaggaagaggtactggaggttcggcgtgcgcgcgcccgcgtcgcccgggagctcgccgcggaacgcgttgtcggcgagcgcgaggccacgcagcgacgtcatgttgaagaaccccaccgggatctctccggcgaggctgttctgcgacaaggctaacatgccgagcgccgggaggcgcgacaagccgtcggggatggaaccttccagaaggttctggtcgagctcgagccgaaagatcttcgtcaggttcgccagcgacggcgggatgcggccggagagcgagttgtggctgagccggagcacggcgaggttgggcagcgcgccgagccaccgtgggacgccgccgacgaggttgttgttgttgaggtacgcgacggcgagggcggtgcagttgcggagcgcgtcgggtatctcgccggcgaacgcgttgtcgcagaggctgaggtaccgcatccgccggagccggccgaggccgccggggatgctcccggagaaggcgttggaggtgaggttgagcaccacgagccgcgtgaggttggcgacggccggcgagagctcgccggcgaggcggcccatggacacgtccagcgacgtgacgcgccccgccgtgcagttcacccccggccaccggcagaagtgcaccgtctcgttccacgaccggagcacgccggtcgggtccgacgtcacgccggccttgaacgccatcagcgcgtccctgtcgtcactctccgccgccgccgtcgccgccgccaatggcaaaagcaacagtaacaacaccggtgcaactccaactggcattgccat

SEQ ID NO: 47750 - DNA, 192 bp, Oryza sativa
  Clone ID: PAT_MRT4530_50489C.1
atggcggggccctccactccgccagatccgatgggaggggaggcggtgatccagtgggaagggaggcggcaacatggcagggccctcccctccgccagatctagcaggaggggagacggtgacccggtggcggtccggaggggtggcccagcggcgggaggtggcatgcggcagtgggagagagctggctag

SEQ ID NO: 47751 - DNA, 1193 bp, Oryza sativa
  Clone ID: PAT_MRT4530_5048C.1
ccgcctctcccgcctcgccggagcgtcttccggccgcgccgtcgcctcctccagcatcgcagccgcctcctctcccacggcctaccctccgtttcgcgcggtgaccgccggaggcgcgttcccgccgtcgccctcccctttccctcgcgccggccacctccagccgccttcctctcctcgcccgagcgccgcccggccgcgccgtcttctccctcggcctcgcagctgccccctctccctcggtcagccctccgtttcgcggggaaatcaccggagacgcgccctcgccggcgtccagtggcgtcgccaccacttctccgcctctggccgcctctgccacgtccccggagcgccggccgacgtcgccaccaccttcctcggctccacgacgccgctctcatccccggcatcacctcctcctcgcccgaacttcgccggaacgccgtcgtctccgcgccggcctctccttcctcctcgtcggctcgtcgccccgctgcaccaccaccttcaccaacgtcgcagcggcgtgttccacgctgtcccctcctcctctcagccgctgctgcctgccatcatcgtcgtctccgatcgttctcgccgtcgacgtcccgtcggtcgcccggctcgtcgtctcgcggcgccgcctccgtcatcgtcatcgtagcggcgtgttccacgccatcctcaccgccgtgcagccgctgctggctgccctcgtagcctcctcgccggccccggtcgtcgtcgtcctcgtcctctcgtcgttcccgatcgtcggggcgttcgtccctccgtcaagccgttctcgttcgtcgtcctcgcttcgtcaaggtcgctgcagcccccgtcatcgtcttcgtcctcgcctccgcgtcgtcaagcctcgcgccggccgcgtctcgccttcgtccaaggatcgccgccgaagccgtcccctcgccgttcgcctccgttgtgcccgtctgtctccgccgcgcccgttcgtcgttgtcgttcccgcgcctcgtcgcgtggtggtaaggttccctctccctcgctgccctgtcctcgtcctttcggtgtcgcccatgcccgttgtgcggttgtcggccccgctttcgtcgttccggaggttcccgaagcgtggttcgtggtcgtcgccgaaggttcggaaggccgttctctctgagcaaggcaagtcacatcatccttga

SEQ ID NO: 47752 - DNA, 339 bp, Oryza sativa
  Clone ID: PAT_MRT4530_50490C.1
cacatgcaacctcccaaaccctacccatggcgtggcgcggcgtctgctcacacaccgtactagcagaacgtcgacacccagagcactgctcctactgctgtcaagcgcgccctacgtgcctctgatcctttacctgacggtgcccccagcagggatcatgcggcttaagctactactccaaaacggacatacggcaccctgacgaggtataacggaagacgtgcggtaacaacaagccatggagcaggcgatactgaaagcgcaccctacggacagagcgcgatcctgctggtaactctaacatgggaaaggctgagatggatgaagccagaggacgac

SEQ ID NO: 47753 - DNA, 1251 bp, Oryza sativa
  Clone ID: PAT_MRT4530_50491C.1
atggacctcgacaagtccacctccagcaacgcgtccttgaagaaactgcagaaggagggcactctccccggtcacgggaccatggagagggaaccgggaggtactgaacctgaacccgtcctaggccgcatggttgcgattgaggactacattctctgtggttttcttcctccgccttccgagtttttccttctcgtcttgaacttctacggtctttctctgcttcatctgaactccaactccatagccttcctcagcattttttctcatctctgtgaggcctacattggggtagagccgtttcttgaccttttccgcttttactacaagttgcgctggatggaacccaaaaagtgcattcctcctgacttgtcgaaacttggttctcgatctgcaggtctgagcagcgcaaccgtggagcaccgtgttgcccaggctctccccctgactgacatcatcgggccactcgtggaccaccagacggcggcctcgttgaaggagggcgttgcccaggaggcgtccgacgcagccgttgccgctgctgctgccacaaccagtggcggcaaggttccgaagaaggggaggaagttttcctccgtgcttggcaaccgccggaagacgcccgctccatcggcctcggatgcgtctcgcccgcctctgcgacggcagaggctggtgacgctcggcaagaaggcgcaggcgaaggcggcgcaagatgggtctggagcaaactccagcgcgtctcctgcagtggcctcgaccgaggtcgtggtcatgcctaggagccgcgaggttcgcgaggacctccagaagatgagggagctagtggccggcaacaagcgacaacggcaggggctcgagcaccgtatgtcggacgtcaagaacaacctgtcaaaaatccgtggctcactgcaggtcacctacactggtctgcaccagctcgtcggggagtgcggtgtcacgaccaccatatcggcgaatcccgacgagttctcgctaatgacctcgcttgcggaactggcgacagtgatggaggcgatcccctccaagcacgcgggcaggatcagagaggagacatccaacgggatctataccggggcgtgccacgtccttgcatgtgtgaggctggcgcaccctgaactcgatctccataagatcttagatcagggggcggctagcgacgcgcgcaaggatgtgatggaagaagtcggcgatctaggggagtccgtcctcccgctttttgaagagtag

SEQ ID NO: 47754 - DNA, 301 bp, Oryza sativa
  unsure (1)..(301): unsure at all n locations
  Clone ID: PAT_MRT4530_50492C.1
gggctgccgatttcgagcacgagcccagtcgatgttgctaacaatgcgtcatcgcatcatcatacgagaagaggactcagcaggctcaaggcgataacagaggagcatgagttcggtgcattcactccatccagatacaagaagcttatccaagacgtttataaatagcggcaaaaatcctcttaagtcggcttgcggattaagaataactcaataaataaattgcaagcaattgttttgctgctatgttactgtccatctttcgactaatgatgatatagcctcctctttatccttanaa

SEQ ID NO: 47755 - DNA, 196 bp, Oryza sativa
  Clone ID: PAT_MRT4530_50493C.1
ttctctatccctcctcccctcgcaaacgcaaccttctgtctccttttagggagaagggaaaaggggtttcgatttctccgcgatttccccgcggattcctccccccaccggcctgatcgagctcgcgcgcggcccccccggattcggttcatccctctcacttgcccccgcctgagaagcatggacaaggatcacc

SEQ ID NO: 47756 - DNA, 291 bp, Oryza sativa
  Clone ID: PAT_MRT4530_50494C.1
ttatgatttgatgatcccgagcccttccgggagtgtgccttttataccataagttgccttagtctccaagtagaactcggagacaatgaacccgggccccctggagccaccacccctgccggagccgccggtccgactgccgcccgtggtggcgccgttgctacccgtgccgtcgccaccgccaccaccggaggcgcctcggcgggaccgacccctggtgtactcccacgcgccgcgggactgctcctggagaggcgtgatgcgacggcggaagtagtcgccgaacaccat

SEQ ID NO: 47757 - DNA, 243 bp, Oryza sativa
  Clone ID: PAT_MRT4530_50495C.1
atggagacacaatgcaactccaagacgatgctggacaatcaatcaggagatcggagaagagggaagggcttccgcggcatctgggaggagaatgtggtggtgaagaagatcccggcggtggagaaggatccggctggcttgagagaaaacggatcctggcggaggagaaggttagaagggttcggtggcgccagagatgaggatggcgccggccaccccagcgcgattttacggtccgactaa

SEQ ID NO: 47758 - DNA, 370 bp, Oryza sativa
  Clone ID: PAT_MRT4530_50496C.1
aaaaaaaaacgggggttaataaaaaaaaaccttcccggggaaatagatcctcaaaaattataggggttttaaacattttacaacttacaaggggggggaaaattcccagggcaactatttaaaagaaagctgatggaggaaaggggacccattataacaccgggaaaaatatcgggtatagaggggaaccatttgaccaaattaaatgggaaataaattaaggggatcggttcccgccgatttaaaaaaaacgggacgtttggaacccaagggggggggggcatccaattgcccgggaggcccggtttgggggggaggggtttgggggactggggggggacgccaaggggaaagggggccccaggggggg

SEQ ID NO: 47759 - DNA, 355 bp, Oryza sativa
  Clone ID: PAT_MRT4530_50497C.1
attatatattcgggaggggctttttttgtgtgtatatattcttaactttgttttaacagatcacacccaacgataaatgtagtactcttacaataaaaccggccggagagggagacaagagataaatacatatgtaaaaagagcaaacgccaaagggcatggacagaaccaaacagtaaaacaacacattgtagcatattatgtctcgatacatgatgaacaatatcaaccccgaagctgcatactattatcataggcagcaatgcaccggggcgatacttgatcggaggttatttgccaacagactcctcaaaacctgcggacttgtaggcgaagaagctaatcaactgcacct

SEQ ID NO: 47760 - DNA, 270 bp, Oryza sativa
  Clone ID: PAT_MRT4530_50498C.1
atgccggcgaggcgcctttcgttccagccaccgcgccacctcgacggggagaatcgcaacggtggcaatgatagtgagaagttggcggtgaggagttactggtggtccacggtggacgaggagggaggcgagggcatcggcgtgcggcgcaacgagctgtgccgcctccagtccatgcatgaggcaccttgttgcaccaagagccccgagcgagggaggcagacgggggcgcttgtgatggtgcgggaggagaagggaggaacggattaa

SEQ ID NO: 47761 - DNA, 536 bp, Oryza sativa
  Clone ID: PAT_MRT4530_50499C.1
gcacgaggacaccgtcacaagccaaccccaactaccccaaaattcccccgcgccgcacctccattgccgctacgcgacgcgaggctcaagcaaaggtcaaccgcgcgtcgcccggggcgcggggggatgtcggcggcggaggacggcgcggcggcgtactggctgcggtggcaggtgctcgtctgcggcgccctcatcgtgctgccgacggccgccgcggcggcgctgctcccgcggctgcgcagggcggccgcgcccctccgcgggaccgacctgtgggtcccctgctgggcgcgcctccaccccggctggctcctcggctaccgcgccttcgccctcgccgccgccgttgccctcctcgtccgcctcctcctcgcccatggcgtcgacgtcttcttcttctacacccagtggacctttttattagtcaccatatattttgcgtttgcagctgctatatcagctcacggatgttgggtttactcaaacaaaaacttgaagaaagctgatgaatcccatgaatttcttagtgacga

SEQ ID NO: 47762 - DNA, 1200 bp, Oryza sativa
  Clone ID: PAT_MRT4530_5049C.1
atgaagccccctgcatcctccgccgccgctgccggcgacaagggcggcggggtcgacccgtctctgccgcggttcaagtgccaggagtgccaacgcgcgctcgtcgtcgtcggcgtcgagtccttcaccgataagctccccgctcatgccgtctccggtatgaacgtgtcctctgttcagggcagcgttatgggtgctagcaggatggacaactcttatgtcgtgctatcgaagcaaaatagatcacatagccatggaattcccccacgcccgccaagcgcagggatcccgcgtgccgagccgaaccaaccaacaagagcaatggagggatcatatatagtgcttccacctgctgccgcttccatatacaagacatctgcctctgaaggaggtggtgcgcagttgtcaccaacaagtatgaaccccggtagccctttaccaggaaataattttcactctagcgtgactgtattaaaacgggcatttgagattgctacatcacaaacacagattgaacagccactctgtctggactgtatgaggttgctgtctgataaaatggagaaggaaattgaagatgttaatactgacaataaagcttatgaggcctgtcttcaacgtctggagcaggaaacctataacatcctcagtgaaactgactttcagaaggagagacaaaaggtgattgaggaagaagaaaagaaacttaaagctgcaattgaggaagctgaaaagcaatattcagaaatttgttccgagatgaagtgccttgaaacaaaatctaaacagttcgaagaactggaagaaaggtattgccatgatctcaatagctttcagtttcagtggatatctcaccaggaagaaagagatgcggttttggccaagatagaagtttcgcaggttcatctagaattgttaaagcgtacaaatgttctcaatgatgcattctatatttcacatgatggggtgatcggaacaataaacaactttcgtcttggccgccttcctaatgtacaggtggagtgggatgagataaatgctgcttggggccaggctgctcttctgttgcataccatggctcagtacttcttcccaaaatttgagtatcctttatacagtgacattatttttgctacagtttatttgctggtcattctcttgagaagtaattcatacatggcatttacctccatcaactag

SEQ ID NO: 47763 - DNA, 298 bp, Oryza sativa
  Clone ID: PAT_MRT4530_504C.1
cattatctgacttggctcagcaccgcctggattaggtcttgtgtctgcgactatcagctacgaccagtctgacgataccaagatcactgagactgctgacactatgcagaaatgcaactcctgatgcttcttcgtcaacctcggctcgctgatcaccgtcaccgagctagactacgctcaggacgaccattggcggccgtgggggaacggtggatgcacggcctatattaaagagggcagtggacaggacattgaccatgctaccagcagggtgacatacaatgacgatgctgatgat

SEQ ID NO: 47764 - DNA, 525 bp, Oryza sativa
  Clone ID: PAT_MRT4530_50500C.1
atgcccatgcctcctaccccgccgccacttgctgcctccgcgacggcctgccaccgaaacttcacagccacggccaccacggtcgcctaccaccgccaccaccactcatccccgccgtcagtcaccacccgcccagatccggccggggtggtgtggatttggacggggctccgctgccgtcgccgccatattcgccaccaggtgtcgccactgctactacagcccccgccgcaagccactccccagccagatccagccagactcggcccggatctagccaccatcgccgctgccctagacagcctcccccggccgccgagcgtgggatgggcgagacgaggctccgcctccgccatccttcatggccgcgtggctttgccgacgcccgctcaggcggcggcgaggcaagacgaggagggaggcggggaggaaggtggcgacgaggcgtcgccgctcgtgccgcctagggagggcgacgcgagagaggaccttccaatccctccttctgaggatccttgcggatga

SEQ ID NO: 47765 - DNA, 297 bp, Oryza sativa
  Clone ID: PAT_MRT4530_50501C.1
atggtgatggaggttgatggtggattgggacaaaggaggccacgtggttgtcaccagaaacaccctcgacgctcaccaccagagaaggaaaatatggtgactgaaaaattagatggccccttttctaatattgtaggaatgaaaaacacatggagaaaaacaaagcccgttgggccatgggaagacataaagaaaaggaatggaaatctttcaagaggtgtcagaggttggtgggtgaatatgctgttcatttcactatctttgttggtaggtgaatgtgatatctatgatgcataa

SEQ ID NO: 47766 - DNA, 1788 bp, Oryza sativa
  unsure (1)..(1788): unsure at all n locations
  Clone ID: PAT_MRT4530_50502C.1
gtttggttgcggacccgggtcgacccacgcgtccgggcgcaacgtggcgcgcgctttgcttgcaacggaagcgtggggattataaaagagggggcgcgagatccagatctggcgccgatgcgccccccctccctgctctccctcaccctcgactccgcgctcctccgcatcgcccacctccacgacctctcccgcctccccgaccacctcctcatcgacctcttccgttgagaactatagctgccggtaagctgacagaaaaagtcctgaagttgtttctggcaacggattgcgaggaaatcgccttgcttgttcagttgctcaacattaagcagccgcttgtaccggtccttcccacgaggtgctctgagaagttctagaagtgacactgattaggtcagtcttggttacctgagaaaagatgtctttggaaattcaggacagtgaggtcgacattgtgattgcagcactccagcccaacctgactactttctttgaggcatggaggccatttttctctcggttccacatcattgttgtcaaagatccagatatggctgaggagcttcaaatccctacaggttttgatctcaaggtttatacgaagtcagatatgggagtgcttggagccacatccatcgacttctctggtcactcatgccgttactttgggtaccttgtctcacgcaagaagtatgtcatctcaattgatgacaattgcctcccagcgaaggacaatggtgggttgactgttgatgcagttgcacagcatatgtccaatctgaagacacctgctacacctttctttttcaacacattgtatgatccattccgcaaaggggctgactttgtccgtggatacccatttagtctgcgcgaggggggttgagtgcatgctctcttgtgggctgtggcttcacaatgcagactatgacccaatgactcatgttgtgaagagaaatcaacgcaacacaacgtatgtggatgctgtgatgacagttccacttggtgcgatgatgcctgtgagcgggataaatgttgcattcaaccgtgaggtgctgggacctgtaatgttccctgctctgcggctgcgcaaggaaggaaagcacagatgggatacacttgaagacgtttggaatggcttgtgtgctaaagtggtgtgtgatcgcttacggtatggcgtgaagacaggtcttccttatgtgatgagaagtgatgcagaagcaggtaaggctctcgagagcttgaaagaatgggaaggggtgaaagtcatggacgtcgttcttcccttcttcgaatctctgaagctatcgagtacttcagttactgttgaagactgtgttaaggaactaaccagcattgtcaaggagaaactgggaccgcagaatgcaatcttcgctaaagctgctgatgcaatggaggaatggaccaaactctggaaatctcacggagctcaaagcgcttaggctgaaatttggttatctgttatgagcatatctgatttcgatacccactgttatgaaactgaataaaccgcattcctgtatgctgggaattttctcgttagtgtacgctccaatactcgtgccgttttcaaagacaagcagtgatatgcaaagcaatgctgtgtatcttgtgtgttacatcaggagttttttttaatggtgatttcgttcatagttttcagaaaaaaaaaaaaaaacaaaaaaagaaaaaaaaaagcggcccatggntgcgcctgaaataattttacttgtnccgtttgggatgaatgaaaaaaaaaaaaaa

SEQ ID NO: 47767 - DNA, 472 bp, Oryza sativa
  Clone ID: PAT_MRT4530_50503C.1
ttttgtttttttaatttttttggtttttttttttttttttttttttttcattttttttttttttttttttttttttttttttttttttttttgaaaaaaggaattaaaaaagttaattaaaaaattcccccgggaaaaatatattggaaattctttcggaaaaaaaccaaaggttgggggcactacaaaaaatacaggaaaaaaaacaatgggttggggacttattaaaaaaaattttggttttccaaaaacccctaaaaaaatgaaaactgggctggccccatcatttaattaaaaacatgcttaactccaaaacagatgaaaattttaacagtcgggatccaacccctaaagctttttaaaaaagttttgtgaaccccaataaagccctcttataaacccctacccttattgggaaaaaaagtttttaaaaaaacaaaatttcctttaaaaagggagccccccccccccc

SEQ ID NO: 47768 - DNA, 893 bp, Oryza sativa
  Clone ID: PAT_MRT4530_50504C.1
gcacgcggcctatccttttcctccccccgagtcttcttcgtccactccccctatcctctcctcccaccgcgccgccgcctccgccgccgccgccgcggctccccctcctccccacagccaagatgaatgttgacaagctcaagaagatggcaggtgctgtgcgcaccggggggaagggtagcgtgcgcagaaagaagaaggcagtccataagactacaaccacagatgacaaaagacttcagagcactctgaaaagagtaggagtaaacaccatccctggcattgaagaggttaacattttcaaggatgatgtggttattcagtttctgaatcctaaagtgcaagcttcaattggtgctaatacatgggttgtcagtggaactccacaaacaaagaagctgcaggatctgctgccatcaattatcaaccaacttggtcctgacaacttggataatctgcggaggcttgcagagcaattccaaaagcaggctcctggtgcttctggtgaagaggctggtgccagtgctggagctgctcagggtgacgatgatgatgttcctgagcttgtccctggtgagacatttgaggaggcagcagaagagaaaaaggaatcatgattttgttgcatgtcttctcctgtgaaggattataagttgcgaattgccattagagacctccgctcttaaaaacctctgacctaccttatttgtgtcagtgctcggttttgtcatgtacgaggatttggtccggtatgttggtggaattttacatcaattaaatgcctcttttggttgccccaaaaaaaaaaaaaaaaaaaaaaaaaaaaaaaaaaagcggcgatgggggcccgtaccagtttatgattttgtttttaataatgatataatataagg

SEQ ID NO: 47769 - DNA, 330 bp, Oryza sativa
  Clone ID: PAT_MRT4530_50505C.1
atgggcctatgggacgcgctctaccgcgtggtgatgcgccgcaacgcggtctacgtcaccttcgtcgtcgccggagccttcgccggcgagcgggcggtggactacggggtgcacaaggtctgggagatgaacaacatcggggaatacgcttgcgttatggccatggctctcagatgcaaagccaatggcatgcatatggagataataggaggtttagattgtgatctcagaaggactaaattaaaactgatagctctcatggaacaaactccatgctgtgagacaactcaagataactttgccacatccaacaggactacaggggtatag

SEQ ID NO: 47770 - DNA, 1610 bp, Oryza sativa
  Clone ID: PAT_MRT4530_50506C.1
ctagctccgtgctcttctggtctcgcggagcgcgacggtgcccgggcggaagcggtgcggcttcttcgtcgccagcgcgttcatcccatagggtccctcgacacatttcttgaagatggttccgggcggcaggcggccgtaggtgtggatgaagtagaacatatcgtccccacacccattgttgaggtcgttgagcagcgtgttgtgtgggcacgcgatctccttgaacgcgtcgcaacactccgtcaccgatgccgccttgcacttctttcctagctcggtgaatggccccttcatctcgtcgaaccgcactgggcacatccctagcggcgccggcgccggcgcgttagcggcgcccatcagcttgcgcgaggtcaacttgtccgccttcaggtcggaggacgcgaactctgccgctttagcgtcgaggacgatgcctgccatggagccatcgccaatatgttggacattaagatataaaaagtaaccgtcctgttgccgaccggcactctccttgggctcctcctgctccccataagtggatggctcatcatgttcaagcaccgagcgctgcggctttggcaccggcaaataggggtgggcgttcggtcgcagtctggctggagacggaggcgacgtggtggtggcgttgaggcagaggcgggttcgtggaggacggaccggcggaggcggcgtctgcacgatggaggtcgaggacggaccgacagaggcggcgccggcgtgatggaggtcgaggacgggctggcgcccggcggaggtggcgcgatggaggcagacgggcggagcgtggagggcggagagtggaggcggcgccgtggaggcggaaggcgaagctgcggaggtggaggcggcgccgccgcagtggaggcggaaaggcagagtcggtattgtggaggcggaaggcagaggcggcggaggcaccgtggaagcggaggcgacgcggtggaggcagaaggcggagacgttggaatccggatcttccttcgtcgagggggtcgcgtcgcctcgccgggcggccgtcgcgagcatgtcggatgaggaggtatctgacccgaaggcactcctagaggatcgatcgaaggctaagtgtgtgtaccagtggtatgaatatcagaaatgtgtcaagagaattgaagatgatgagactggtcagaagcactgtactggtcaatacttcgattattggaaatgtgtcgacaaaaatgttgccgagaagctttttgatagcttaaaatgacaaggaaaatgttctctcttgctaccgtttacgcaacagtgagaataatcatatcgtttctgcgccctgtagacatgtcaggtgcttaatatctgtaagaaaaaaagttttgcctgtcggataatacgacagtttttcaaccaccactttacttttatttctgccagaggcattgaactctctacatctgggttcctactgcgttattggctcgtgctttttccctttcggttcataattgatatatccccagattgtgaatgagcacggaatgctgtcatttgccttttccatattgcttctgtcttgttttttgcacgtatgccagtgtctggatttgtgtatcgggtta

SEQ ID NO: 47771 - DNA, 406 bp, Oryza sativa
  Clone ID: PAT_MRT4530_50507C.1
gagtctatctaatcggacagtctagagcttctacccacgtcaagctccttcacacagagggggttcattctggcccagtcaggccagccttaccagtgagctcatgcacacaggcaaacctgcagttcgtgcgacgacagctgacatcaggctactggatcacaccccctgggatagcttgggctacttcaagcacacccaggtggagttgatttgccccaatggaggaagagggctcagtgcactggtgatttgttggtttgggtttagaactcgataggatcactcggaggaatggaagatgctcgtgtggtgactttaaagagaaaaaatcttaaagtgcttgtgatacccgtgacactgctgcttctgtggtgtggtgattgtgaccactgcttgaaggatg

SEQ ID NO: 47772 - DNA, 510 bp, Oryza sativa
  Clone ID: PAT_MRT4530_50508C.1
atgagcaaacaaaatcaagaacaagctaacagtactccattgccatcgattacggatggcatcgtccaaaaagaccagactagtatcttcaaaccatcatttcaaaaattttgtatactgtcctaccaagatggttcggatttgctgctactccttttgaattgggagatagtaaggagaagaagaaaaaaaagagaaaaagtttcaaggagagagatttccaatcgcaaaaaacaactggaaaagtgtcaagagcctcatatgatgacagcactcaccagtgctttggttcgtgtgcaatccttagctaacagttgtcgtgttcttggatgcaaaatgagtcatcaaacgaaaaaccaagaaaacagtactagtagattaaatgttggcaaaccacaaccatcaagtggtggcacagatgaagcagaagaacaatggaattactgtactgttaggttgttagcatctggtaactcggcagcagtagcccagaaggggcagcagattgtt

SEQ ID NO: 47773 - DNA, 666 bp, Oryza sativa
  Clone ID: PAT_MRT4530_50509C.1
ttcctgcagccctctaccaattattcctaatgcaagaaagcaacaaatcctgaatgcctcgatcactcgctcccacttatggaaaattgtgtggtgcttcaattaactgaaaacatgaggctcaattgtccaaccttttcttgtccaaccttttctcatcaagacaggtctgagcttgagttgtttgcaacatggcttctatctttgggtgatggtgctgtccatgatagtgcacccgctgatcgaccggacaccagctaggtggaaattccatcatatctcttactaccggctgaagaaaggaactttgcaggtttgatttcttttgtgtatggttcaataccacatgtatcgtagctaccaagctacttatgtgagcgtgcgattttggcaccaacaaatgagattgctgctgctataaatgcacaaattattaaccagatagccacttaagaaatgtcctactatagctttgatagcattgatgatgccacaccaaactactgcaatgtgtagtctctttatcctccagaattccttaatacagtacacatgagtggtttgccggatcatcatttacaacttaagattagtgtctccatgatgcttcttaggaatctagatccaccaaagggcttatgtaatggaacccgcctcattgttaca

SEQ ID NO: 47774 - DNA, 165 bp, Oryza sativa
  Clone ID: PAT_MRT4530_5050C.1
atgggaatggcgtatcgctcgataggacttcccgtaacccgaaaaggttggttcttcccctacaacccctacccctccaaggcaaaaggaactgaactggcttgcccggaaagaatggattgctacccttggagagctaatggtactggactgatagcgcactga

SEQ ID NO: 47775 - DNA, 792 bp, Oryza sativa
  Clone ID: PAT_MRT4530_50510C.1
atgaacaatgctaaaaagttttataatatgaaacggaggaagtataagatatcttttcgaaatgatggtgtacaagatagaagttgtttaattaaggacttgttcggcggccagttgctggaatgtactccatccgcctccataaaagtgaatttaagactggatgtgacacattacaacgactctggacagatgtatgtccagattcgtagttccaacagagatgacacacctagaatatatcaactgaaatttagtggtgatcgatcgaccagtgtctattcgaattgcgatcagaaaccagacataactcaccatgaactttcaataccggacgaattacccccctcgacccaatcaagagcggttttatcctatgtggcgtacgcgtggcaacccagtcagcattttcttttcttaaaagatgctggggcccacctgtcatatactctctcttctcttccccttctcgcgctctctctctccctctctcggcgaggacacagcgcggcggctacaggtcgtcgtcgtcgcgctggacacggaggccgcggcggcggcggtggcgtgggaagagccggcggcggcgagggacgcggaggccgcggcggtgctggacacggaggctgcgtcgacggcggcccctccatgtgccccccgcgagatggtcgtagcctgcgtccacggcggccccccgccatgtgcccgcccgcctgcacgaccacggcactggcagccacgccaccataccgtggagcgctagcaagagagaaggaagaaaacgagcagaag

SEQ ID NO: 47776 - DNA, 425 bp, Oryza sativa
  Clone ID: PAT_MRT4530_50511C.1
cccacgcgtccgtccacgcgtacgcccacgcgtccgccgacgcgtccggttgttgtctagatgcaagaaagagatcagatggtgagtgcgtggaagcatacatcaggaagattctggatatgctgtggctcgacgtgctgggagggccttgaccggaaacgggtctggataatctccaactggccgttccagcccacccccatgtgataaacagatatggcttacctccaagagggtgatgcggcatactatcatgcgactatgatgcctactacccatgatgcgctgtttggacgcacagcgtttaattggaaagaggttgggcggtgcttctgttggaagcgacattaagttctggccctttaaggtgattgctggacctgttgacacgcctatgatagattgactgtacaagggtgacgaga

SEQ ID NO: 47777 - DNA, 323 bp, Oryza sativa
  Clone ID: PAT_MRT4530_50512C.1
ggggaacctcgaccggggggggaaatgttgtccacatattcaaggttacaacagggcaaaaaagggggggaccgaaacatacccagggaccgaaaccgagacggggacggaaacgggggggagggttgccaacaattggggggggacccaaagaacaggggaaaatgggcgccttggggggggggggggggttcaggttgaaggggccgaatcccttcccgggcaggggggggaaacccttgggggcgcaccccttcttgaaaattcgaacgcacgccgtttccttgaaattggccgagcactgggccttgatgcttgggaac

SEQ ID NO: 47778 - DNA, 424 bp, Oryza sativa
  Clone ID: PAT_MRT4530_50513C.1
tcggacaggatatgtaactgctaatcacgatctctcgcaagaacagttcatgtgaatgttggatgattaatcagagagaaagatgaatactttgtcacctcgattcctgatcttttgggggattttgacatgtggtgtatatgcatacagtaatattacggtgtataagttgatgaattgtgctccaaggggtttaaccttgtgaagctgtttaattagctaatcaatatgttgttttagcataaattaattaactactgtgttagaagaagatggtgtgttcttctgtcctcttctatcattatggttaaaatgattattatatgcatgcatgtatcagggaagacaggctccaagcattaggttaacaaacgccaacttgtggtatttccattactaattgatgtgcatcacctgattaatt

SEQ ID NO: 47779 - DNA, 161 bp, Oryza sativa
  Clone ID: PAT_MRT4530_50514C.1
cccacgcgtccgcccacgcgtccgcccacgcgtccggcgggagtggaggcgtgactgcggtgtgctgctcactagatacggtagggcggaaggtgaagcgttgatgtttaaatgttgcggatgataaaactgaatgatagtttgctttggtcacacattgc

SEQ ID NO: 47780 - DNA, 598 bp, Oryza sativa
  Clone ID: PAT_MRT4530_50515C.1
gcacgaggcccaaagccaagacaaggggagtctcgctcgcttggcacttatcacgaaccatccttccgcctctctctctcgtccatgagctgaggccgacgatggggccgcccgccgcgccgccgtcgccgtcgtcgtcgtctgggggctcgtcgaggcggcgccgccggctcgaacgccggaacgccgcgaagcacatcggatacgacgcctcgaacttctgcgcctacccgcagtccccgcccgccgcgtccgcgcctgcgtccgggtcgccgtcgctcgcctgctccccggcgtgctccctcgacctcacgagcttccggatcggcgggagcggcgacgggtgcagggacgtgcagctgctctgctccagcctcggcctctccggcgtcgacgacttcgccgtccccgtcgctgactgggaggcgcacaaggccggccgctcctccttctcctcctccgcctccacccccaagccgcgcgaggaaccccccgcgagggactctcctgtccgccgcgaggttgccgccgaggaggagccgccctccctgcccgcccccgccgctgctcccgtgctcccggcgaaggaaacgcccag

SEQ ID NO: 47781 - DNA, 573 bp, Oryza sativa
  Clone ID: PAT_MRT4530_50516C.1
atggcctcatccgtgtgtcgcttctctcctcgatggcagtccgtcagggtctgcttcgctcatcgcttcccaacgctcaccacaagccctacttcgacgctgaaacctaatggtcgatgtgctgggattggagatgcttcgaggtttgtcctaggtcgccgtcgcaaactccccttgcagccattgtctggcttccttcgcgccgaggacggcagacaacctagagctaaggacttcaaggactccggcaaatccaaacaagagacagaatgggcatgcaagtttttcatgtgggaaactcagtatgagcagttgttgaaggatatgcaagctggtaatcgtcaagcagggagacttgtgttgaaccatgatggggggaagccatggatgggtcctgttgtgcctgattttagggttggagaaagagttttggtgtacctaggagttttgcaggctctgttgttgctattgatattggtggtggtcattatgaggaggagggctgctcccacgggttacattgtggcccgatgcccctgcacttttcaccccgtgaattccgtcacccattaa

SEQ ID NO: 47782 - DNA, 1609 bp, Oryza sativa
  Clone ID: PAT_MRT4530_50517C.1
ctcgcttctccactagggtttctcgccgccgccgccgccgctcgccgtcgccgtcgccgccggatcagagatgagcgcatccaggccggatcaccggcggcaccacccgccgtttctccgggacctctcgtcgccgatctcctcggccgtgcggctgcccccggcctccctccgccgcgagacgcaaggttccaccaccccgccgccgccgccgccggcgctgctgttcctcgacgacctctcccaccactccccctcgccgaggcccgccaccccacctcaggcggcggccatgagcccctcgcctccccctccccaccgcggcggcctcttctcctccaccccgctgcgctccaatgggtccccctccccggccgcgtggtggtcctcctcgagggaggagatggccagggagggctcgccggtcgatggtgtcgtgcagccgcagcagcagccgtctccgacgacggcgtctgggcagcagtcgcagcagcagaaggtgacgctcatcacgctgccgccacccagggaagttgcgcggccggagatgccgaaggattcgacaccttccgctggccgtgtcgacgaggaggagtgggtcaccgtttttggttttttacctggcgataccaacttggtactgagagaatttgagaagtgtggtatagtcttgagacatgtccctggtccaagggatgcgaactggatgcatatcctgtatcagagccggcatgatgcacaaaaagctctcaccaagcacggtcaacagttaaacagtgttcttatcatcggtgtgaagcaagtggacccatggcagcggcagtacctgaatgagaagacaaatgagaactttcaagttggtgcaacagatccatttccatcacagcatgtagcaccaagttcatttacaactagaaatgcactagcacctttgcctagcaattctatgccaaatggaatcggcaacgggagtggccgtggtgcttcgggggccattgcttcacccacaaaatcagtattgtccaaagttatggacctgataatctgtattgtaccgagcctaagatcatcagggtgtcatactggtatatcacccggtcggtctggagctagtgttgatggtgtttcgctcatcaaatcggactgtctagttaagaggaagaaaaatattcttgatctatgcttaaaactccatcaatattgtcgtgtggctatgagaagtgtacgtatacacgctagctacgtgtacagccgtccagaatctcggaggattacgtcgatgtgccatcattttctagctgtggatgaacactgccacagaaataatccgctgttaagtttgaatcaatttctgcctttggatcaaacctacaccctcttaagtgactgtgaagttagggcgattttttcttcgaaaccggatgtggcagtagttctgcccattcgatttagagaggaaattaaagacgaaccacatgcagctacacacataataacacctatattgatcaaagcaaaatggccgtgtgctctatcagtattaaatcaagcgaaactgcggctaattacaccacatgtccggcatccagggcgccaactaattatcatt

SEQ ID NO: 47783 - DNA, 553 bp, Oryza sativa
  unsure (1)..(553): unsure at all n locations
  Clone ID: PAT_MRT4530_50518C.1
gcacactggaaatctaggcttcagggtttatgacaagagcaaagaacaacaaaaatatcttcagcacttccagttgcccaaagaataaagggcaacctgtctgactacttcgatgagtatttcagaactttatatgagggaggggaggatgagaaaaaaaatatctggcaacagttccctttctgccacagttcaaagctagaatatacgcaagctttacatctactggcattactatttttaatcaaaattacaaacaaaatggaaggcgacggcggttatggttgcgaatgtagcggatcagatcatcgctattgttcttgtggtaaataattgcattactcagttgcttgatagcttctcttttctcttgcaccctagctgatatctcttcttctttctcgncaattgtcttctcaaggtgagccatcttcttcttcgcctcggaagcacttctcaccatttctgacaaaacgttttctttctctctcaacctcatacctagcacatcattcttcttgaccaattctttctgttcagcaagatggtgctg

SEQ ID NO: 47784 - DNA, 107 bp, Oryza sativa
  Clone ID: PAT_MRT4530_50519C.1
atggtgcgcaagcacaagtgcgactggttcggcctacctcgaagcagcaacgtgctggcgcaggtctgcatcatatgcgacgtgaacgcgatgcaagggaggagcaa

SEQ ID NO: 47785 - DNA, 322 bp, Oryza sativa
  Clone ID: PAT_MRT4530_5051C.1
aaaaaaggaaacttaactaaaaatgtttagcatattgcattaatatgtctactatttgatcattgtcatcatagtgttcaatgggtatacttgttgaatagtagttcacagcacgcaaaatcttgcttgtgcgctaaaaacaaacaagatttgaagggagagacatccctctaaatatttttttaagaagaaatcatgaacatattaaaaattgaacatgagactttagggttgaaatcacaccccttatcactgaactatcaagtacatctcctataaacacatggttgcgttcataggaagacgtggagggtggtgttca

SEQ ID NO: 47786 - DNA, 2274 bp, Oryza sativa
  Clone ID: PAT_MRT4530_50520C.1
atgggagagggggcagagcgcgacgcggtgcgcgatcatatcggtggtggtggatgggagtcggtgtgtgacgttcgtggtgctcgcctccaagggcacctgacaggcgcgacgaagaaacctcaagcgcagatcgtcgtcacaagcagcgacggcaagacaacagagaagaaaaacaatccggagtttgatgattgggaggcctcggatcaacaggtccttggctacctcctgtcgtctctctcacgagatgttctcatgcaagtcgcgacgtgtgaaactgcggcagaagcatggacaatcatcgagcaaatgttctcgacgcaaacgagggcgcgttgcatcaacacaagattcgcgctctccaacaccaagaaaggcaatctctcgctcccggagttcttcgggaagatgagagctctaggagatgagatggccaccgcatccggcaagcggtatgacaaggattatattcctgacagtaagaatattgctgcagtagcaacaagctcctatggcgttgataccaactggtatatcaacactagagccactgatcacatcacaggagaactggagaaactcactgtgaatgacaagtataatgggggagaacagatccacaccgccagcgaagcaggtcggatctatatttctcgggatgttgtttttgatgaaacggtattccctttctctgagcttcatgcaaatgcaggcgctcggcttcggtctgaaatactcttgtttccgtctttgtttactagtggggatgacaatgtattacaccatttgactaatcctataaatcctgctgctaatgagtttgctgatgcaaatattgagattgatacagcacattccgtggccacagaagatcccgcagggattgattttgatgcagattcggcagaacaggagcctgacaccttcctgtcgccagggtctgttcacacgcattcgcctggacctcaccattcaggcgctgacacgcggcagcatcaggagacacatgctggcgacagaattattcttccaggaacagctcgtcaggaggcacagggggagcagcggtcatctccctccgccgatctgtcctctgctgatccatcatcatcgctgtcagaggctcttaaagataaaaattggaaaaatgctatggaatctgaatatgatgccttaatcagaaataatacctggcacttagtcccacctcagagagggaagaatgtcataggatattatgaggatactttcagtctagtggtcaaggctgctacaattagaatcattttatctatagctgtgtctagaggttggagccttagacagttagatgtgcaaaatgcttttcttcatggtcatctagaagaagaagtttatatggaccaaccaccaggatttgaggatgtcactaagccacactatatatgcaaactagataagtccttatatggtttgaaacaagctccaagagcttggtttgccagattaagcaacaaactgattgatcttgggtttagtgcctcaaaagctgacacatcattattctttctgcataaaggagatattgctatttttatcttggtatatgtagatgatataattgtagtaagttcctcagagagggcaacaacagcattgttacaggatctgaaggtagaatttgctctaaaagatcttggtgagttacactattttcttggcattgaggtaaacaagacacacaatggcattgttcttactcaggataagtatgctactgatttactaaagaaggtagggatgttgaattgtaaacctgctaccactcctttatctgttagtgagaagttgtctttacatgagggatctctcttaggacctaatgatgcaacacagtatataagtatagttggtgcattacagtatttaactctcactaggccagatatagctttctctgttaataagtgtactagtatggggcttaatatagacaggtctgggtccacacttgtgagtggattctcagatgcagattgggctggcagtgtagatgacagaaagtccactggaggttttgctgtgttcataggctcaaatctagtgtcatggaatgctagaaaacaagccactgtctcaaggtcaagtacagagtcagagtacaaagccatagcaaatgcaacagcagaaataatgtgggtgatcaagttgcagatgggtttactaaaccgttgtcagttcgactactggagaattttaaaagcaatcttaaccttaaacggttatgattga

SEQ ID NO: 47787 - DNA, 473 bp, Oryza sativa
  Clone ID: PAT_MRT4530_50521C.1
gggacataatttccatatggtttggtattggatgatccactgaatgcttacgagcgaaacaccatcaacactagctccagaccgaccgggtgatataccagtatgacaccctgatgatcttaggctcggtacaatacagattctgtggaccaataatgtcacttcggtgcgaaaaacccaacaataagaaatgttatgatcagtaatcctcgatttgccttggaacagccaaaagaataacagccagtacttggtaacaggatttagaggccgaacatcaggtccataactttggacaatactgattttgtgggtgaagcaatggcccccgaagcaccacggccactcccgttgccgattccatttggcatagaattgctaggcaaaggtgctagtgcatttctagttgtaaatgaacttggtgctacatgctgtgatggaaatggatctgttgcaccaacttgaaagttctc

SEQ ID NO: 47788 - DNA, 492 bp, Oryza sativa
  Clone ID: PAT_MRT4530_50522C.1
gataagtatgctactgatttactaaagaaggtagggatgttgaattgtaaacctgctaccactcctttatctgttagtgagaagttgtctttacatgagggatctctcttaggacctaatgatgcaacacagtatataagtatagttggtgcattacagtatttaactctcactaggccagatatagctttctctgttaataagtgtactagtatggggcttaatatagacaggtctgggtccacacttgtgagtggattctcagatgcagattgggctggcagtgtagatgacagaaagtccactggaggttttgctgtgttcataggctcaaatctagtgtcatggaatgctagaaaacaagccactgtctcaaggtcaagtacagagtcagagtacaaagccatagcaaatgcaacagcagaaataatgtgggtacaaaccttattagcagagttggggatcaagagtcctcgagcagcaaagatttga

SEQ ID NO: 47789 - DNA, 988 bp, Oryza sativa
  Clone ID: PAT_MRT4530_50523C.1
aaaatgttctcatgcaagtcgcgacgtgtgaaactgcggcagaagcatggacaatcatcgagcaaatgttctcgacgcaaacgagggcgcgttgcatcaacacaagattcgcgctctccaacaccaagaaaggcaatctctcgctcccggagttcttcgggaagatgagagctctaggagatgagatggccaccgcatccggcaagcggttgacgatgaggaactaatccagtacatcatcactgggttgggcgaagactaaagcgaagtgatctccgccgtgtgcgcacggctagaacccatgacggtgggtgacctctacaatcaagtcctcaattttgaggcccgcaggtctctctatcgggggactcaagaaaacaccgtcaacgtcgccaacaaaggaggtggccgcggcagctttcctggccgcggcggaggagctccacgcggcggtcgtgcctttcctagccgcggcacaagcaatggagcgcgcggtcgaggacgcgcgcaaagtggggcggatcgcagaccgatctgtcaagtttgcttcaagaggggacacaccgccgtagattgctggtacaggtatgacaaggattatattcctgacagtaagaatattgctgcagtagcaacaagctcctatggcgttgataccaactggtatatcaacactagagccactgatcacatcacaggagaactggagaaactcactgtgaatgacaagtataatgggggagaacagatccacaccgccagcgaagcaggtatggatctaagtcatattggcaatactattgttcatacccctagtaatcgtgatatccatcttaaaaatgttctatatgttccacaagccaaaaggaatcttatatctgtacaccgtttagttgatgataattctgcttttcttgaacttcaccgtgattatttctttcttaaggatctggcaaccaagagaacttttttaaaggaacatcacacc

SEQ ID NO: 47790 - DNA, 1084 bp, Oryza sativa
  Clone ID: PAT_MRT4530_50524C.1
gttaagtccatcttactctccaaatatggcaaaggcaaagaaaaagaagaagaaaaaaaaccccaaagcttacttttgaataattggattggacagtcataggaaagaaaaaataaatgagaacatgagcacttctgaaagatcatatggttctaaggatggctactacagtgaggaggaggactcctttctggacatgttggttgcggctttgaaggcaaagctatgtgtgagggcagcacgttgggtatcgcaacaatctggaatggaatgggtgatggagacaatggaaaacccatctcaatgccaagcaattttccgtctgatgccagatcaaatccatgctctgtttgggttacttactaatcgatacaatcttcatggatcaattgaggtatgcccaatggaagcacttggaatatttttgtacatcatggcggtgggcaattcaaatagggccactaataataggatgatggctgctgacaaaaataagccggtagatccaaactttgagagagttcattatcgtgttgttaatgaggaagaatttctgccatttgctgatgctggatggccagggtctgtgcatgaccaaagagtactgacagaagcagtacggagctatccctttgctttcccaaggctaccatgggggaaatattttcttgtggactcaggatatgcaagccggattgacagctccgacactcatttccttacacaaaacccattgtacaatgggtacccaatcatttcagacgctccacctctacgcggctgtgcgtcggcctcagaacagctgctaagcagcctcagcaacatctccaccgacggcctaaccaacacctccgacgagaccggcgctacctccatctccgagtctggcaccacctccatggcgcgagcaagcgaggcgagcgggtcagccatgaccgcgagcgcgatgcgagcggcggcggcgagcagtggcggcgagctcgacgcgagcagcggagtcgagcgcgacgcaagcggccagagaggtgctggctcgacgaccgagcttggtggctgcggggggcttgtcggcggtggaacttag

SEQ ID NO: 47791 - DNA, 408 bp, Oryza sativa
  Clone ID: PAT_MRT4530_50525C.1
ctggtagaaagcttggcaatcctaataaaaagtatatccttacagtgcatatcctgttggcagaatgctttcatataagctttctgttgatagccttgtagtgatgcctagcatgattttttttccatcgatgtcattctatcaagctaggtaaagtggcaccaccatatcatataatatataatgtagcagtacaaccaataaacatggaatttctggcaactgaattcatattaaataatctgaagtaaagaaaattctcttaatagaagtgaggcataattgcatatgatcattagaatataattaggcttttgttaaccgtgccgtggtaaagaagatgaatggtgtcctgcaagatgaatctccctgctgaaactgtgagtacccctgcatattgtttgtgtt

SEQ ID NO: 47792 - DNA, 366 bp, Oryza sativa
  unsure (1)..(366): unsure at all n locations
  Clone ID: PAT_MRT4530_50526C.1
ttttgggggcgatactacatacacttagtgctaacattaagcaatgttcaattctctcgtaggggagctctatgtcgacctaacttggcatggattgttggaaacctaaacatgtgggccaaagctggtgtagtcaacacttcctttgccttcgtacttcttgaagttttcgatgaacattttcgcaagtttcttggcttgctcatcgtacttttcggggtgagaccaagtgctcttgatatcaaggacatgcggatngacgccatccaaatgggccggaacatcaaacccgaaaactggccgccccccctcaactcagtatgttgaacggacccctcccaaatggcatcgatgcatgtttgagta

SEQ ID NO: 47793 - DNA, 1290 bp, Oryza sativa
  Clone ID: PAT_MRT4530_50527C.1
tgcctgcccacgccgccgccttcgccgccgtccgccgcccccgccgctgccccagtggagatggcgcctggcaccaccctcgcccccaagcgccgcaaggcagaggcgtccccttccccttccccttcccctatgggggattcttccgacggcggctacagcgactccgacctccacgacgccgaggaaagcttctactccgcgaggagcggctccgaggacgaccgccaagtttcctccagcaacgacgacgacgatagcgaggaggaggagcaagaggagcgggagatggatgaggaggaggacgaagaggatgatgatgatgaggagatgaatgaggaggatgacgaggatgagggggaggagatgaacgagctcgagaaggagtaccgcacgctccagaccaatcaacaaaatattttggagacattgaaacagcacagagatgacaatgtttcgaaggaccaggcggtcaaaaatcaaaaggaacccatcaggtcgatgttttgtgatcacaatcaggagatagagcaagcttatcttgatctgttgaattcatcgaagcagactcttggttccatgatggagcttcaggaggccttgctggagaggaatcgtgctacaaaggatgtaactgatactgataattcttcagagttgaatggcgtggatgatgagtggtcagatcttcagaaattgcagaaaaggataactccgtttatatatagtgagatagaagcagggtagagggaaacacaagggagatccgggggtgctgcattgaagggaaagttgcttccatgtaatcaaaatataagtgaccaagttactagttacatgagagacccaagcaggatgattaacaggatgcacttgagaaaatctaccctcggtgtatttggggaggaagtgggagagcatgaaaacaataaggaggagaacaatacggaaggtgatcctgaacttgttgacgattctgaattttaccaacaacttctaaaggagtttcttgagtcatgtgatgcaggcgcatctgagtcagcattttatgctctaaagaagcagcagcataaaaagagaaaactggttgatcgtcgtgcttcgaagagcagaaagataagataccatgtccacgagaagattgcaaatttcatggccccagtacccatggttattcctccaatggctccaaaattgtttgagaatttgtttgggatgggaaaccaaaagtcgaccacagcgtgagtgatgtcttgtagcgagtaaaaaaaaaaaaaaaaaaaaaaaaaa

SEQ ID NO: 47794 - DNA, 374 bp, Oryza sativa
  Clone ID: PAT_MRT4530_50528C.1
atggcgcggcgcgcgggttcggctggaggcggcggcgcggcggccttcgggtgggacggcgcggcgggctcggccgaacgcgggcggtgcggcgacgcggcgacgcactgcgggggcgcgggccgcaattcaggggcggggtgcggccggcagcatcctgcgggcgcggccggcgagcggcatgcaagggccccgttcggggcgtcgtcggaagtgcttccggcggtgtgcgggggaccgtgccggagtggccggaattttctcccggcaccgccgtggcgccccgtgcggggcaaggccggggagcggtcgcggtttccgcggtgccgtgaagagcgagttctgaagtcaattgcttttgtcggtgggtgcgt

SEQ ID NO: 47795 - DNA, 950 bp, Oryza sativa
  Clone ID: PAT_MRT4530_50529C.1
cgctttaatgagtgcagaaatacaatccccgaaatcaccgatgcttctgtaattcacgccttcaagtccggtgtcagagatcgctacactacctaggagttagcaacgagacgtatcacaactactcgaagactattcgagattgttgagcgatgcgcccacgttgacgatgcgcttggacgcatgaacgacaagccaaagaccgggggcgagaagaaaccaaccacggacaccaccctggagtttcaaggcaaaaaagaaaaaattcgcagaacgcgaaagggaagctcagccgagtactccagcagaatttgctacccttccagcgccagaccccaggtagcgatgcagggaagcttggggtcccatacccaagttgaaaaaaaaatttttttgggaaaaatggcccttggtttttaaaaaaaatgggggccggaaaattttttttccccgggggggggggggtccccccaaaaaaaaggggtttaaaaaaaaaaaaatttttttgggaaaaaaaacttttaaaaaggggggtttttccccggagcccttttttttggggggggaaccccctattgggaacataaagttggggggggttttcatggacgggggcagttcaatcaccttcttttggccagcacattggacgccatgggaatcccacgtagcgagttgacacccaccgatcaacccttccatagaattactccctagtcttcgtccaaaccaatgggcaaaatcacgctgcctgtgactttcggccaagcaaacaacttccgaacagagcagatcacctttgatgtcgcagaattcgatacagcgtataacgccatcattgggagaactgcacttgcgaagttcatggcctcatctcactacgcatatcaagtgctcaagatgccagggccgaagggaacaatcaccatccaagggaacgcaaagttggc

SEQ ID NO: 47796 - DNA, 344 bp, Oryza sativa
  unsure (1)..(344): unsure at all n locations
  Clone ID: PAT_MRT4530_5052C.1
cgggaagggcctgctaggcctgcactgtctgtatgtcgggatgaatnaatgtggctgactgcatgatctgtctgaggcaatgaccggatgcgatgcgagtgctgattgttgggaaagaggaccatnatatggatgttgctgatgcacccgcaancaatgtgcgtggtgacccacccactccatgtgatatgaatctggtgaaccctgaaggacacgtgtgtgctgcctggatgactgtgcatgcattgatgtggtgaagcactgcatgatgtggtgaagcacacctgtgttatcnataatttatatacagtaaattaattatttaaaaaaaaaaaaaaaaaaaa

SEQ ID NO: 47797 - DNA, 768 bp, Oryza sativa
  Clone ID: PAT_MRT4530_50530C.1
atggcggcggaggccggcagcgcggccgccggcgccgcctacgaggaggagcgccggaagcgggtcctcgagaacctcaagcacctcgaggatctgggcataaagaagatgtccaagagcttgctggaggcggcgagattgcagaagagcactcgtgccagccccaagccgcggaagaagtttgaggttggggccactgaagtgaggcgttcatcgagggcgcgcaactcggtttcgtacaaagagaattttgatgaactcaacagttttctatgccgtagaaggggcagtaggattaggagcacagagcaggggagggattacaccggaagagttgcctcttatgaacagcaacaacgtgctttcaaaaaagctgagagacttcaaaatagtctagaccctgagaacccgtcgtttgttaagaccatggttcgatcacatgtgtccagctgcttttggcttggtcttccaactagattctgcaaattgcatctgcctcccaaagagtataagatggtcttggaggatgaagagggtggtgaatttgattctgtctacattgggaaccgtacaggcctaagtggtggatggagaggttttgcgatgcaccacaacttggaagatggtgattcattggtctttgaattggctgaaccagacagatttaagtatttggtgttagaaagacaagtggattcaaacaaaatcagtgttatactgagaaccagacaaaggcagcgattctgggtgccgatttttgatccttga

SEQ ID NO: 47798 - DNA, 1018 bp, Oryza sativa
  Clone ID: PAT_MRT4530_50531C.1
cactatttagagcatccggcgatgccgcgtacgttgcttgatttttgattgaagaacagcttactcgtagagataaaacaacagataactccgacatgaaattgtcaaatgacaggtgtatgaaacacaggtaaaatgccgtaccccctaggtacaaaccattgagacaaaaagaaaagaaaagaaaagaaaaaagaacatcacatccctcggtacgcagacttcacttcacatagagctagaacactcaggaacaatggtgcagccgctgacactcatcatgcaacaacatcgacatgagatacccaatggatagctccagagcaaattttctcttttgctttctacctacatttccagccaaacggtgtttctgtcttcatgatgaataaaaggcacatttgcatgatcaatcacgaggaatggacgccaggaataggcgcgtcgacgatgagatcgcggtgatgctattcgtatggacgagaggagagctctgaagcagcggtggtgtctccaggacagaaaaaagaaaaagagaagctctattcacatagaccgcagagccgagatggagcgaaaatgccccatgtacctaattcgacccagttgggttctgcaagtgattcatctttttttttcccctagaatgacgacttaactgaaccttctgcttcagaggtttactcatttgtactatcaaagctgccacgagcatttggccactttctttctcttgaattctccccccatgttttggcctctgcgactgcacgctgcctatcagtactccgcgatgattccctcttccttcctgcgtgagcaggactacccatctgtgaacctgtcacatccatgctgtccaagccagctcgtcgaccagagccactgccagaattagtcctgctaacctcagcttcatattttgatgttgtggtgccttctttccttaaatctggagattgttggtgatttggtgagtgaagacgacgctggtcaaaattcgcaccaacacggttaa

SEQ ID NO: 47799 - DNA, 197 bp, Oryza sativa
  Clone ID: PAT_MRT4530_50532C.1
atggatcgatctcggccgtccgttcccgtgaaccgccgccgtgcacccggtccaccattccgacgtttccagagagtccgttttcgcaggagaagaatttgaagagtttcaaggccagcaaggcaagtcacccagatcccaaacaaccctttgagcaggaagagttctacaatgatgctgatggtgtggaggattag

SEQ ID NO: 47800 - DNA, 762 bp, Oryza sativa
  Clone ID: PAT_MRT4530_50533C.1
tagctggaactttaggctgccaaattggttctctacccttcacttatctggggctacccatgggacatgccaagccaagaaatagtggattatgctcctttgcttgatagagtggaaagaagaatgtcacccatcggaacctttcttaattatgggcaacgtctgactctggttaattcggtcctatcctcatttcccacatattacatgtgcacactcagattatcaaaaaaggttatatcacacattgacaaggcaagaaggcactgcttatggaggaaatcatcaaatatcactgaaaagtcacagtctctagcttcgtggaacttagtctgtaaacccaaagacaaaggtggtctggggattatagatcttgaataccaaaacattgctctcttgacaaagcacctggataaattctacaacaaacacaatctcccttgggtcaaactaatatggagaaaatattacctcaatgcagatctacctccacatgctcatacagaaaaatgatctttttggtggaaggacattttcagacttatccccctattcagagcgatcacaataactaaaatcaatagtggagacacgactgttttttggaaggatgattggaatgggactggaaattcactggcagagaggttcaccaccctgttctctttctctagaaatgaagacatctcggtttttggattcttaaatgatcaatccctccaaaaattgttccacctacctctctgcgcaagcaatgtaaga

SEQ ID NO: 47801 - DNA, 186 bp, Oryza sativa
  Clone ID: PAT_MRT4530_50534C.1
atggccgacgcgacgtcgtcgacgttgctgggcatcaactatgctgcatcggcaacaaccatcagcaacgaacgtgctcgcgtagctcgaactcgacaagtagatgttccgtcaccaccacgcgcaacctcgcgcgtgctcgagtacgatttgctcgagccgacctacgccgacgtcgcctcgtga

SEQ ID NO: 47802 - DNA, 211 bp, Oryza sativa
  Clone ID: PAT_MRT4530_50535C.1
cttagcaatcgcaactggatttttatgaggctaaagcagtgcatgccatcttcgcaacagcatgcattacagtaagatcgttacacagttattctacatccggatggccaagccatgaggatactgccgcattctaaacgtcttggcagatacagtcttgtaagggacggagtgcacctatccaagcctagagtgcatgcttgaacgccta

SEQ ID NO: 47803 - DNA, 197 bp, Oryza sativa
  unsure (1)..(197): unsure at all n locations
  Clone ID: PAT_MRT4530_50536C.1
ccgatggttcctttccatgtgggggcggccgatggcgtnactcggtcggcgaccgacgggggcggcgcggggcggcggccggggaacggtggagcggccatgcggatgcagcgtggcgcggcgcggctaggtcggcgacacncggccatacgtaancggcggcgcgggttcgggcgggcnaccggcgccgcgagcac

SEQ ID NO: 47804 - DNA, 359 bp, Oryza sativa
  Clone ID: PAT_MRT4530_50537C.1
atgccgggccgtctcaccgtgccaaggcatcggcccaagcacggtctaactattgagacagcccggcacagtgccaacactagtcgtgccgtgccggacatcaatttccaccttgctgatatcgcggcaccgttgataccggtcaccggagagcgtctatttcacctgcactgctcctgttgtcatccacgaccacactgcatcaatgtcctcgacctctacctgtcgctgacgaccatccaggaaggtcgccctcgcagcgttctaagctgggttccgtccgtgcccaccattgaggtatttgacagcattttgatgcttcgctacttcatggacctttgcatgaccttattcaacat

SEQ ID NO: 47805 - DNA, 130 bp, Oryza sativa
  Clone ID: PAT_MRT4530_50538C.1
tctttttctagcggtgaatgcaggggggagagagcttacttttatggttcacctcgggatgatggcccaaataggcagggtctgcagtgattaaacgctgaatgttgtgtatacaaaaaggagtaatacc

SEQ ID NO: 47806 - DNA, 499 bp, Oryza sativa
  unsure (1)..(499): unsure at all n locations
  Clone ID: PAT_MRT4530_50539C.1
ccggcaccagaggaagcagaactttcaaacaaaagtcgcttacacaagttgatattagattgtgatattaaacgtttgacaaaggattctttacaagaagagcatatccttgaaagtcttaaaccacatagcaatcttcgggagctacacattaatgggcgtgggggcactacttgcccttcatggttgggtgttaacttgtccatcaaaggcttgcaaactcttcgtcttgatggtgtagactggaacaaatttcctcctctagggaagttgttgttgattaatgagcatggtgaggaatccctggttttgtacaacaagagaggagcttttccgaatttaaaagggttggagcttgttggcatacagagactagcaaaatgggttggaaatgattcttgctttgtgttctctctgctaaaggtgctcatcataagngattgtccaggactcacgggngttgccattttcacattccacatgncctcgatcggngcaa

SEQ ID NO: 47807 - DNA, 1258 bp, Oryza sativa
  Clone ID: PAT_MRT4530_5053C.1
aactagtggatccccgggctgcaggcgatcaccggcacaccgctagaggcgccgttgagcacttccgcttccggccaccgcggggtcgccggatatggcccaggcaccagcgcgcgccgcttccgtcgtgcggctcttcgacgcgcactgccacctgcaggacccgcgtgtgctgtccgtcgccccttccctcatacgcgccgccaccgccgccggcgtcgcgcgcttcgccgtcaacggcacttccgagattcgctccggcggttcttcgctgaaacaccagaggcggctgttggggagattggtctggacaaaggttcacatggaaaaaccattgactttggagaacaggttgaagttttccagcagcaacttgaacttgctaaggagttgaacaagcctctttctgttcattgtgtgcgcgcctttggtgatcttctggagatactaaagcgaactggacctttcccagctggtgtgttgctgcattcgtatctaggatctgcagaaatggtgtccagccttgaaattttaggctgttacttttcgttgtccggcttccttacaggcatgaaatccacgaaggcaaagaaaatgctaaaatcaatgcccttagacagaattctgctagagaccgacgcaccggatgcattaccgaaattggatgatatttctctattagcagtacctgtggatagctcaagtgcagataatggagaaagtaaaaaagattctaattcacgggcatctaccacttcaaatgagtctttgaaccatccatctaatatccacattgttatgaagtatgtcgcctcactgcttgaaatatcagaaatagaacttgctgaagtgacatacaagaatgcgaccaagctgttctcttatcatggatccaaagttcacaatgaagtggaagctgtgtgattgggtgggcatccaatttgaaccatgttgttcctctgaaattatgaaccctggtgcgtgcattctgcctctgaacactacccgttatattgtactccctccttttttttttgtttgacgttggttagctcaaaattgaactaaccaacattaaacatttggggaaggcggtagtatattagtaattgcaacataaaagaaagtggttatttcgttaaggaggcactatcttggcaatgttgtctaagtgtgattttacatttcttgagaggagaacagcaggtcagcaaggtatataaacccctattaaatgcaccacgactggcaaccaacc

SEQ ID NO: 47808 - DNA, 496 bp, Oryza sativa
  Clone ID: PAT_MRT4530_50540C.1
tttgactgcacgcgcacgcgtgcgtgggctcggtagagcggcacgccctcgccctttttttttttttttgttttttttttttttttttttttttttttttggttagcccgtaacaacatcttttggtattgaaacccaaactaagaggttggtgggtacaattttaaacaatgaggggacatctggcggttccttttgaacaaacattaaaacaccgtaaacccatggggccattacgcctatcctaatcgaaatggtttaggacattcccaaaagaattttcggccaaccggtaggagtttaacacatattcggggtttgggagaatagttgctaggcaggccgcttaattttggcaaaaaggttgcccccccggccctggagcccgtttgggtaaccccccacattagaaacccggcggttttaacaactgtagtgcaagtaggaggccctcaagccgacggtgtccctaacaaacggccactgtttatttttg

SEQ ID NO: 47809 - DNA, 496 bp, Oryza sativa
  Clone ID: PAT_MRT4530_50541C.1
aggcacaggcggctggatgtttgagctgttgcagtttgtgcgtatgagctagcgaatggagcgtggctagatgtggatccggatctgcggctgtgaagagccacctggatgtgttcacagatgggcagccttctggccctggtcttgctgagacatttcttgcctaatctgatatttctgctgtcattgctactgagtgggcttccacaatctgatcgtggggagagggatgacccccgccaagctgctcgcggcattgggaacacactcacttggacctgctcgggcaggcgttcggatgctccctcacttctggaatacctctggaacccggacgaggaccttgattatcttggaaagaatttgcatggccctgggtgcgcggacagatgtacgtggatcctgcagtcgtgctatacaccgcaggatgctttcttgacttcttgtccaacgtactattggtggacacgctcgtctgtcttgcctactactgagc

SEQ ID NO: 47810 - DNA, 803 bp, Oryza sativa
  unsure (1)..(803): unsure at all n locations
  Clone ID: PAT_MRT4530_50543C.1
ggcatcaaaagaaggtgcatggctgaggagaacatgcncggcatctgcttcgaggtatgtgatgtggttctccacgctgatgctattcacaggggcggtggccaggtcattccgacagcgaggagggtcatctatgcttctcagctcaccgcgaagccaaggctgctggagccagtctacctggtggagatccaggcccctgagaatgcccttggcggtatctatggcgttctgaaccagaagagaggccatgtgttcgaggagatgcagaggcccggtaccccgctgtacaacatcaaggcttacctccccgtcatcgagtcgtttgggttctcgagccagctccgtgccgcaacatcgggccaggccttccctcagtgtgtctttgatcactgggacatgatgacttctgatcctctggaggtgagctcgcaggcgaaccagctggtgctggacatccgcaagaggaagggtctcaaggagcagatgacccctctctcggatttcgaggacaagctctaagaaaaaacccttttggtctcgcatatgtttttgccattaatttacctgttctaatagctgttctactattgttaaagagttataagacaagtcagaaatatgatgtgtttgttacacatcaagtatcggtgttggtagtgttgtgctgtggaactatatattttgctgtctggtgatatgcaacagatatggaactttgataatgtatctgttgatagtttttacggttttctgaatcagtttcagtttgatttatcccccatatataaaaaaacaacaaa

SEQ ID NO: 47811 - DNA, 246 bp, Oryza sativa
  unsure (1)..(246): unsure at all n locations
  Clone ID: PAT_MRT4530_50544C.1
acctgcagcagcacacgagcnccacacaccagcagcagcagcaagtcgatcgatcgtcagcacacacgnccaagatcgagatggnccgtgcacagctggtgttggtcgncctcgtggcagcggctctgctcctggcgggcccacacaccaccatggccgtcatcagctgcggtcaggttaactccgccgtgtngncctgcctcagctacgnccgngnggctccggctcgtcggcggcctgctgaag

SEQ ID NO: 47812 - DNA, 1835 bp, Oryza sativa
  Clone ID: PAT_MRT4530_50545C.1
atgcggcggagcggagccccgccacaagaaaattactcggagagccgcgtgcgtctagttcagataaacctcgcgtacagtgcattcatcccgacagattggaacaacttggagacagctgagtcaaggcctaaatccacgggattaaacaaggttcgagccttcgaggagccaatgaggcgagcatgttctgctgccccttcagggtttcagaagacgagcttgcgaattccatccccctccacccacgaagcaccaaccggcgcgcagcaaaagaccagaaaattaaagccaggagcagaaaacaaccaatcatatcctgttggagtgcgtctttacaaactagagctggagactaaaaagaaccagataagcaaagaaaatgatagcgaggatatcatgaacaccaagaagattaagctgcacgactgccacttcggctcgccgctatgtgacccttcgccggcgccgcacctgctgagctccgccgccgccgccgggctgtcgttccacccggggctcgtgagctcggcggcgcagcaccagcagcacggcgcgggcggctggctgcacgaggagtactacgcgccgaggtcgtcgccgccgtcgtcgcttctcgcgcagacctgcgtcggctccaacgcgaccgcgttctacgccgccgagaacctgccgcagttcgacttcccagctctcggtacggcggcggcggcggcggccaaggcgccgttccggtcgtcggagagcgagctgtaccggccggtcgacccgctgctcctccgtgcggaccactcggtgaggacgtactacgtccggccgcagaagcgggattccggcgagaggacaccattgccgccgccgtcgcagcaacagcatcaggacagaatccacgggctcttcgccggcgctcccaccactcggcttctcagcggcgaacccaaaatccactcgtttccacctcaagtggcggcgaagccgattctgccggcgatggatgcgccgagcctgcagaaccagatggagaatcagctgacaaggaactgcatcggcgcggcaactccggtgacccccaccggaaacctcgccggatcaggtgcgccgagcaagacgcggatcaggtggacgcaggacctgcacgagcggttcgtcgactgcgtcaatcagctcggcggcgcagacaaggcaactccgaaggggattctgaagctgatgaattcggatggcctgacgatctaccacatcaagagccatctccagaaatatcgcatagcgaagtacatgccagcgtcatctgaagggaagcaactggagaaaagagcaacaggaaatgacatgcagaatctggaccccaaaactggaatgcaaatcacggaagcactgcgtgttcagctcgacgtgcagaggcgcctccatgaacagctagagattcagagaaatctgcagctgaggatagaggagcaggggaagaggctgcagaagatgttcgaggaccagctgaaggcgagcaggagcgtgatggaaccgcaggagctggacgacgtcgtcgccttcgccgccggcgacggagacgacgacgcgttcgatgacgtcgacgtgcagctgctggccgtcgctggcagcggctatgacgacgccgggttccagtccaaaataagctaggacagccttttttgcgttttgtgttttggcactttgatttgacaaatattgttctggttcttcgacgtatgatacgcacaatgctattttttgcccgtgtagttggcgaaagtttcaaaaagatattttaagaaaaaaaaaaaaaaaaaaaaaaaaaaaaaaggggcctcgtgccg

SEQ ID NO: 47813 - DNA, 365 bp, Oryza sativa
  Clone ID: PAT_MRT4530_50546C.1
agtatgcatttttctaggattagatagtccaacagggggaaatgaacatgcttattccaatacatgtcagctaccagccacttatttcggtacataggatatctgcatctatagttctagacccatccattaaccacgtatcaacatgtcacccaaaacaggcaggaggcgagaacgaagcagagagatcccttatcggtcttcacagtcacacacgatacaatggaaccacagatcgtgtgcaactcgacctcttccacgccaggtagtaacttgcaagtgtcctgagctagactatctacacaaggttcaccatatggtctcattcaacttgcataattaaaactgggacgcgtaaactatat

SEQ ID NO: 47814 - DNA, 269 bp, Oryza sativa
  Clone ID: PAT_MRT4530_50547C.1
ggtgccacccagtggcaggcaggctacaggcaggcagactccaggcagggaactggaggaactgattggtgggtgcccatcgtgccaagttatcacttagctatccagtgtcagaatcatcttatcatcgagtcagatgtcagttatcagtgtccagtggttctctcgagtcgagaagccctctatccatccatccagtgttaggtgttcttcgtccgtgatgttcaccatgaattgagtgcgctttggttaaaaaaaaaaaaaaaaaa

SEQ ID NO: 47815 - DNA, 177 bp, Oryza sativa
  Clone ID: PAT_MRT4530_50548C.1
atggatgccccgctcctgcggagcctcccctccctggggtgggcgctcctctcattgtctcccgcgcccgcgcggatgctctccacggcagcatccgacgccctcgttgagatcaagccaggcgagataagcatggtctccgacatccccaaggagcacctccgccgcaagggatag

SEQ ID NO: 47816 - DNA, 1084 bp, Oryza sativa
  Clone ID: PAT_MRT4530_50549C.1
atggccccccgccgccgcgcccggagcagcggctgcgaccaggtcgccgtcgtcgacctcgtcgacagcgacgatgagtgcaagaacaagcgtcctcgaagaaccatcaagccagcagcgaggaatgtttcgaaaagtgcattgccttccggtcttgatgccctaaacccaaatagaagaacgcttcgcactgcatcaagcaacagggacaaaaagaataaagacaaattggatactgagatttttgaattatatctggaggatctttggaaggacattgatgaagaaaagaggagtgcttatgcatactttgactcattgtggtttcacatgtacactagcggacataataaatcaaatgtccttaaatggattaaggctaagaaagtattttcaagacaatatgttttcgttcctattgttatatggggacactggaacctccttgtcttatgcaactttggtgagacagactacctgggtactgacaaaggaccacgcatgctgctgctggattcacttaaaacgacaaatccgacaaggttgcgatcgaatatcaaaagatttattgctgatatttttaaaactgaagagcgggaagagaatgagcaattcattaacaaaatctgtcttgagtttcctgaggtgccacagcagaatggggatgaatgtggtatatatgttctttactttatctactgttttcttcagaacaaagcactgggagaagatttcagccagctgtttgatgatccagaagaatgggagaacttccgcaagggtgttcattcattccgagaaatacaacagcaaattacctgttcatcttcctggtggcacaacctgaagaagtttgaagactgtcaagaatttgtttgtcatacagttcatgccgtcaagaggaagatggctatttctcagatacaaagcagcatcagtgtcaacctagcgctgtcgagatctttcgttgatccaggctattgatcagccgttccccccgtttgtgctttggctgccttcatcctgcagcccctgtttgccgtgtggtctcactgttgattcattccttaaaaaaaaaaaaaaa

SEQ ID NO: 47817 - DNA, 446 bp, Oryza sativa
  unsure (1)..(446): unsure at all n locations
  Clone ID: PAT_MRT4530_5054C.1
gcgcgtgcggaccaccgtagcacgccgcctccccgcccagcgacctcggcaactccggcgaagatgggcgccttcaggttccaccagtaccaggtggtggngaggggcctgccgacnccgaccgacgagcaccccaagatctaccgcatgaagctctgggctaccaacgaggtacttcctccgcaagctgaagaaggtgaagaagagcaacgggcagatccttgccatcaacgagatttttgagaagaacccaacaactatcaagaactatggcatctggctgcgttaccagagtaggactggctaccacaacatgtacaaggagtaccgtgataccaccctcaatggtgccgttgagcagatgtacactgagatggcttcccgccaccgtgtcagattcccttgcattcagatcatcaagactgctactgtccactttaaactct

SEQ ID NO: 47818 - DNA, 195 bp, Oryza sativa
  Clone ID: PAT_MRT4530_50550C.1
gactcatgacagtatggactacaagttacatttgacctcaaatattgccgacttaacggctggggtggaacgcccggtagacaacaacaccaatcaatatgacgagtacaatctatcctgagaagatctgatcaaattgcgcatgacgctcggcgagaccaaaactgacactgaacttgatggccaaccagaaag

SEQ ID NO: 47819 - DNA, 680 bp, Oryza sativa
  Clone ID: PAT_MRT4530_50551C.1
gtttgcaccatcgtcgtcaagcccgccgcgtaggcgcccctctccgctctgtactacgctcacctcgccaagctggctggagttccggatggagtgatcaacgtcgtcccgggattcgggccgacagccggtgcggcactctcctcccacatggacgtcgacagtgttgctttcactggctctgctgaaatcggccgtgccatcatggagtcggcggcgcggagcaacctgaagaatgtgtctcttgagctcggcggcaagtctccgatgatagtcttcgacgacgccgatgtcgacatggctgtcagtctgtcatcccttgcagttttcttcaacaagggagagatttgcgtggccgggtcacgcgtctatgtccaagaagggatctacgatgagtttgtgaagaaggccgtggaggctgccaagaactggaaagttggagacccttttgatgctgccaccaatatgggtcctcaggttgacaaggtccaatttgagagggttctcaagtacattgagatcggcaagaacgagggagcaaccctactcacaggtggcaaacccactggtgacaaaggatactacattgagcctaccatatttgtggatgtcaaggaggaaatgacgattgcgcaagaggagatcttcggcccggtgatgtccctcatgaagttcaagac

SEQ ID NO: 47820 - DNA, 759 bp, Oryza sativa
  Clone ID: PAT_MRT4530_50552C.1
ggaaaaaatcaactccggacaattggacatcactttgtccacgcaaagcgcccaggggtctttaaaacatgcagggaaaagaaaagctttttttaccaggggcaaaagggcccccccacaaacgggggaaaggcatgcaactagctggccctaaaaaaaaaaacatttttttgtgttaagcagggtttacttcctaaaatcagtaaatgtcacattctcggaccaccgttgccatgcactacaaactgattacagatgataagcaagagaaccaatgaaaaaaacagtaaaaggccgcgaggggtaattcgatggtgtcttgtaacttctgtgtcctcagagaatgtgacattgacaacactaccgggaattcacaaaatgcacatgtcgttgcatggaaggctcaaactttgtcagaggcatcctgtgatgtgccctcagaacttttgaccgcagccagcttctcagctaatctttgctccagtgccctttgacccctttctcttcttctgttcgcctcaatagaatctgaaccaggcaaaggtgtggtatccaatgtctgacctctagcatcagccctttcagatcttccacaaagaagcctgtggaatatcgaagctatcggatccagcacaggtcttagaaattcagggaagaaacttgagaaagagaactcctcgcttgggtctcctttcaagcctgtctctaatctcctttgggaagtaccgcagggttccacctgcagcccggggatccact

SEQ ID NO: 47821 - DNA, 969 bp, Oryza sativa
  Clone ID: PAT_MRT4530_50553C.1
ctgtccacgatgacagctcgagccggccagctgcagcccatccgctacatcgtcgtcagcaccagcaggagcaggagcagcatggaggtcgccactggatctgctctcaccacacgcgagctcgccgccgccgcagggctgcacgtcgcttccaccagacacggccagccgatctcgtgcaatgccgcagacggcagaaccccggccggcagctaccgccctccgccctttctacgccgtcatcgtcatcaccgcagctcgctcaactgccatcgccattgctgctgggcacttgcatcgggcaggatgaggaatcgatttggggctagggctgttggatttggggccgccaccaccaagcgccgccgccattcgccactgccaagcgccagccgccgccaccacttccccagccgcaagaaggcgcaggccacagcgccgtcgaacccggccttctccacggcggacggcgtcgcctccaaggacctctccactccgccgccgcaccccaactcctccctctccatcaacatcttcctcctcaccctgtcgccgcgcctgcacatctgcccgcgccgtgccatcgtcgtcgtgtggatctccatcgccatcgtcatcgtcgtcggcggcggcgtcgcctccaaggacctccacatcaacccggcccaactcctccctcgccagccgctaggtccctcctcttctgttgccggctggatgaaggatagcgtcgccgcttgcatccgtgtccgtcggccgccgcctgcctcctccgcgctcgtcggccgccgctgccgcttccgcacccgccggctgcctcccgccgtcggccacttgcgccgctcctccgccccttgcgccactcgtaccactccttcgatcgcaccgcccctcgcccagccgctcttccgactgcgtcgcccctccgatcagccctcgtcctccccgtcctctcggcaccggcggtag

SEQ ID NO: 47822 - DNA, 740 bp, Oryza sativa
  unsure (1)..(740): unsure at all n locations
  Clone ID: PAT_MRT4530_50554C.1
tttttaaaaaaataaaaaatttaatttatatattatattttatatatttttatttttgttttttatttttttaaattttatttttattttttatgtggggtcagaaaagaaaaacaaaaaaaaaaaaaaaggggaagggcagaagggaaacaaaacccccccccaaaaaaaaggggggggggggggcaaaaccagggccaaaacaaaaaggaaacccaaaaaaagggcaaaccaaaaaaacaaagggaggccgggcccccccccccaccggggaaaggggaaacccccaaagggcaacaccaaaaaccggaaacccttcctctgggaagcgccggccctccccggggggccgtacccgtgggggggggtccccggcacccggggggggaaaagttccttcggggtccggggcttccccccctcccgggcttccccggcctggggggcccaacacccttccaaaattttaagcgcccggggggggggggggaccccccccctaggaaaacccggaacctggggaaaaaaccccccttgggggcccgccctatccgggggcccaaagggcaaaagggggggggggcccgcaaaaaggccccggggaacaaanttttatttcgtggggggtngggaatnggggggaagggggccttcccgggggggttgtttagggcctttttgccggaagacgttggggggggcccgccccggggggggggggggccnccgcgggggggggg

SEQ ID NO: 47823 - DNA, 591 bp, Oryza sativa
  Clone ID: PAT_MRT4530_50555C.1
atggcggctaccaccaccgcaacagccaccagatccactcgcggctaccaccagcgcttaatccgccgtgggagggtggcgagaggggttggagggagccgtcgccactaccagatccacccacaactgccatattcgtgctaccgcctccagtctagctgccgcacgctgctgccacctccatcctggggaaatatcggcgacgccgggtgccgctacttgctcgccatcgtccaccacgtcactggctttgttcgctcgcgaagggaaaaatgggtgtcgcggagccactactcgctcgtcaccgtccaccgcgtcgccgactactactcctctctcgttgccattcatcacgctgtcggctacagcgtctctctagcttgccgctgctgtttgggcaccgcagtccgccatcgtgcccggccatggccactcctggctgctctacaaattgcaggcggcgtcctcggcgataagaccaagcaggcggaggcggcggcggcgacgacgactgaatggtcttctgggtcgaagatggagaacgaactggcgctacgaacgattgcacaggacagagctgatcctgtgtga

SEQ ID NO: 47824 - DNA, 469 bp, Oryza sativa
  unsure (1)..(469): unsure at all n locations
  Clone ID: PAT_MRT4530_50556C.1
ggagtggagaggagtagagccgaatccgcggcggaagtgcacggcgctccgcgccaccgccggccgagcccgcgctgaaatccgcgagcggcgagcggcgcacagcatatgttagtgtggactggaatctcgatgtcaatgaaaggtacttccttgttttaaccgttaagaggtcaatggccagtctgagtgacaaatcctggaaaagatgtcacctttcttcctgtaacctattgaaaagcagaaagatcaaagacttaccatcttgaggatttgtctgactgaagctttagccgtaggcccaccaangagcatgaacagaagtagcagccactgcatctccaccatcgtaccacacggtgtcaaccctccacgcaaatcaaattcacaccggaggatagcaaaatctgctgattgttcttgtcgaagagcactgtgcagtgaacaagctcgagtagatgccaaatgg

SEQ ID NO: 47825 - DNA, 657 bp, Oryza sativa
  Clone ID: PAT_MRT4530_50557C.1
atggcggaccactttgcagtaatggccggccggttgctaacggaatcgactgttcagtctgccattgatgaggcctctgctgctgccatgccttcttcagtgattgcttctgaacataatgatgttcaagatgagagggagaagagtggtgttcttgtagaatgtagaatttgccaggaagaggatgatcagacctacatggagaccccttgctcctgcaggggcagcttgaagtatgctcatcgcaaatgcattcagaggtggtgtgatgagaagggagacaccatatgtgagatatgcttacagcaatacacaccaaactacacagcacctgcaaagttgtttcaacatggaagaaactcaattttcttcagaactcctggttacattcaagcacaggtcatgcaaaacacagaccgaagtgctgctgcctcaacaagctacgatcctgaactccccaacccaaaaggtgtaatctattgtcgcatagttgctctaactttcaatgctgctgaacaatccatgcagcttgtttcacactgcaatctaaccgtcagaaaatgcaattgccagatttcagacgctgctgctgcggtgaacatcaaccagcaggcgccacagtcaccgcggcgacagcatgtcatcagcatccaataa

SEQ ID NO: 47826 - DNA, 1724 bp, Oryza sativa
  Clone ID: PAT_MRT4530_50558C.1
atggttcttggagcctggttgatgagtccagcctccgtgccatggagcctcctggcgtacggtgtcctgggcctggtgctcctgtggcaggccggccgcctgctgcacagcctgtggtggcggccgcggcgtctggagctggcgctgcgcgcgcagggcctccgcggcacgcgctaccgcttcctcaccggcgacctcggggagcacgggcggctgaacagggaggcctgggcgaggccgctgccgctgcggtgccacgacatcgcgccgcgcgtcgcgccgttcctccacaacgccgtcagggagcacggcagcgcgtgcttcacctggttcggcccgacgccgaaggtgacaatcaccgaccccgacctggccaagggcgtcctgtccaacaagttcggccactttgagaagcccaagttcccgactctgacgaagctgttttcggatagcctcgccaaccacgaaggcgagaagtgggtcaagcacaggaggatccttaacccggctttccatctcgagaaactcaagctcatgcttccggcattttctgcatgctgtgaggagctggtcagtaagtggatggagtcccttggttctgacggctcgtacgaagtggatgtctggccggagatgcagatcctcaccggagatgtcatttctcgcactgcattcggaagtagctatcttgaaggaagaaggatcttccagctgcaggccgagcaaactgagcgtctcctgaaatgcatgcagaagattgtcattcctggttacatgtccttgcctactaaaaacaaccggaagatgcatcaaataaagaaagagaccgattcgattttacggggtctagttgacaaaagaatgcaagctatgaaagaaggtgaatgcaccaaagatgatctactgggtttgttgcttgagtcaaacatgagacacacggaagaggatggccaatcaaaccatggattgacaatcgaggaggtcatcgaggagtgcaagctgttctacttcgcgggaatggagacaacgtcagtgctactcacctggactatcctgctcctaagcatgcacccagagtggcaagaccgtgcaagggaagagatccttggactattcgggaaaaacaaacctgaatacgaaggcctgagccgcctgaaaatcgtgacaatgatcctctatgaggttcttcggttgtacccaccagccgtaaccttcactcgaaagtcatacaagcaaatggagatcggaggtgtcacttacccggctggtgtgattgtcgagctcccggtgttactcatacaccatgacccaaacatctgggggagtgatgcccacgagtttaagccagataggttcgctgaggggatctccaaggcatccaagaatccgggcgcgttcctcccattcggttgggggccacgtatttgcataggccaaaacttcgcattgcttgaggccaagatggcattgtgtatgatctttcaatgcttggagtttgagcttgcgccaacgtacactcatgcaccacatactatgataactttacacccgatgcatggtgcgcagattaaaattagagctatatgatcgtttcagatcctagcatgtttttttcgaggacctagcgtgttttattagtacaactcttggttgtgagttgtgatatttgtacctttggaataaaagtggcataggagatatatctaatactccctccgtttttt

SEQ ID NO: 47827 - DNA, 357 bp, Oryza sativa
  Clone ID: PAT_MRT4530_50559C.1
tcgcacgaggattaacaaatgagcatgcatttgttcttgttctttttattcgttgtcaatcgtcgagctgatttaaaagtcagtattaaccaagaaggttggtacactgttcttgtaaatgatcaaccatggcttcgttcatcgcgtacagctttatgctgcataataaatggtattcatccgatgatcatagtttaccattgagaaatatgagaacaagtcaaggttatgaaccacgattaggtaattggagtgaaacacaattaatttacgaacttactcgtaatggaaaaacgagttcagtcgttggtcgtattcgtgaatggagtgacatttcagcaattacttttcatttgg

SEQ ID NO: 47828 - DNA, 672 bp, Oryza sativa
  Clone ID: PAT_MRT4530_5055C.1
ctaccgagcggtgccccagtcgtaggcggtgagcgcgccacgctcctcatccaaaacgtagatggtctcgccgttgtccaggggcgacgccgccgcggggcccttccaaccggcgagcatgcggggcggcatgtccttccaacgatcggcacggaggtcgaacactaagcgctccttagcgttgcggctgcggaggttgaccatgcagaccttgccgccggagcagacggcctccgcggctgaaccgcccgtcgcgcagcggcaggatcggctcccacgcggcggtgggcggcgaggccgcggggtcccacaacgcgccagagcgggtgacggcagggtcgtagcctgcgcggacgcccccagtgacaaacacgcgaccgcgcgccgcgccggccgcagaccagctatccctgcgccgctggtcaccgacggaggtggaagaagggtagaaataagggtatttttgtctgttcgggtattatagtaagtaggcttcaggtgaaaccactcaggtgccgccgccgattcatcgccgtcaccgatgccgcgcatctccgcattcagccgccgggcacatttctcgcgccgccccccatccccatgatccaaccgccatcgccaggaacatctcttccccgttgccgatctgatccgtccgcccccgacgtccat

SEQ ID NO: 47829 - DNA, 243 bp, Oryza sativa
  Clone ID: PAT_MRT4530_50560C.1
ggcacgagaccattataaaatgagaggaaatatattgagttataaccttggtggtatgggttgtagtgctgggattattgctgttgatttggctagagatatacttcaatctaatcctggtaattatgctgttgttgttagtactgagatggttggatttaattggtatcatgggaaagaaagatctatgcttattcctaattgtttctttcgtatgggttgttctgctcttttgatttctaa

SEQ ID NO: 47830 - DNA, 434 bp, Oryza sativa
  unsure (1)..(434): unsure at all n locations
  Clone ID: PAT_MRT4530_50561C.1
aagcttccaacacgtatctatttatcatgccaccacaactccaaaactgaccatcttttgtttcttaagctgacattgacaaaagaaaaggaaggacaataccattcattagcctgtataatatttaaatagttaggtttaaatgatggcaataacatagattttgtcctcaacaaagctttctaaaaaaacaagatgaggtgtctaaagcattggcagcttgtgagctatattttatttatgatgagcaagaataacctgaagggatatcttgccatatttattcactggacatttatcangangatgactgtttctgaaattctaatgaacctgaaaactgatgataaaggtttgtttattctgtccatataatatatcttntttctaaggcagcagcgaggggggganacatttgctgcaaataccattct

SEQ ID NO: 47831 - DNA, 577 bp, Oryza sativa
  Clone ID: PAT_MRT4530_50562C.1
tgagcttatatacacaagattttccgcggccacggcggtggcgcgacggcgacggcgacggggaggaggggcccacgacggcgggcggcggcggcggtgtggggtgcaggtgccggtcgtgcgcggcggtgatgctcgcggactgcatcgcgctgggttgctgcccgtgcgcgctggtcagcatgctgagcctagcgctcgtcaaggccccgctcgccgtcggccgccgctgcgtcggccgcctcaggagccggaggcggacgctgctgcacaacaagcgcgtccgcgacgtcgccgccacgtcggcggccgccgccggcgagaagaaggcgatcgcgaagccagaagaagagctagaagccgccgacatcgtcgccaacgacgacgacaccgcgtccgccgccgctgccaccgccggcgcgggtgccccgaccgacgaggacctggcgtggctggaggagatgtaccagatgggtcactggggctttggccgcgtgtccatctcggggaaaaccccgtgagaagcgcgcgcgccacgcctcgccgcgccggcgccggatcggatcaagtccacgcg

SEQ ID NO: 47832 - DNA, 325 bp, Oryza sativa
  Clone ID: PAT_MRT4530_50563C.1
ttttactctacccctttctctgttaaaagttctattttgtggatagtgtaatagccaatctaaataaccttttaactttgtgccaatcacattgtcattttgcttattctttcttttctttcttgcagatcaaatcgtgagctgcgtgagcaagattttacctctagaaagcttaggttgttcattattgttgcagagtttgtgtttccgtttgttttatggtaccagtgacatttggtatataatcaagaagaattagtggaggacttgttgtatgaattgccttgggttctttttaatatgagaattccataattgttctgtg

SEQ ID NO: 47833 - DNA, 1122 bp, Oryza sativa
  Clone ID: PAT_MRT4530_50564C.1
atggccaagaactatcccttcacggaccatgaaatggcacttttcccaattgagtaccagaggtttaagctcaagcagaggtcgaggtggcagttccatgattggaagttcgagagtctcaccgggttccgcttcctctttgatgaagttaggaacctcatttttcagaagggcctcgggagattcgtgagggggaactgcctggaaatggaaggtccaggttgtgactcaattgttgaaggttcttctatcttggacacggatgcctccggatgcggttcatcagattgcgtcatgaaggaagtatttgctagaatcctcgacttcatcaccgacagcttcggcaagatctctcttctcgtctcggattcaaatcagtcaggaggagaggacatctctgtcccgtttggtctcccgatctcggcagagatctattccaagatattctcgcccgagtcagtttcaaaccactcggacgggggcgtaattctccaacagcttgggtccgtttctacggaggaactagaaggctacctcagctctcccggtattgactctcgtcatactgagatcaccgattacgacggttccaactatgatgacgacttcaacaccttcaacaatctcgaagacatcggcgacaacctcgaggacaattacactccacttttcttcggtgttttcatggccgacaacgagaccgagaagcaacaccatgaacagcaagaacgtgagcgcccggaaaaggaggctgaggaacgacgactgcgaactttggcatctgggcgccgggcacaggacgacgagacgaacccaacggtactcaccctcgaaccaaacgacgaacgacgacggccggcgacgaggtctagccgcggcgcggcttcggtcgacggcggcgacggggctccggtgaccggcgacagcggggagggagcggccgagcttgcccacacctcggcgcaccttacggcggtgacggagaccgacggcaacggcggaggcgacggcgcgacacggccgaagttcggccggcggcggcggcgaacttggcggcggcggcggagaggatacggggcacgggagaccacgggagaggggcaaacgaaagaggaggactag

SEQ ID NO: 47834 - DNA, 601 bp, Oryza sativa
  Clone ID: PAT_MRT4530_50565C.1
ggagtttcaagccacgtctccgtacggtgcgaagaagaaacttgcttagctagaacatgtgctatcttattgcaagatctactaatataagaaattgaaaactcttgagaagcacgacacacttcctgtatctcagtcagaagaccagcaatgatggatcgctgtgactccctcttcatccatagcggcacaaattgaaggcagtccgtctccaccgccactttgctcaggcctaaacatgctgcaaattttaggccatctaggcaagcccttgcttccatagaacaagcatcataaactgtcataccaagtagctttcccactttggaaaccacccagttcatctctgataacacacgctgtagcgccttgtttagtgtcctcacgaaacgctgcatcagtattcaatttgacccatccttgtttcggcctcttcagcttgattatgcctcactgataataggtaatagggtatcgatgttttgatttcacatcgtccaaaacagtttgtgagaacaaataaagcggttagaaacttgtaacattcactgtagtgatccaaaaacatagggacatggaagaaacatgaagcaactttcgc

SEQ ID NO: 47835 - DNA, 1361 bp, Oryza sativa
  Clone ID: PAT_MRT4530_50566C.1
gggtaatgctccagcaaaaacattttattgaaatatacaactacaagagaattgtttaccgcgcggtctcaaaattaataaacaaaaaaaatattgcttgccgttgcgtagaacagtacaacttcagttagtacaagcatgctgttgagtgtgaagtcggtgttgactctcaactctcaagaaagcttggtcgcgatatcctgacaacatattctagttaccacttgaatttgatgctgcattcgttcttccatggggatgattttcagatttttcaagtaaaccacgtgttcctgtccatgttacacagcatgatctgtggagcgtgcagatgctaatgttcttttctcaagaaaatccggttgacaacatccagcggcagcgcgtaggcagggtccatgggtttcactccagggtactccatcagtgaaagccctgcaactccaaagtatgtgtggtagatatctaccgcattatctggtctatctgaaattccaccattttccttgtcctggcaatttagtatgaattttgcaagtttgtccttgtcaatccagtgcactctatcaatcattatcaagcttgagagcacccaccaggagtagcacacatcagcaagtttctcaggccgtccattgagccctccctctttgcactgacgctcacaaagccaccatccaaggagatctctatcaatgtgatgcaacgagccagtgattgcgagagcgccaacacaacaaaatactcctggcatagctccaaatccaccatccaagttcttacagcttacaatataatcaacagctttttgcacattaattttttccagccgatgcagcaaagagagggtgcatattgcaatgtatgagaatctagtgtccacttcaccccaaatatcaccagaaaatgatccatcttcattttgaagcccagcaatgtaatcagcaaccttatcgacatcgagagcgtcaagccgatcaaagaggcacaggacctgcacggcgctgagcgtgtagaggacatgcgcgtcatgcccaacgtttcccccgaatccaccggattccgggtggtagcaggacatgatccactcgatgacctcgtcggcttccacggcgcggagcttgtggaggaggtcgagcgtggtgaggccccagtacgcgccgttgagccggatgtgctccatcaccagcgactcgaacgagtccttcctcttctccacggtgacgatgtagcggacgtgcttctccgccgccagctcccctccatcccccatggctgcgccggttggaccagaagcttcgcgagggcggcggcggaggcggcgacggcgaggagagcggtgtcgcgaacgaccctcgtgc

SEQ ID NO: 47836 - DNA, 606 bp, Oryza sativa
  Clone ID: PAT_MRT4530_50567C.1
atggcggcggcgagctcgggttgcagcagcggctgccagtccggctggaccacctacctggacgatcactcgtcctactcctgcgggaccgcgcggttccacggcaaggcgcagcagccgtactaccactgcgactactccgaggacgcggaggaggacgacctgtccatgatctccgacgcctcctccggcccacgccagcagtgctccaccggcaacgacgacggcgccgccgccgccgccgcgcatgccaatgcggcccggaggagaggcaggcgcatggagcccaccgccaggcggcagagcaagacggccgccggcgcgtctcttctcgaggacacggcaagctcgccggcgttcttcaagtacaccaatgcctccgctgagggcaatggctatggctatggcggcgtggcctctccggtgatggagatgggcaatgcggccgacttctcctgcgccttctccgccacgacgggcttcgagagtcccttaaacgggattcccctgagtggctacctgcaaatgcagtactccactacacatgtcaaggcgattcccgcaagacaggcgcgcagaggtggggttgagaagaagaggcggtga

SEQ ID NO: 47837 - DNA, 215 bp, Oryza sativa
  Clone ID: PAT_MRT4530_50568C.1
gcacgaggggtgcagccagcccagcgcggtggttgttgggtggttgccttctcccctccccaccagcggcatcttctcactgatctctccacgccgatccatccatccaccgatcgcctcccctctcccgcactgatcagtagtggtagagtgagttgaatcttggccgtgatcgatcttgctgggatctgataggggtgggagtcagtggaggg

SEQ ID NO: 47838 - DNA, 628 bp, Oryza sativa
  Clone ID: PAT_MRT4530_50569C.1
ggtagcataaaaagtaattttgtgagtggcagtattcatcactgacggtctattaaaggatatggagtgataattccacgccacaagaaaacgccctatagggcttaagacaaaagcgaaaccagtatatccaagccacaaattgtgattgttctaaaaatgtttatttttgacatagactacactaactaaatattctaacagctcccttaactcattcacccacaccctcccctcgatgagaagcacaagagaacaccgaaaccaccaacccaagtcactgaactggtcattcttccggccagtccggctaaagaagtcatcaactcgaaatttcaacggatgagctgcaaccaccaccgaaggaacgcgaccttttcatgccactttcaacaattctgactcttccatccatctgggagttgtattcttgaaattgtgattctgaatgttgaacaaactccgtagttatctgttgcgttgttggactaatcgcttggtgagcagttgtttctggccttgttggattgtttcttgcaactgaacccttgaccgatatcactaatgatcaacggacgcatcatgtctgcaatagtttgtgttgagatcccataactgttagcaggac

SEQ ID NO: 47839 - DNA, 900 bp, Oryza sativa
  Clone ID: PAT_MRT4530_5056C.1
ccccgcccggggcgccgccgccatctcggaccaccgtagcacgccgcctccccgcccagcgacctcggcaactccggcgaagatgggcgccttcaggttccaccagtaccaggtggtggggaggggcctgccgacgccgaccgacgagcaccccaagatctaccgcatgaagctctgggctaccaacgaggtccgcgccaagtccaagttctggtacttcctccgcaagctgaagaaggtgaagaagagcaacgggcagatccttgccatcaacgagatttttgagaagaacccaacaactatcaagaactatggcatctggctgcgttaccagagtaggactggctaccacaacatgtacaaggagtaccgtgataccaccctcaatggtgccgttgagcagatgtacactgagatggcttcccgccaccgtgtcagattcccttgcattcagatcatcaagactgctactgtccactttaaactctgcaagcgtgacaacactaagcagttccacaagtcagatatcaagttcccactggtgtacaggaaggtcaggccccctaccaggaagctgaagacaaccttcaaagcttcaaggccaaacttgtttatgtgatccaagtcgccttccatgttctgtaagatctgccagtatggtgtagtcgtagttcagaacttaagatgaatcttatccatatgaagcctgtttttgaaaagttctggtaggtccatgctgcggtctctctaggttctcgtatcgtatcctggtatccttttcttttgctttgtgatcatctgatgcctcatactgacaattcccagtttgcgttgatattggtttactgaaatattataacgttgctattttgctcactgcttatggtagcccaattgaat

SEQ ID NO: 47840 - DNA, 1057 bp, Oryza sativa
  unsure (1)..(1057): unsure at all n locations
  Clone ID: PAT_MRT4530_50570C.1
cggaattcccgggtcgacccacgcgtccggggagcagttaaacttcctgccagtgttcttgagtcgaaggttgagtacagaccttatgctcatgctgttggtaacttctccgaatgtagatctgcagcactaacactattgcagaaaggaagagaggaatgtaggtaccatgaatgccgtatgggagcagcatttgtaccagaccttgatgggaaatttttagcaacagagaatttctaccatacttccaagttctttaggttgcgttctaagtcttttctttctgacctgatgctggctggggagaaattttgccgaggagactggtcaaagattaaaaaggagtaccgttctttcaatgagggggagctgcttcttttttgcttttcctcagcatatattgttgctttgctgcatgatactctaaaggtcccgctggatgataagaggattgatgttgcgaatcaaattggcggtgtgcctgttgactgggcattgggtgctttcattgtgcagaaggcgtcaaaccagacagacatgctccatcctgagggggagaagatctcgcctgaagacggtatacgacatggagaaaggccggtacatcataaccagggtgagacgatgagccttgcgcgtcgtcgctgggatttggtggagctcctgcggtggggtgccagtgatcgtgtttgtaaattctcgtagtatatacacgatatctgctaggcagccatatatatggttctgacgttgccttgctgaatgaatcttgactgtaaaagcagccctttgtagttaatacaacgatgtgggttgcttttgctgcaacggtcgtgtttccagaatgctcaatgatgtactggtctcaaaatattgctgatgacctgatgtatagcagcaattttgtctccgtaaaatgtacccaatgatttctcgagctgactagctaaaatttgtaaatgtacatccagagaacaaattatcaatatcaggtacacaaccaccaaaagagagagttttgaaattttgttcnaaaaaaaaaaaaaaaaaaaaaaaa

SEQ ID NO: 47841 - DNA, 1667 bp, Oryza sativa
  Clone ID: PAT_MRT4530_50571C.1
cggcggccatctcaggcatcgagtcgagcgaagaagccggggggggcagcgagcagtcgtagcagcgccgctcctctctctccatccgtggcctcttccctcttccccccgcgaactgctaaaactcattgtattatacatgacaatggcatgcttcaacatgtgttttcactatgtttcgcattttttttatgtttcaattgttgtttttatgtttctccatgctggtgccccgctcgccgcgtcgtcgtccccacgagtacggcgtcgtcatcgacgccggtagcacggggagccgcgtccacgtcatcgcctaccgctcctcctcctcctcccccgcctccgcgctcccgcggatcgactgggcgcgcacggcgtcgatgaaggcggccccggggctgtcgtccttcgcctccgacccgggcggcgcgggccggtcgctggcgccgctcctggagttcgcgcgccgccgcgtgccgccggagagctgggcggagaccgacgtgcgcctcatggccaccgcggggctccggctgctcgacgccgcggtggccgaggctgtgttggattcgtgcagggtgttgctgcggggatcggggttccagttccaggacgattgggccaccgtgatctcaggagctgaggaagggatgtatgcatggattgcggcaaattatgcgctgggtaccctaggcgatgactcacaagatactacggggataattgagcttggtggagcttccgttcaggtaacttttgttacggacaaacctttgcctccagagttctctcatactctgaagttcggtgatgccacatataatctgtacagtcacagctttctacaacttggtcagaatgttgcgtacgaatcactccatgacatgctgagcacacctgggcataaatcaatggcaacacatttaatttctcaagctaagtacagagatccttgcactccaaggggattttcgcccatggagggagcagttaaacttcctgccagtgttcttgagtcgaaggttgagtacagaccttatgctcatgctgttggtaacttctccgaatgtagatctgcagcactaacactattgcagaaaggaagagaggaatgtaggtaccatgaatgccgtatgggagcagcatttgtaccagaccttgatgggaaatttttagcaacagagaatttctaccatacttccaagttctttaggttgcgttctaagtcttttctttctgacctgatgctggctggggagaaattttgccgaggagactggtcaaagattaaaaaggagtaccgttctttcaatgagggggagctgcttcttttttgcttttcctcagcatatattgttgctttgctgcatgatactctaaaggtcccgctggatgataagaggattgatgttgcgaatcaaattggcggtgtgcctgttgactgggcattgggtgctttcattgtgcagaaggcgtcaaaccagacagagtactcagattcatcagttccatatctaaacagctattactattctgggttggttccactcctcttcatttccgctgtcgttctatttacagcatgctccatcctgagggggagaagatctcgcctgaagacggtatacgacatggagaaaggccggtacatcataaccagggtgaga

SEQ ID NO: 47842 - DNA, 282 bp, Oryza sativa
  Clone ID: PAT_MRT4530_50572C.1
atgcggcgacggcaagcggcaccgacggcggcgaccggcgagaagacagcagtggccgacgacgcgggcggccggcggcgcgggcggcggtgcattgcggcgacgcgcatgtggggagcagcggcgcgcgtgagaggaaggaaagaggagggagttctcaccgaggggttcggccagccgggggaaaggcgacggcgaacggcggcgacgagcgaccgggagacggcgacgagtggagaacgaactccgggtgggcctaaggagcccaacgagggggattag

SEQ ID NO: 47843 - DNA, 2037 bp, Oryza sativa
  Clone ID: PAT_MRT4530_50573C.1
atggccgcctcctccgcgcagctcatcttcctcctcctcctcgccgttcttgccgccgcctcatcgcgcaacgacgaggaggcccgcgcgctgatggcgctcaaggagagcctggacccggcggggcgggtgctgggctcgtgggcccgctccggcgagccctgcgggggctcgttcgtcggcgtgacgtgcgacagcggcggccgcgtgacggccatctcgctgcagggccgcgggctctccgggaccctccctccggcgatcgccgggctccggcggctcaccgggctgtacctccactacaacggcatcaagggggctatacccagggagattgggagcctctcggagctcaccgacctttacctcgacgtcaaccacctgaccgggccactgcccgtggagattgccgccatggagaatctccaagttttgcagctgggttacaatcagttgacaggcagcataccaccccagttaggcaagctcaacaagcttgctgttcttgcacttcagtccaaccagctgactggggccattccagcaacactcggcgacctaacacagcttgcacggcttgatttgagcttcaacagtctttttggttccatcccttcaaagattgctgaggttccattgctcgaggtctttgatgttcgcaataattccctttctgggagtgtcccagcaggattgagaagactgaatggtgggttccagtatgtgaacaacaaaggtctttgtggagttggcttcagtttgcttgatctttgtttgtcatcggaggatggcttgaaacctagtaaacccgagccttttggcccagatggtactgtcaagacaaggcaagttcctcaatcagcgaatacggacaatcactgtgagggatctggttgctcgaaatcttcgaatgcatctgtgggagtgcttgttgttggtgtggttgcagtggtgattggcgccgcattctgcggaatatttgcattctcatattaccgccggcaaaagcagaagattggcagctcactggaggtttctgatagcaggctcagcactgaccattaccaacagaaggaagtttgccgaagaagtgcttccccacttatcagtgttgagtactcgaatggatgggaccctttgtctggtggaggcgttgggtcatccggcgaggttggtgatagctttaggttcaaccttgaggaggttgaatgtgcaactcagtacttttctgaggttaatttgctgggtaaaagtggctttgctgcgacatacaagggaattctacgagatggatctgttgtcgctgttaagagtctcaacaagacaagctgcaagcaagaagagtcagatttcttgcgtggcctcaagatgctcaccgtgctgcgacatgagaaccttgttggcttgaggggtttctgctgctccagggggaggggagagtgcttccttgtctatgattacatggttaatggttgcttgtcacagtatctggatgttaaggagggttctggtgctaatgtccttgattggccaacaagagtttccataatcagaggcattgcaaaaggagttgagtacatgcacagtaagaaagctaacaagccatcagtagtgcaccagaacatatcggccgagaagatccttctcgaccaccacttaacgccacgcttgtcggtcccagggctgcacaagctccttgctgatgatgttgtcttctcgaccctgaaggccagcgcagcaatgggataccttgcccctgagtacgccactacgggccgattcactgagaagagtgatgttttcgcatttggtatcgtcgttctccaagtcatcacaggcaggagggctgtctcacagctgaaggtcagcacagttgccaatgaccttgatagcctgatcgatgagaacctcaatggtgtcttctcaagaactgaggcagctaagcttgctgccattgctgcactttgcacaagcgagacggcgagccagcgtccaacaatggaagctgtggttcagcaactcagcaactgccactga

SEQ ID NO: 47844 - DNA, 288 bp, Oryza sativa
  Clone ID: PAT_MRT4530_50574C.1
cccacgcgtccgtataatagataatttatatttgggaaagtatattggatagtatatttgttttgatatgagagaaggcaaataatgatgtttgacagatttgagtggagcggggtgctgcactaccaccatattcttttgaggttctatgttggaaattgaaattttgcaaaactaatttctatgaatggtaatacgatttcattgagcactcaaagatagcttgaatcttagagaaaacgatattcatttgagagaaggagatcttgaacttgaaagtataggact

SEQ ID NO: 47845 - DNA, 1544 bp, Oryza sativa
  Clone ID: PAT_MRT4530_50575C.1
ctcgtttcttggcggcgatggagatggagagagccacagaaatgggggccaagagcggcgcccatttttagtcagccacggcgagggaagaggagccaatcttggccaagccaccctctccaagaatcctcgctgatctctctgcgtgaggcgctcaattcgatttcttggggggtcgattcggatttcttgggatgcagtgggcggcgctgagctcgccgccggcaccggcggcgccggcggcggtgtggatggggcggagggcaagaaccgcgaggttgccgtcgccggggccgcgccgggtggtgctggccgccgcggcgtcgtcgtcgtcgccgtcgccggatgcgaactcgagctcgaactcgaactcgccggggagtggtggcggcggcgaggaggtggaggaggagagggaggacgcggcgcggatggagaaggcggcggccttcctgatgcggagccagaagtacgccatgctcaagcagcagctcgccgtggccgcccagttcgaggattacaaggaggcggcgaggctgagggattcgctcaagtcattcgaggaggaggagccagttcttcgtctccgccgatcgctcaagaaggcggttgaggaggagaggttcgaggatgctgctaagtacagagatgaactgaagattttggctccacacgccctcctaaaatgttctagtgatgctactaccctggggattagagttcaagtcaggagtgtttatattgaaagccggagccagcctttgaagggccagttcttctttgcctacagaatcagaatcacaaataattctcagcgccctgttcagcttctcagaagacattggattgtcactgatgcaaatggaaggacggagaacatttggggtgtaggtgttgtgggagagcaacctgtcatatttccaaggactggttttgagtactcatctgcatgcccattaaacacaccaaatgggagaatggaaggtgattttgagatgaagcacatcgacaaagctgggtcgtctacattcaatgtcgcaattgcaccattctctctgtcaatccttggagatgacaacgatgatgttctcctctaaatgtgattgggtatcagaatgagtttgaataagatgatgtcaccagcaaggaatttgcataatacacaaacacgagtagtgctgttagtgatgtggctagagttctctactggaaactcctgcgaatgcaaatttttgttaagctagctgtgaattgggaaggtaccaaagttcaagatcagagtatcagacaggcaaaacatggtttggtgaaatattagagttaatttagacacacacacaaaaaaaaactacactactgtaaattgaggtatatgatggacttgtgtgtcatctaacttttgaatgtacagcatagaactatatagagcttgttgagagtataagctgcatggaactcttgtattatctcgaaaaaatgattttgtaatgttatagtttcataaatatattgcactaggatttactggtcaaaaaaaaaaaaaa

SEQ ID NO: 47846 - DNA, 447 bp, Oryza sativa
  Clone ID: PAT_MRT4530_50576C.1
atggctgtatcgagcactaccgcaagtgcctggcctctcccctcttccccgcctaagtggcaagcaccgccaccactagcttctcacaacttcctcgctacggcgaggcgacgagtgccaccaccgccgttggctgagagccgcaaggcagagaaagccgagctcggtgttgggcggagcagccccgacgcggacaagcaaacggatactaagctcgagctcgaggatgccacaagatctggcaagcagacggaggcggcggctacagcttcgcccggcggtggcggctgcggctacggcctcgcccggaggcagcggctgcgaccaaaggcgacggttgcgcccggaggctgcgacacacagcctggaccttcatcatcagatacagaagatggcgatgatgatgctacaatgcgatcctccgattctgtctcatactgcctctaa

SEQ ID NO: 47847 - DNA, 339 bp, Oryza sativa
  Clone ID: PAT_MRT4530_50577C.1
atggcctcctggaaggtgccatacatgtcggcgaagacgaagaagccgtcgagaagggaggaggcggtagatgagctagtggtttgggcgacacgcttcttcgggaggaggagcaggttggcaagcgcggcgtggagcgcgtggaggtgggcgaggcctgcggggcggtacggccgtgttggagagccagaagagaactgttgtgatgatggcatggaggtgggagagcaacgggtcggagcgacaaaggaagttgtccgagtagccaaggagctacgaggcagcgaccgtgcagcggccgacgaagttgcagaggaggaagcccgagtcgtttgctga

SEQ ID NO: 47848 - DNA, 186 bp, Oryza sativa
  Clone ID: PAT_MRT4530_50578C.1
ctacccatgccccaagccatcgccgaatttgctgcctgcctccagcgaccgagctccaccgcctgtggcaaccccaccaccttgagcctccagatccaccacccaggccctgcccttctccttcaccaccggggcgacggatctagcagttccgagcaccaccgccgccgttgccgacggatccat

SEQ ID NO: 47849 - DNA, 182 bp, Oryza sativa
  Clone ID: PAT_MRT4530_50579C.1
agcagcacctcgccatggttcgtgtggaaggctggaagcccacctggttgtctgccgccgatttggacggggatgctgctcccgtcggcagtggcgatgctgctggtccggttggaggggcgcggtccgcggtggccgtggacagaggtgtgacccacgcgatttggcgcgagatgctatga

SEQ ID NO: 47850 - DNA, 1272 bp, Oryza sativa
  Clone ID: PAT_MRT4530_5057C.1
atggcgatcgccgcgcgcctcctctccacagcgccatgccgctcgccctcgtcgtggccgctgccgccgtccaaaccctacctccgcttcccctccgcgccgctcctcctcctcctccggtcacccgccgccgcctcggtgatccatctgagtcctccgccggtaactcccctcgccgtcgcgtgtgatgatcggcacgcgctccccgactcggacgagccgcgcaaccggaacccacctgaccatcccgctccgctgctcgccgccgccgccgccgccgctgccgcggtggccagcccgcacgccgcgctcgccttgtccggtggatccatgggcgggtgctcggacacctcatcctcctattcctcctccttctcctcctcgtcgtcctccgattccttttcttcgtggtcctcgagcagcgactcatggaggtcatcgtcttcttcctcctcctctccgccgaagaagaagaaggtggtggtggtggagagcgcagatctggagactcacgaatcggtcggcacggcggcttctccgccgccgccgcctccggtggccctgaccccgtgggagaagttctggatcagcgtcgcggtggtgctcggcgtcggtgggctagtgttcggcctcatcttcctcatcaagagaagcatccccccgccgaggaccatcagtgtggtcaagcttcagattgcattgggtggtgtggctgcggcgaagtcgttccagaaggatctgaaccggattgctgagagggtgcaaggctctagccgacgttggtacaagttcatactgagcgatctgttcaagaagtactactatcaagtaatagcattttttgcagaaattaatctatttgtgcataggactcaatttagtattaaagtgatggttgatataaaagacagcgactcttggaatggtcattttaagaaaatttcgttggaagaaaggggcaaatttgatgaagaaacgctttctaatttggaaggcgttaagagaaataaagaatactctacaaagatggatgggagcaaaaacgagtatatagtgttaaccattcttgttgctacggatggaacaatggatttccccaaattgatcacaaacgctgcagatctgaaagttgctttgacaaagctctactctacacccgaaacaggtcttgagggtattcacgttttatgggcacctcaagacaaggatgatattctttcgaaggagaggatgcaaaaggattatccatatctgaagcccttgagtgtctga

SEQ ID NO: 47851 - DNA, 4335 bp, Oryza sativa
  Clone ID: PAT_MRT4530_50580C.1
ttatgttctgttcagcgggccccgtgtctggatttcctctagttggggctcctgcgctgatgatttatcaacagttacttcagtctctagtatatgttcttctgaagctgcttcctcagcaagagcaacattgcttttcacatcttcattgagttcctttacgcttgtggtggtgctctcatgagggactgattcaatctctatggcttcagtgtctatctcttctcctggaaggccacttgctgctatattatcttctgcttcaacagattcaatattttgtctctcttctagttctgtctcctgaactggtggtgtatcaacagttgtctcagttgctagtacatgctcttcaggagctatcttctcagaaagagcagcactgttatttacatcttcagtatcttcaattacgactggtgattcctctgcttgagtgtcagaacctggttcttcttttgttacagtctcttgtggattgaactcctcagagctagaaacattatgagaggggatgactccttgaggttcaagaacttcagtttccttgaattcaactgattcttgttcctgaagttgctggtaaccaacattttgttcaattgttgcattattgtgtgtttctatttcctctacactagcaactctgctatcttggagtgttggttcaggtacagttggtgcagtgtccctcatctcttctgatgattctggttcaggtacaggaggttcagtgtccttcatctgttctgatgattctgtcatctctacctcgtgtgtttgacaggaagcttcttctgtttcaccatccacagtgttacttatttcttctggttcaagctcctttacttgcacatcatcagttggctcacttgctagtaaattggcttcttgagctgtctcctcaacaatagccccactgctttgatcaggtatttcttcgtccttcacaccatcatgttcctttgttaattctgctccatcattttgtatttctctgtcatcaaaagcaggttcttttgctgtagcattttcttctgggacagactcctcggaagtaggaacaatgtttttctggaaaatggtttcagattcagtagcttcagtgtctttaatatcctggactgattccatttccaaaatttgtggttcactttctgttagactttcctctgttgcttgctcctcacattgagtaatattactttggtgggcaattgcttgatcttcagaggcttcaacactgctctctacctcacctgtccaattatcttcaacagcagcatgtgtttgatgggaagcttctcctgtttcaccatctacagtgttacttatttcttctggttcaagatccttttcttgcacatcatcgattggctcacctgctactaaatcggcttcttgagctgtctcctcaacaatagccccactgctttggttgggtaattcttcggccttcacactatcatgttgctctgttaattctgctccatcattttgtatttctctgtcatgaaaagcaggttcttctgttgtagcattttcttctggaacagactcctcagaagtagaaacaatgttttgctctgaaacgagttcaggttcagtagcttcagtgtcttccatatcctggactgattcaatttctaagatttgtggttcactttctgtaatactttcttctgttgcttgctcctcacattgagtaatattactttggtgggcaattgcttgatcttcagaggcttcaacactgctcacttcggttgatccaatctcattcgtctcacatgtggttggattatcttcttggttttgcttctgagagatggcatcatccttttgatgaaatgttccactcaaatcaacaagttcaggtttcttcatttcttctgattccagctcctgcattgattgtgtatcagcagttgacacactttcaggtatgttatctccttgagctgcctccccagcaaaaacctcattactttgatcagtgatttctccagtttttgtatctatgttgtcctcactggcctctattgatcctgcaatagttagttcttgagtgttggaaattgtttcacttgctgttatactatcttctggattagattcctcagaaacagaaatgttgctttcctggggaattgattcagttttagtgccttcggtttcctttatttcttctgctgactccgtgtcctgtgtctcacatgctgttgtattcacttcaactggatcattagagggagcagcatggcttgtatggaaacctgcctctgtttcaataggttcagggctcttgatttcttctgattcaagaccctgcagttgcaattccgcaatattctcacttgtcagcacattgttttcttgtccttcgtcatcgacagttaccacatcggatgcttctacaacattatcaggttcggtgtccttgacttcttctgattctacatcttgtacttcttgagaaacacaggttggtccttctgctgtaccatcatcttccacagcatcctccttagaagtagcaatagttctttcttgggagatctcttgaatctcagcagcttcagtatccttcacttcaattgaatcttgttccagcgaatgctgaatatcatcattatgtggctcacttcttgttgaattatcttcttttggcagttctgtggaaacagcagcagggggttggtgggtgatttcttcagtttcagtggcttcaatttcctttgcctcttctaggtctgccacttgtgattcactgtctgctataccaccttcttgatctaagttactaaaggcagcagcctcttctgctagttctgtctcaagttgtttacttgccacgatactatcttcttgatttaagtcgctgaagatagcagagttcgtttcgttggaagcttcatcagcttccttagtttcttcttgttccaacttcttcactggtcgtatatcttctggtggctcacttggtattaccttatcttgaactgcatcttcagcaaaagccacattgctctgactggaaacttcttcggctttgacatcactagggcccttggtttcttctggttcaatgctctgtatatcagaactgggatttgtagttgctgcatgatcttgaattgcctcatcaaaagcaacactgctttgttgcactgtttcttcagtatcaactgcttcagcatctttcatttcttctactgatccctggttttgctcttctttggtatcaacagttggctctcttgtagtcgcatcatcttctggagttttctccccacaagtggccacattgctctgatggcaagtttcttcagcttttacagacaaactatcattggtttctaaagctggttgttgattcagagcttcttgatcatcaactgacgcctcctcggcttgttcagtttcaggcaaatcagattctttgctttcaggtatctcttcctgtaacacctctgcatccatgtcatcggcttgcttactctgttgatcttctgctttgacttcttcatctgcatgttctgcaataactttatcttctggaaagctctctttgtggtcaagataagcagtatcatcttctttagccggatcatctgtttctttgtttcctggaacggtgtcagagtcacccacattaggctccagaggagactggattccagccggcgcttcagctagaacctcatcggcaggaatatctgtcatgattgcaggttgtgcttccttgctttcttttgatgaatccagatcttgagcatcaactgtttgctcaatagcatcatcagttttacaaatttcttcctgcaccatggtgtcattcgttacatgaccttcaacatcttgttggccatgatccttggcctctgcattctcacatttgagaatggtggtatcttctgatgcactctctccatggctaagagaatcagtcatctcttcttcattgcttttattgctcgggtaagtacttgttccatcagatgaagtttctacctgctcttgactttcctgattaatttcatggggctgctcatttgaaatattctcttctttattcacatgaccattcaaagaagacgccgtgccatttaaactatgttctgaaggaattttggtttcagagggtgcttctactaaaacttcgtcctctggaatcttcaatattccttcagttgaacccatggtttgtgcctcgcccttgatctctttaatagaagaaagcttgctgtcaagttgtgcttgcaaatcagtcgcagcttccacttgaacttcctggccatctgttgcttcccttgcttcttcttccgtcgccat

SEQ ID NO: 47852 - DNA, 216 bp, Oryza sativa
  Clone ID: PAT_MRT4530_50581C.1
atggtcgacaaccagggctgctcgccggcgctcgagcccgtgcccacgccgcccaaccccgacccctcatccatctcgccggaggcctgggatcccctcgaggccgccgccggagccgtcgtcgcccggatccagcccaacccgccctccgaggaccgccgcgccgccgtcatagcctacgtccagcgcctcctcaggtgcaccgttggctgccag

SEQ ID NO: 47853 - DNA, 318 bp, Oryza sativa
  Clone ID: PAT_MRT4530_50582C.1
atgggcgatggctacgaagtacgcacgcagtcgtcgtcgtcgtcgtccgcctctcaacgcgacgccgggagtggttgggcctcacccccaagctctcggcatggaggcattggggtgcctgtcgccaaggccgccactgttgcgaggaagtggctcgacggccaggggctcgccggcggccaccccacatttgtgaaggaggggatagggcgaccgttgatgtcgtttgaactgtcgccatgcactgccacgctccagaagggccgcaggcccatagaggaagcgggactctccttcccgtcttccacgtaccgatag

SEQ ID NO: 47854 - DNA, 590 bp, Oryza sativa
  Clone ID: PAT_MRT4530_50583C.1
gtacgcgcgcgggcaacaccaacgcgtcgtccaggctgttcgcgacgggggtgatggtcgggttcgacgcccagttccccaagatctacgccatggcgcagtgctcgccggacctgtcgccggcgcagtgcgggctgtgcctcggcgccatggtggcgcggtggtggcagacgttcgagcccaacacgcagggcgccaggagcgtcggcgcgcgctgcaacatgcgggtcgagctgtactcgttgacaacgtcccttccatgctgcagctgcaagccgaggccgtcgcgccgtcgccatcgccggcgccggcgccggcagggaagccacctgctgtgccgggcactacaggagggatccctaccacatggtgaagagatagcagtaaagaggctctcacaaagctctgtgcaaggaatgggggagctgaaaaatgagctggttttggttgccaagctccagcacaagaatcttgtccgtttggtcggtgtttgtctagaagagcatgagaggatgcttgtctatgaatacatgcccaatagaagcttggataccattctttttggtgcatttcccctccgtgcattctaa

SEQ ID NO: 47855 - DNA, 1668 bp, Oryza sativa
  Clone ID: PAT_MRT4530_50584C.1
atggaggtttctgatcggatgctccacgcctctcccgccgcggccgccgcggccccggcgacggcagatgatgcgcgcgagacggagatcgcagggggcatcgcgtcggcgtcggcggcggtggaagacccccctgcttcggcgccccccgcgagtgaggcggcgggcgaaggcgtcatcgcggtcgagcacgagcgtgctgcggcgcatccggtgagcgagacgaagatggacgtcgacgaggtcgggacggcggacgcgtacccggccgtggcgcctgctgcaggggaggtgaaggcggaggtgaacgggggcagtatcccggacaaggagcaagatgcggcggcgtgcaccccgatccaagtgaagaccgaggtgtatgagaacggcgttcaagagcaagtgcatacggtggctgctgtggcaagtgaggtaaagatggaaggatgtgagggcggggtggtggatcagaagcccaccacgactcctgccgatggttgtcagatgaaggaggagggggagtgccttgtgggccgttacatcagccggagtgtcgctgggcatggtcgaattcttcttgggaaggttgcatcctatgatggcagcactgggatctacagtgtggtgtttgaggatgggcagggtgaggatttagagcttgctcagctccagtcacaacttgttggtgaagagaatggtgcatttggcatgaaggtgagctgccggaagaggaagctggacttgctagtttcatccggtggcgccactgaggtgaaagggccaccaattactaggcagagggtcaatgaatctgaggtgtccactaggcctgatgagtcgcaagagagtgggtctggctcggatgcttctgaggatgttgaatcttcaagcaattcatcaaactgcactaaggaactgccagtagagcattatccaccagttcaggtcctggagttgcctccgtcttcaggggacattgctgtgccagaggaggccataagttatcttttttctgtatacaacttcctgcgatcgtttagtgtgcagctgttcctcagtccatttgggctggatgattttgtttcatccgttaattgcaccacgcagaatacattgttggatgctgttcatgtctcactactgcgggcacttaggcggcatcttgagaccaaatcttctgaaggattaaaactggcttcaaattgcttgaagtatttagactggacattactagattcattgacttggccagctttcttgctagagtacctctatgtcatgggtattattaaagatctaggaggccggagatttggtagaagtgtcctagccattgagtactataagcttcctgttaccctgaagcttaggatcctgcaactactatgtgatcacgtcattgattcagaagaactcaagactgaactggaagaacgggaaggttacagtgaagaaatggaatatgagatggattctagtacttttgcggaggttgggtcaagatcagtattgactagaggctcaaaggctccagcttgcaaaaagctcgacgctttacagaatctggaaactgcccaaaacggaaataatccagaatctgcttcaacacatgcatcccaggatggcaacagtgatgattgccggatatgtggaatggatgggactttg

SEQ ID NO: 47856 - DNA, 3092 bp, Oryza sativa
  Clone ID: PAT_MRT4530_50585C.1
atgccaaaccatgatatggtgattgagagtgcaaagaaaatttgtagatgttttgtagctacggcattgaacccttggacgcactgcgcatacagtgtgaccgtcttccaagacctccgtcaggccttcgagtggatgatgaacatggacatggccgctgccgttttgttggaggttgagatgtatcggccacaatggtggtctatgtttacatcagacacgccgaatttgaagaaatttgtgttgcgtttggttgatgaggctaacttcacttacgctactaaggacaaggatcatggtgttccaagttctcaacgaactaacgttactcgagagggtgacaacagcaacaacagttttacacaccataacatagctatagcttatccaatatctctagctgttgacgagaaacacagtggcttgggagatctgcttaactccagtgcagtttttagggttctaaacaagactagggatgatgtatctcaaacattgaaaatggatatccaatgtgcgtataaaaccatccctaagcttctgattatcctcctcctacatgggtgtatgagtggcaagagccccagtggtatcctcaattgtacgcattgttctgttctgctacacaaatcacggctaccatgcaaatatcgtggttacagcgccaaaccatgcgggttttcagtaaccgccttactgcggggttatggtagcccccatccaaacggatgtattatgctctacagactactggagtacaatatatcagcttcgcttaagctatctctaaagttcttgctatattggacaaaggctcttaatgacgatgtttggcaggaggctcagctagctctctgctccgccatgtgccgcggatcagtcctcctcctccgtgtccatgccgcgctgcttctcctcgcggcgctcccggcgctgatcgccggccagccgtgggagatatgcggggagaacggcaactacacggcgaacagcacctaccaagccaacctcaagcagctcgccgcggcgctccacaagaacgtctcctccggcaccggcggcggccgcctcttcgcctcgggcgccgtcggcgccgtgccggacgccgtctacgcgctcgcgctctgccgcggcgacatcaacgcctcggcctgcgccgactgcgtcggcaccatcttccaggacgcgcagcagctgtgcccctaccgcaaggaggtgtccatcgtctacgacagctgctacctccgcttctccaacctcgacttcctctcctccgccgacaactccggcgtcgtcgacctctacaacaccgggaccgtctccggcgacgtcggccgctacgaccgcgcggtgacgggcctcctcaacgccacggccaggtacgcggcgggcaacaccaacgcgtcgtccaggctgttcgcgacgggggtgatggtcgggttcgacgcccagttccccaagatctacgccatggcgcagtgctcgccggacctgtcgccggcgcagtgcgggctgtgcctcggcgccatggtggcgcggtggtggcagacgttcgagcccaacacgcagggcgccaggagcgtcggcgcgcgctgcaacatgcgggtcgagctgtactcgttctacaacgtcccttccatgctgcagctgcaagccgaggccgtcgcgccgtcgccatcgccggcgccggcgccggcagggaagccacctgctgtgccgggcactacaggagccgcatctcgttcggaggactttgagagtattgagtcactttttcttgatctatcaacactccgaatcgcaacagataacttctccgaaaataacaaacttggtgaaggaggatttggtgttgtttataagggatccctaccacatggtgaagagatagcagtaaagaggctctcacaaagctctgtgcaaggaatgggggagctgaaaaatgagctggttttggttgccaagctccagcacaagaatcttgtccgtttggtcggtgtttgtctagaagagcatgagaggatgcttgtctatgaatacatgcccaatagaagcttggataccattctttttgatgctgagaaaagcagtctgctagactggggaagaaggctgaaaataataaacggagtcgctcgaggaatgcagtatctccatgaagattcccagctgaagatcgttcatcgggaccttaaggcaagcaatgttcttctagactctgattacaaccccaagatttcagacttcggcttggcaaggctcttcggaggcgaccaaacacaggacgtcacaaatcgcgttgtcgggacatatggatacatggcgccagagtacgcgatgcgtgggcactactccgttaagtcagacgtgttcagcttcggcgtcctggtcctggagatcgtcacggggaggaggaacagcggctcctactacagcgagcaatccggcgatctcctaagcattatatgggagcactggaccatgggaaccatcatggagatggtggaccggtccatgggcgagcgcgcggcgggcggcgagatcgcgaggtgcatccacgtcgggctgctctgcgtgcaggagaacccggcgagcaggccggccatgtcggcggtgaacgtgatgctgagcagcggcacggtgtcgctcaaggcaccgtccaggccggcgttctacatccggaagggcggcggcgacgacggcggcggcacggggtcgtactcggggtcgttcgtcggcaccttgccgtcgtccggcaggtcggcgcccatgtcgcccaacgaggtgtccatcactgagctcgagccgagataaggaagaaaaatgtagcagagccatgtcatgtcacaggagtgaagggctccggggatgcctaatttgtgattttgtgtgctgtgatggtgtcctcaggatgctacaatgtatagaaacaggcagtaatcgttggcaagaacaaaatgccagcaaaacagtatagcactttagtgttgtcttttaactcttatggcgaattatgctgagataattgcatgatttgcaggtgttcattacacaatatattaccctcgtttcatattaaaaaaaaaaaaaaa

SEQ ID NO: 47857 - DNA, 280 bp, Oryza sativa
  unsure (1)..(280): unsure at all n locations
  Clone ID: PAT_MRT4530_50586C.1
gtgttgttaaaanccgttgttaccaaccgggtttccggaangatttccaggcctttgatggcttattccacactccatttcttcatctgaatcttttcctactttcttgcgtcgtgtatgctgggcagtcgtggtggaaatgcaattgtgaagactgtgcctttgcaagaaacaccaaggccatcctattcagatttcagtggttaagattgagatcctgtcttactaaaagaaaaagagaaaaagaaaagattaaaaaaaaaaaaaaaaaaaaaaaaaa

SEQ ID NO: 47858 - DNA, 122 bp, Oryza sativa
  Clone ID: PAT_MRT4530_50587C.1
atcggaaaacaatcaatcatatttattaacgtgaaacggagataaacccataaaccgtaaaacagaaaatttttaagggtgaaccatttaaaaaatgaagaggtgccatcacaaggcaaatt

SEQ ID NO: 47859 - DNA, 2139 bp, Oryza sativa
  Clone ID: PAT_MRT4530_50588C.1
atggtggtaggagcggcagcggcaacatactctctctctctctctctctctcacgcgcatgcgctcgattgccgaggaggaggcacatgcgctcgacggctggcggcagagacggagcatgaccgtgcggccggtgttggaggcgggctcgccaccatcgccgcctgccatgccacgccgccgcgccatcgccccacgcggatgccgcaactctgcacggctgcgcccaggagcacagcagccacgctcctcctgggctccgcgcctctgcctgtcctcttgccaactccggcgaggcgggccactcgccgccaaccaaagcttcgtccccgccgctcctatcgccgcctagagcacactcccagccacgccccctccccgccgctcccactgccgaccggttccccctcccatccaccaccttgctgccgagcacccgcagccgccggcgggcacctccaccgtctcaatctcctcctgcccggtaaggaacaacaggatgtcgccgctgccaagcgggctctgccaccacgagctgccgttcgcctcttgtgtagctccatctcgtgcgtcgccgctgtggacgcggccaccgacactcgtgcgccgcgtccgcagtcgccgcccaccctccccgccgcgtccacagtcgccgcccgccctccccgccgtgcccaccgcgcccccagcggcaaagagagagggggtgagcttttccccttcttggttgatgtgttcttggcatctttgccatatggtcttgggtgtgttcgatctcctcgatctccctggtgcatgtacctggccaagccgccaataggtgcatgccatgatgccatgcgtggtcagaggcacagagcagcaaaaataactgcagctttgaacggtgcgtgccttgggcgtgacgaaacaatctgggccgttggttgtttgcgcggagcaatctcaggcgtccacgtgtcgctatctgtccagctttactgttcggcgccttgtctgtactctccccgttcttgttttgatgcaaggatcaatctcgaggagccagctacaggctttcagctctgtgctcttgccggcgggcaatctgagctttggtcgagtgacaggcggcgcagagctttcgtggacctcctagcgcggtgcagaccaatccacacagcacctgagcctttcctctgcattttggtggtcactgcagttcatgttgctctgcttttattggcttctttgttctactttgtccccgaagagtccctagttctcttcctgagctcattcgattctgtactagggactcttcctagtacagaaaatatagtgtccatggaacctgttgtacgttctgatagtctgatgaagctgatacatcaacaaaacactgatgataattcaatgcttaggtaccggcagcagcataaaacaaaggtctcaaccgaagagagttctacaccatccagcgaatacaggtgttcacatagagagctgaagaaacacaggcttggttgcgaggtcggaaactgcggcgcgtttgagtactcggcgcctccgactctgagagacggcggcgcacccgggaacaaggcacatggaacgcaaagaaacataagcaaaacttcaaccaaacaaatcgaggcaagaacaaaaaccgtacagatagctagagcctgcacttctccttcctccatatcatcagccacccttcccaaccttagcattgatgttccgctggtcccaccacccacgccagactggccagtcgtctcctccaagactccctccatggaaccgcctcctcctccgtggagccatcgtgctgtcctcaccatccttgccgtctccgtgccgtcttcaccgtcctccttgccatcgtggcggtctcgagctcgggggttgttcgatctggcctccgccgccctgcgcctcctcctccacctcacaggagaggagaggcctcactgcacaggagagagggccggagaggcgccagccgccgcccagggaagagggcgaggcgccagccgaagcgaggagagagggattagcactggccgccgcgcaagggagaaggagaggcgctggtgcagcgctagagggagagggagaggcgccggtatagcggtagagggggcgccggta

SEQ ID NO: 47860 - DNA, 1629 bp, Oryza sativa
  Clone ID: PAT_MRT4530_50589C.1
atgttgcaccatgctgaacctgaagttgtggctggctctgctcgtggtttggataatttcaatgcattacaaaaggcatcaaaggaacttttctacgatgacgcaaagggttgtggaaaggatttcacattgttgcgtacggtgcttgaacttctgagattgaagtctagaaacaatttgtccgatagtagtttcaacgatttgttggttctactaaaagaattgttgccgaagcccaactcaatgccaaccagcacctatgaagcgaagaagcttatatgcctgttgtcattgggtgtgcaaaagatacacgcgtgtgttaaccactgtatcctgttccgtaaagagtacgaggatttggacagctgcccaacatgcaagagtagtcgatacaaaacaagccgtagccagtccgagggtcaggatgttgtccttgacaatcttgaagagtccgatccatgcaaagacagcaacaaaaagaagattccccagctgatgcaagacagtggaaggaatttgacacaaagtaccataagtttgcagaggacccaagaaacgtatcttaagggatcgaagaagctagtgtacatgcggcaccggcgtttcttaagaaagaaacacccgtaccgctccaaagcagaatatttcgacggtactgttgaggaaggtgatgcaccagaaccatggaagggtgataaagtgttcagaatgaccaaaaacctgaaggttgtttttgggaaggtaaaaaagaaggaaatgaataagcggaagagaaatgatgccgaagtgccagtaagctctagcatgccattcaagaagcattccattttctttaagtacctttcgtactggaaagatttagacatacgccattccattgatgtcatgcacctagagaaaaatgtcttcgatagcaccattgggactatactggacataccaactaagagcaaggataggctgaaatcacgtaaggacctcgtggatatgcagataacgataaagcttcatcctgtggatgaagtattccttgccattgcaattagagcagtcgaaccagttcacgtaaagctggtcatcacaaagctgtgctatttcttcaattccatatctcagaaagtaattgatcctgaagagttaggtcctctccgggctttcgctatacagacagtgtgcgaccttgagatgtgtttccctccatcatttttcgatatgatgcaacacctcatagttcatatcgtgcctcagataattgcacttgggcccctttacctgcatcagatgtggccttttgaacgatacatgtccattctaaaaagctacgtatggaaccgcgcccacccagagggatccatgatagagggatacacaaccgaggaggtcgttgagtgttgcattgattacctaaaatatgggaaagcaattggtttaccggtacctcgacatgaaggtagattatctaggaaaggaacaaaagggaagaaaagaatccacgacaatgactacaaaaaagtgaaagatgctcatttcactgtactgcagcaactcgcattagtggagccgtacataagcaacacctgcaggaattacaagcaacaaatgtgggtcgatctaatagatggatcatga

SEQ ID NO: 47861 - DNA, 708 bp, Oryza sativa
  Clone ID: PAT_MRT4530_5058C.1
atgcccccaccaccaccacctcgtcgtgctccacccccaccagcaacacctccgcccccgccacgccgtgctccacccccaccgtcaccgcccattcgaccaccgcctccaccaactcctcgcccctatgcaccaccaccgccgtctcacccactagcaccgcccccgccccacatcagcccaccagcacccgtgccgcctccgcctagcccaccaccccacatcgtcatcatcgtcgtcttcgtctcattcggcggcctcctgttgctagcatgcctcgccgccctcttctgctggcacaagaagaggagggagacggagaggaaggcggaggtgcacaacctgagtggccatgtccatgtccacaaggcgactgagtcaggccccagcggcgccaaggccaccgtgctgtccatcgacgaggacctcaaattccaggaggtcgccggcgagtcgtcgagcgccgccggagcagggagccatcataccccttggtcatggcacaggaggcagcaggaaggcaaagcagagaacaaggcagagctcatcaatgtcacggagcacatccatgtcgatgagaagattgtatcagggcctcaggggcaaaagatcgagatcctttcagaagatgaggacatcaggtttgaagaggaaggcaggaaggaaaagggagatcaaagatcaaagactcgcatcaccaagacctga

SEQ ID NO: 47862 - DNA, 1647 bp, Oryza sativa
  Clone ID: PAT_MRT4530_50590C.1
ctatgcattagagcgccccacatttgttgcttgtagttcatgcaggtgctgctttatgtacggctccactatcgcaagttgctgcaacacagtgaaatgagcatctttcacttttttgtagtcattatcacggattctttttttcccttttgttccttctctacataatctaccttcatatcgaggtacctgtaaaccaattgctttcccatcttttaggtaatcaatgcaacactcaacaacctcctcggttgtgtatccctctatcatcgatccctctgggtgggcgcggttccgtacgtagccttttagaatggacatgtatcgttcgaatggccacatctgatgcaggcacaggggcccaagtgcaattatctgaggcacaatataaactatgaggtgttgcatcatatcgaaaaatgatggaggaaaacacatctcaagctcgcacactgtctctatagcgaaagcccggagaggacctaactcttcaggatcaattactttctgtgatatggcattgaagaaataacacagctttgtgatgaccatctttacgtgtactggttcgattgctctaattgcaatggcgaggaatagtgattttagcccatcctttgtcgtagttggtatgtctagtataatcctaatggtgctatcgaagacatttttctccaggtgcatgaaatcaacagaatgacgtacctctaaatctctccagtacggaaggtaattagagaaaatggagtgcttcttgaatgtcccgctatggcttgttggcacttcggcatcatttctcttccgcttgttggtttccttcttttttgccttcccaaaaacaaccttgacgttttttttgtcattttgacactttatcacccttccatggttctggtgcatcaccatcctcaacagtgctgtcgaaatattctgtgcacggtaccatccacacaaataacgcggcccgtcttcctcattgatctgtcctgatagggaaaacagtgcgggcaagtcgttgacggtgacaaagataactgcatatagtgtgaagtactcctgtaggaattcatcccaaactcggatcccatgtttccacaaatcatgcatatcctccaacaaaggctccagaaacacatccatgtcattgccaggttgtcgtggtccctgtaagaggatggccaacaaaatatacttccttttacccagtgacaacgagcaaataagcttcttcgcttcataggtgctggttggcaaggagttgggttgcggaaaaagtttcttcaacagaaccaacaaatcgttgaaactaatatcggaccaactgtttctggtcttcaatctcataagctcaagcaccatccgcaacaatgtgaaatccttctcgcaaccctttgcctcatcgtacaaaagatccttcgctgcctttttcaatgcatcgaagttatacaacccacgagcggacccagctacaacctcacattcagcatgacgcaacatctcttccaaatctgcaaaattaccatcatctacgctcacattaccatcaccggcatcatcaactgtattgtgctgactattgtcgccaacaatatcatcatcatcaacgggttctactgcatgcacttcttcttcttcagctactaccat

SEQ ID NO: 47863 - DNA, 472 bp, Oryza sativa
  Clone ID: PAT_MRT4530_50591C.1
gtaaaggcggcatatatgtgcatgcaaggcttatacaatcttggatagatactcataacattcacacgctgaccctagaatgggagcctgttaaaggacggtcaatactgataaggaacggaaagattatctggtaggtgagagcaaatgcaccacaatctgttgagcttttgattgcatcaggcacacagatttttgcaggaaaaaaagtctttgtcagaagttaatgcaagcatggggggatctcatacatcctatacatccatgtcacatagctgtagatgacatcacgtttgtgaaaacggtatcgaagaacggcttgtgctttattgtaactaacggaacctacggtggcgcgaaactgactgcccattcgaatgtgcatagtaccactgactatgcgatggtgagcttaacatagatcaacaacttttgagagatggctgcaatggtccatgctatcactggacct

SEQ ID NO: 47864 - DNA, 459 bp, Oryza sativa
  unsure (1)..(459): unsure at all n locations
  Clone ID: PAT_MRT4530_50592C.1
gcacggnaatatcaaggggggggtgggcgtgtcacttaaatagtcaaacgggggggtgagctttgagcttgagcttgagcggcaatggcggatgcttgtgtgtgtgtgtgtgcagggaggagaggaggaggaggagtcgtttctgtgccanccnnncannanttcctggctttgatcnnggaggcntacncnncnctnntnnannaagtggagggggtgatcccgggggcgaaggtggagaacaacaagttctgcctttccgtccacttccgccgcgtcgacgagcgccggtggggcgccgncgccgaccaggtcagggcggtgctcttgttctacccgcgcctncgtgtggacgcaggcccgcagggtcttttttttcatgcccgcctttagtgggacaagggcgaggccctncgcttnctncttttcgnccttggttttttcgccgccggggtcgtt

SEQ ID NO: 47865 - DNA, 240 bp, Oryza sativa
  Clone ID: PAT_MRT4530_50593C.1
atgacgcaacatctctggcaaatatgcaaaattactaacatctacgctgacattaccatcatcggcatcatcaactgtactgtgctgaccattgccaccaacaacatcatcatcatcaacgggttctactgcatgcactttttcttcttcttcttcttcttcttcttcttcttcttcttctttagctactacaatgacatcctcgtcccagctcaacacttcgtcgtgtactgtagcctg

SEQ ID NO: 47866 - DNA, 583 bp, Oryza sativa
  Clone ID: PAT_MRT4530_50594C.1
gggtgagaaagggatttttttttttttgcacttgaccttggaggaacaaatttctgtgttttacgggtacaattaggaggcaggaacagtgagttatcaagcaagactaaaggggcccattccacaacatttaatgtccagcagttcacatcaattgcttgattttgttgctgcagctttagcaatatttgttgcctctgaaggcgaagactgccatcttcatgagggtaaccaaagagaactaggttttaccttctcctttccagtgaaacaaaaatcattggcatctggcaccctcataaagtggatgaagagttttgcaatcgatgaataaaaaaaagaagctgaatctgcagatagctcttaatattctgaaaaaactgtcaaaaaataatattctgaaaaaaaactgtgtattaaggtgataaacaataggttttggagcaattttttttttaagataatggattaaaccggcctctacatccaaacgagattctagagcaatagcagctatacagtttgcctaagggctaaatatcttgtattttgcaaatgtcaattgtacatgaactctatctgc

SEQ ID NO: 47867 - DNA, 1134 bp, Oryza sativa
  Clone ID: PAT_MRT4530_50595C.1
atggtcaaggacctggcgcggcctcgtcctcctcttcctccacgacttatgtcgcgtctcacccctaggaaaggagggcgcgacagggcgccggaggcaaagtcggggaaggcgtcggcctgggagttcagatctaggcccctggatccactcccccgaaagtggaagccgacgccagatccggcgtggcctgacagcctgcgagaagccgtagtcgaaggtgatgtgtgtgtgacggggacaagatatccaccggctcttcctcgttgcctgccatggctgatggctgttgcccgactagcggtggcttgcgcgggcagcggcggcttgcactacgccgctggggcttgcgcggggcagtggtggctcttagtcaagactccctccctctcctccacgtcaagtccacttcgcctccctcgccgcgtctcgccggcgccggccaccgtccgccgcctccgcctccgcgccatgtcgaagtatggcaccatcccgacctcctcgtcctcggacgggccgcccccgggctcctcctcctcctccccgctcgacttcatctcccgcgccaaggcgcgcggcgcgacggcgctggcggagcggcggccgtggcgggagctcgccgacccgcgggcggcgtccgtgccgcgcgggctcggcggcgcgtaccgccgcgcgcgcgccaacctgggccacttctccatgaactacgccatcgtggtgctcgccgtggtgttcctctccctgctctggcacccggtctccctcatcgtcttcctcgcctgcatggtcgcctggctcttcctctacttcctccgcgacgagccgctcgcgctctgcggccgcgccgtcggggagggcgccgttctcgcggtgctctccgtgctcaccctcgtcctcctcctcctcaccggcgccaccgtcaacatcctcacctcgctgctcgtcggcgtcgtcatcgtcctcctccacgccgtcttccaccgccccgccgacagcatcgacgaggaggccggccggtattacacccccgtcccgccgcagccgtcctactacggctcccctggaaatgctactagtcgtcccggcttcacggtggtgctggctccaccactgtctatcatgcccaactctgaa

SEQ ID NO: 47868 - DNA, 3009 bp, Oryza sativa
  Clone ID: PAT_MRT4530_50596C.1
atggcatgtttgggcgtcttgtcctcaggcattgtttggctttgcctatccattatctttatgattctaccaatagccatcagtgatgaacatgaaaatgatcgtcaagctctcctatgcttcaagtcccagctctcaggtccaccgggagtactagcctcatggagcaatgcgtcccaggagttctgcaattggcatggtgtcacttgcagcacaccatctccccgtcgtgtcactgcaatagacttggcatcagaaggcatctctggctccatatcaccttgcattgccaacctcacctctcttacaatgttgcaactatcaaacaatagcttcaatggcagcataccttcagtgctcggtctactcggacaactcaacaacctcaacctcagcatgaactctctagaaggtaacatcccttctgaactttcttcatgttcccaacttgaaatcttagatttgtcgaacaatttcatccaaggtgaaatcccagctagcctaagtcaatgcaatcgtcttaaaaagattcacctcagcaagaacaagctccaggggaggatcccttatgcttttgggaaccttcctaagcttgaaaaagttgttcttgctagcaatagactcaccggcgacataccagcgtctttaggaagcagcctttcgctcacatatgttaatctcgagagcaatgctctcacagggagcataccacagtccttactgaatagttcatccctcaaagtacttgtcctcacgagaaatacccttactggagaaatcccaaagcctttgttcacctcctcaactcttactgatatttaccttgatgagaataactttgttggttctataccacatgttactgccacccctctccctttacagtatctatatttagggggtaacaaactatcaggaacaataccttcctcattaggaaatctttcctccctacttgatctaagtctcacacggaacaatttaaccggtagcataccagatagtttaggccatattccaacactagaactgttgaatttgaatgtaaacaaattaactgggcatgttccatcatccatcttcaacttgtcatccctgaaaagtctagccatggcaaataactcactcacaggggaattaccatcaaacttaggttatacactcccaaatattaaaacattaattctgtccaataataggttcaaaggcccaatcccacctactcttgtcaatgcttccaatctgaaatcgctgtacttgcgcaataatagccttactgggctcattcctttctttggatcattgctaaatttggaggaagttatgttgtcatacaacaagctggaagcagctgactggagttttatttcatcactatcgaattgctccaaattgacaaaactattgatagatgggaacaatctcaaaggaaacatacccccggcaattggaaatttgaacaacttggtcgttctagccatggcccaaaacaacctgtcaggacaaatccctgatacaattggcaaccttgttaagctaaccgatctgaagttgtctggcaacatcccatcctctcttggcaagtgtgttgctctggagtctcttgagatgcaaagcaacttattagtaggaagcataccaaaatcttttgagaagttggtaggcatctggaatatggatatttcacagaacaacttgactggaaaaataccagattttctttcaaacttcagtttactatatgatctgaatttatcattcaacaattttgaaggagaagttccagcaggtggtatttttcgtaatgctagtgtggtatcaatagaagggaataatggcttgtgtgcaagaacatcaatgggaggtataccactttgctcagtacaggttcacaggaataggagacacaagtctttggttctagtcctaatgatagtaataccaattgtttctatcactatcattctattaagttttgctgcatttttttggaggaagagaatgcaggttactccaaaattgccacaatgtaatgagcatgtgtttaagaatattacatatgaaaacattgccaaggccacaaataagttttcttcagataacttaattggatcaggatcatttgcaatggtttataagggtaatttggagcttcaggaagatgaagttgccatcaagatttttaatcttggtacatatggagcacacagaggtttcattgcagagtgtgaaaccctaagaaatgtccgccatcgaaatcttgtgaaaatcatcactttatgttcttcagtggatgccactggggcagacttcaaggctttggtgttccaatacatgcagaacgggaacttagacacgtggctacatccaaagtcccaagaacttagccaaggaaaggttctaactattagccaaagagttaatattgccttggatgtggcgtttgctttagattatcttcataaccaatgtgcaacgccactaatacattgtgacttgaagccaagcaatattcttttggatcttgatatggttgcatatgtcagtgactttggcctagcaagatttgtgtacaatagattgactgcacatgaagatacctcaacaagtttggcttgcctaaaagggtcaattggatacatcccaccagagtacggcatgaggaaagatatctcaaccaagggtgatgtctacagttttggaatacttttgttagaaattataattgggagcaggccaactgatgaaaaatttaatggcagcacaaccctgcatgaatttgttcatggagcatttcccaataatatctacgaggtagttgatccaaccatgctacaaaatgaccttgttgcaaccgatgtgatggagaattgtatcattccattggtcaaaataggcctatgttgttctgtgccactgcccaacgaacgaccagaaatgggacaagttgcaaccatgattcttgaaatcaagcacgcggcctcaaacaggcatgtcagattaagctaa

SEQ ID NO: 47869 - DNA, 311 bp, Oryza sativa
  Clone ID: PAT_MRT4530_50597C.1
aggatatgtgagtttttgagggataaacccagccgaagaagtgggggagaggacgtaagtaaatataggaaggggttttttgttggaacataaacaactaggagtgcaggacaaagaggaagggcgccccgggctgggggtagggcgacccagaatgaacataccacttataaatcaggagactcaaatataggggaataaccaggagagaaaaatcgggaagccaacaagaggcgatacaaaaagcgaaaggggaaagaagaaagaggtcaggaacatttggatatggtccggggcggtttttgggggac

SEQ ID NO: 47870 - DNA, 1828 bp, Oryza sativa
  Clone ID: PAT_MRT4530_50598C.1
atggaggacctcgccctgcccgccgctcctcctgcccccacgcttagcttcacgctcttagccgccgccgccgccgtcgccgaggccatggaagaggctctgggcgccgcgctgccgcccctcaccgcccccgtccccgcccccggagacgactccgcctgcgggagcccgtgctccgtcgccagcgactgcagcagcgtcgccagcgccgacttcgagggcttcgccgagctaggcacttcgctcctcgcggggcccgccgtcttgttcgacgacctcaccgccgcctccgtcgccgtcgcggaggctgccgagccgagggctgtgggggccactgcgaggagcgtgttcgccatggactgcgttccgctctgggggctggagtccatttgcggccgccgcccggagatggaggacgactatgccgtggtcccgcgatttttcgaccttcctctgtggatggttgccggcgacgcggcagtcgacggcctcgaccgggcctccttccgccttccagcccatttcttcgccgtctacgatggccacggtggcgttcaggttgccaattactgcaggaagaggatccacgccgtactgacagaggagctgcgtagagcggaggacgacgcgtgtggctctgacttatctggccttgagtccaagaagctgtgggagaaggcgttcgtggattgcttcagtcgtgttgacgctgaggtgggaggaaatgctgcgtctggagcaccgcctgttgctccagacaccgtggggtcaactgctgtcgtcgcagtcgtttgctcgtcacatgtcatcgtagccaactgcggtgactcgcgtgctgttctctgccggggcaagcagcccctgcccctgtcactagatcataaaccaaatagggaagacgagtacgcgaggattgaggcgctgggtggcaaggttatccaatggaatggttatcgagttctcggtgttcttgccatgtcgcgatcaatcggggacaaatacctgaagccatatataatcccggtccctgaggtcacagttgtcgctcgtgcaaaagacgatgattgccttattcttgcaagtgatggcctttgggatgtaatgtcgaacgaagaggtctgtgatgctgctcgcaagaggatattactatggcacaagaagaatgcggccaccgcatcaacgtcatcggcccaaataagcggtgattcttcagatccggctgctcaagcagctgccgactacttgtccaagcttgccctacagaaggggagcaaggacaacatcactgtcgttgtaattgacctcaaggcacataggaagttcaagagcaaagcatgacattgcctccatgcgtaataacaatagtttataggaagctagaaatgtgcgaaatccaagacaaatttcttcttgatgaacagcaacagtgacagaatttctagggatctacagagatttggagaatccaaattcgatcgatttagaggactcctttttagtacataacttagcccagttctccctcttattttcttttaccatttgaccctcccaaaggctgtattcatgcatacggtacagattgcaaaatccgcaccggggtctatgtttacaagacagaaaagatcatccaatttttagatgtcttctttcgttgttgcccccttattctttctgttaagctgggccatcgtttttgtggcaaatgtatatttctgcctgtaggatatgcagaaacatattggtataaaggatgatgtactgccttctcaactatgaactggggtccggattaacttctgtttccaaaaaaaaaaaaaaaaaaaaa

SEQ ID NO: 47871 - DNA, 246 bp, Oryza sativa
  Clone ID: PAT_MRT4530_50599C.1
atgcccgccaagactttcgggcaaatccccatgcccgtgcccatgcctgacgggcacgggcatgcccgacggccttttattgggaggaagttcagatctgcattacctgaaaacaggatagacgcattttctccagagttgagatacttcaccgtgcgcattctaaaaataatggggaatgcggtgaacacgccaatctccgtctgcagcgctatagctcgcatggccgtaggaaaggctgcatga

SEQ ID NO: 47872 - DNA, 301 bp, Oryza sativa
  unsure (1)..(301): unsure at all n locations
  Clone ID: PAT_MRT4530_5059C.1
cagacacacactcacctacactcttttcgctcgttttgtccatcaccaccaccaccaccaccgatatcaatggcgctctaggtcgagaagaaggccgcggagaagaagccggcggaggagacggccgacgagaaggcccccgcgaacgcgaagaagcccaaggccaagaagcgggtgccgacgtgcatggcggagaacggcggcgagaacaacaacgagcgcagcatggagcacgccaagaagagcgtcnagacctacaagatatacatcttgatggtgctcaagcaggtgcacacggaca

SEQ ID NO: 47873 - DNA, 323 bp, Oryza sativa
  Clone ID: PAT_MRT4530_505C.1
gttgtgaattaagacaacagggggatcgccccaacccactagcaaacatacaggttgttagccactgacatatgttgcaaatgcgtgctacaagagcttaatagtcgaactaaaactacctacatgcagtacctgtggcctagcatcagaggtaaggcactatacttggactacaagaggtcctccggacgctaatagtcagtgaccagttattaggatgggactaaagcaagaggcgatgcagcgataaatgcgctctaggaactggacattgaggaacggctgattgggttttaaatgagtgacggaaaggaggggatgga

SEQ ID NO: 47874 - DNA, 228 bp, Oryza sativa
  Clone ID: PAT_MRT4530_50600C.1
atgccgccgcccgcggctctcctccctggcgccgacgcggccggccgtggacgccgccgcccgcgccgctcctccccggcgcccacgtggccatggatgctactgcccgtgctactcctccccagcgccgatgccgtcagggatgccaccggcctcgccgctcctccccggcgcccctcctcagttcctcctcttaccgagtcgagccagctcgacatccacccctag

SEQ ID NO: 47875 - DNA, 519 bp, Oryza sativa
  Clone ID: PAT_MRT4530_50601C.1
atggagggggatcgagcagcggagcaggagcaggtgcaggccaggttgtactctcgatcgacgccgtcgtggcgcgcgcgacgggagctccggattcgcagtacatcgtccgtctgctcttctcctggccggggtagagcaattattcctgccaccaccaccagcacgtacctccccttctgcggtgagccgaccggccaggcgtgcagtgcagctcatgctagaagctatcccacagtcgcgggctcgcggcaggcagttcatgcagcctttcctacggccatgcgagctatagcgctgcagacggagattggcgtgttcaccgcattccccattatttttagaatgcgcacggtgaaattatgtggtatccagtggatacccgtcgggcatgcccgtgcccgtcaggcatgggcacgggcatggggatttgcccgaaagtcttggcgggcatgggtcggctgcgagcgtgtgggtctcgggtcgggcatggaatcgctctgcccgtgcccgacctga

SEQ ID NO: 47876 - DNA, 344 bp, Oryza sativa
  Clone ID: PAT_MRT4530_50602C.1
ctattattttattgttttatatattttcatatctttatttcattaatagcatacttgcttgtcccacaggaatctgtttcttaaaaccaacacaacatacggacccgagggtccacccaaaccagacacaaccacactcagcaccagggggcgggacgaacaaaggctcgggacgaccaggcacatcggcagctccaccaaactggctgattaccgaccaccacggaggcggagcaccagggggagggcggactccttctggatgttgcagccggcgagggtgcgcccatcctccagctgcttgcctgcgaagatcaaacgctgctgggctgggggaaggcccc

SEQ ID NO: 47877 - DNA, 555 bp, Oryza sativa
  Clone ID: PAT_MRT4530_50603C.1
gcacgaggcctcgtgccgaattcggcacgagggcgaacggtgtgagctctatatccatatccaagggcggggctgtagtgaggaggtacacccatggagcatgcggaccggacgaggagggaatcgcgcggctggtcaagcaagatcatagagatgagaagcaattgactagaagctacggctcgctatctggcagcttgcgcagacaaattcccatatgcatgctggcagagtggcagtaagttttcccctaaattttgtcccagaaacttcaatgtttagttgccaactgaaatatgtgcaatgagttattgttcatttcacgcatcttgctggtaaaacttgctattatctcatttttgttccgcgggagcgcaaccttgggagggataaggtcagcttatggctctctggtcattttgtaaatcttgctaagtttatttttatggttattgatggcctcttaagcacgcatctagtttgtcgccattttcgtttttcttgaagctaaaagcgttgcaacaacagcttgcttgctcgagacctattatcata

SEQ ID NO: 47878 - DNA, 228 bp, Oryza sativa
  Clone ID: PAT_MRT4530_50604C.1
atgggggcgcacgatgttttcatgacgccccaacacaacatagttgtgcccaaagctctagtcaacaccatcgacttacccgagaaccccgtcctcaactcgtcatggcctagatgtcgctctactccgtacccggacagggaggacttaagggctcttgagggctgtcaccacctctacacccacctcaaacgggttaatgatatccagtcaaaaagggcaggttga

SEQ ID NO: 47879 - DNA, 901 bp, Oryza sativa
  Clone ID: PAT_MRT4530_50605C.1
acataaagacaccttctttttttttgctagctgctcacggattaaaaagcaaccctacataacttacaactccggcaaagtaaaagtcgatctctctagcaacgcacaaatgcacacggctacacataccggaataattaatatactgtattataataataataataataatcgaactatcagctaagatcgatcggtgtgcataaacacgcggaaatacggttcggtcggtcggtcggtgttcgccatgcacgcaaccgtcgcatgcaacacaaaatgcaatatagagatttaggataaaactcgagcgagagctaaggtagagctactctatggagtagcagctctgcttgaatgcctcgaggctgtggtcgaagacggggacgaaggcgtcgacgctgccgtcgccgaggtacgacggcaccaggaacagcatcccctccgtcgggaagtaggacggcatgaagtaggtcgggcagccgccgccgaagtcgagctcgtagaacgggaaggtgagccagctgtccacctccaggtcggggcacagcacgtccttgagcacggcggtcggggcgagcccctcgccctcgacggcgccggagctcgcgaagtcgacgaacgaccggaagtaggcggcgtcggcgcgggcgacggcgtcgtggatcacctgcgccgcgtgcttcagcggccgcccgaggaggtcccccaccgcggcccgcgggaacgcccagaggacgaggttgccgaagtaccccgccggcgccgacagccgctgccggccgtcgacggagatgcggatggtggagctctggagcgggttgccgagcccccgcgcccgcgtcatggtgcgccacacgtgggcgaggatggtctcgaaccggctgaacggccggcctcgtgc

SEQ ID NO: 47880 - DNA, 421 bp, Oryza sativa
  Clone ID: PAT_MRT4530_50606C.1
ccacgcgtccgcagattccatttattgggggattagcccacattaggaggctaattcgtttcattggttgccggctctgcataacaaccaatttttcaattgctttacggccaactgaccttttgttgactaggatttactcccaagtcaattggatcaaccggtcttctggtcatcctgaaaaatcgggaatttctcctggcaccatggcttttaaagaagcatgttaatctggtgttagccggtccttaatttttccttttttctaaaataaactggcagcatgtagcaagtatttggtccttttagggtaaaagattacaatgcccattataaatagctccctatgtaatgcactaaatggctcatgccgatggtgagtttgcgatctccccggctggatcagcatcgggcactataa

SEQ ID NO: 47881 - DNA, 348 bp, Oryza sativa
  Clone ID: PAT_MRT4530_50607C.1
cccacgcgtccgggcgcacacacactggcaatgattaaaaatggcgcggcctcgctgatggtgcgcctcctccacctgccccgcgccgcatccgcccccacctacccccgccgccgccaccaccttgccctcctcccctcgctccggctacgagtgccggcgcccgccgccgccgtcgccatgtcgagtgccgcggcggcgcaggaggtcgccgaccagaagcgcgcgctgcggtccgaggtgcggagggcgctcagggcctttacctcctagcagtgcgccagttaagtctaagcttttcaaaatgcatttttgaactcttttcgcgttaaagaatgctagcctttt

SEQ ID NO: 47882 - DNA, 687 bp, Oryza sativa
  Clone ID: PAT_MRT4530_50608C.1
atgggaggaggacctgctcggacgaagacctgcgaggacgaggagggaagggggacggcggcggggcttcgtcctcgcgctcgggcatgggaggaggacctgctcgggggcgttggaaccggccagatccgtgccgcccagccggatctggcggtggaccagccgacggcggggctgagcggtgtggcggcgatgtctggtggtggtggcagcggcgtcgaggcgttggcggcggcgaaggaaaccaccggatctgcgcctggacggcggctggcgggacggtggccggcggcggcgtctggtggcagggatggcgatgacggcaagggcagcgaggggatggcgtcgctcgacgacggcgacaaggtgcgggaggatggcgagatggcggcagggatggaagggcagcagtggctgtggttgtggcggtggaggtggcgaggggatggtgtcggtgaggcgaacctggccacgccggtggcggatccagcgctggaggagtctggtggtcgcgatgatggtggcgacgagttcgcggcgacggtggctcgggctaccatggtgggtggtctgcgtcgtgtgctgtcgaagctcgacgacggcgagaaagggcgagaggatggtgagatggcggcggggatggaagggcagcagcggctgtggtggtggcgaccgtcacaacggtag

SEQ ID NO: 47883 - DNA, 1210 bp, Oryza sativa
  Clone ID: PAT_MRT4530_50609C.1
ccggccgggctcccctccttctccccgcgttacaatcagcacacgctctctgctagtctgatcgctctcgccatcgcacctctgtctcgtcgaacaatggcctccaccgccgccgcttcctcccctttcgactgcgtcctctttgacctcgacgacacgctgtacccgggaagcgcgggcatcgggctggcgacgaagcgcaacatcgacgagttcctcatggcacggtgcggcgtcacggcggagcgggccgccgcgctccgcgtcgagctcttccgctcctacggcagctcgctcgccggcctcatcgctctcggctatgacgtgcacccggatgagtaccacagctacgtgcacgggaggctgccctacgaccggatcgccgccgacccgcagctcgccggccttctgcggagcatcccgcagcgcaaaattctgttcaccaactctgatcgcgcgcacatgaggaaggcgctgcagcggctgagcgtcgacgagggctgcttcgacgccgtcgtgtgcttcgagaccatgaaccctcacctcttcggtgaggcgccgtgcgcctccggcgatgaccgccccggcgtgatcctcaaaccgtcccccgatgccatcgtcgcggctctgcgcatcgccggcaccaatccacaccggacgctcttcctcgacgacagcgagaggaacatcgccgcaggaaaagctcttggcctccgcaccgccctggttggcaagagggtgaggagcaaggaggccgactacgctcttgagagcatcggcagcctccggcgagccatcccggagatttggggcggcgtcgccgtcgccgccgccggcgaacagctcgaccacggcgccgcggagaagacgaagggaatgaggtccgatctggactccatcatccagccaacgtcagtcctggcgtaatcggttcctaatccattcgcacataaacaaatcgccactaataaaagcaagtactgtccattaattatcatgtaaattattctgattcctgatgctgagtgcgtgtgcagtgtatttgtatatgggcctggctgacaaggaaatatgcatgtgtatatcagttctgatgatcagcttttgtttgctgtaaaatgtaaatggcactatgagcaaggaatttgtctttgattgctgttaaaaaaaaaaaaaaaaaactgagactagttctctctctccctcgtgc

SEQ ID NO: 47884 - DNA, 245 bp, Oryza sativa
  Clone ID: PAT_MRT4530_50610C.1
gacacaaaacgtctcccaatatgcttttttaatagatccatactactaaacatccacacccacacaagcaggcagttaaaccatttacatcagggggattgagattaaattatgaaaaggtcaaaaccattataaaggctcctatctgaaagaagggaatatcctttataaaacaggggaaataggggtggcatgggcccagcacaaacatcccatcatatccagacttgcccagcggcatgagg

SEQ ID NO: 47885 - DNA, 315 bp, Oryza sativa
  Clone ID: PAT_MRT4530_50611C.1
atggcgagccatcttacccttcgagttaccggaccaatggtgcctggaggttacgcgccaccgctcgccttccgcgtttccactccgtgggagcgtcggctgtcgggcgccggtcaacaggggaatggtcccgcgcgcccgtggagcggcaccgttgcggtcgcgcgcttccggtttcgcgggttgctaccgtgcatccgctacccgggccgctggtccgcgagatcaactcggttgcacgtgttggcgctgcaccaccactgccgacaacatggtcccgtggcaccaacccgcgggaaacatatatttctgtaa

SEQ ID NO: 47886 - DNA, 150 bp, Oryza sativa
  Clone ID: PAT_MRT4530_50612C.1
atgggggtgctgcatggagacggcataaacacgggggacaatgggcagcaaatggccctacacttcggggtggtgcatggagccattgttgtggttgatgtgttgctggaaaaaggtgtgaggcttgagctgaaccatggacatgcttga

SEQ ID NO: 47887 - DNA, 162 bp, Oryza sativa
  Clone ID: PAT_MRT4530_50613C.1
atggcgaaggtccgagaggtggcggccgcgggagcccatggccggccacttttggtgtccgtacccgttgcgatgaccgagttgagccggtcgacgatcggctattgggtcggtatcaaccaacgctttgcgcatcaagtgaaagatgcaccatttgactga

SEQ ID NO: 47888 - DNA, 585 bp, Oryza sativa
  Clone ID: PAT_MRT4530_50614C.1
gctaatttgcagaagctggagaaaaggcgaagaagactgctgctggggaccaaacttacaagacaagtagcaaatgaggtcttcggtccaggttttcacccggagaaatctcttgaagttgagttgaatgagggctccagtagcaacaccttcgagaaggtgaacggcgcccaaaggggacgcagcggatctgggcaagaggagccagatccggccgccctcctcaccaccaacgctggccgacaccaagaggagcgccggagaacgctagtggcagccgcaggatgcctgcatgcgctgcccaccgccggccaccgttggatccgcggcctccacaaccgctgccctattgctgtcgccatccccgccgccatcacccacaactccacccgcaactcacctcgaccaccaccatcgcccgtccccgccgccaaccactccaccagatccggccggaacggcgcggatctggcggtcaccgccgttgccgctctgggcagctccctagaccgcccgagcacaagaagacgaggagagccccgccgtcgccgtcgttgcggccgcgcggctttgccggcagccgct

SEQ ID NO: 47889 - DNA, 557 bp, Oryza sativa
  unsure (1)..(557): unsure at all n locations
  Clone ID: PAT_MRT4530_50615C.1
cggcacgaggtttttttttaatactggaaaatgctttgatacttcgccaatacgcatatatcgggatccgttgcctantggatactgagatggcagtttagggaagtatcagtgattcatagaccatagctgatttctttggcccagaactctcctttaaattattttgtaactgagtagtttggcctctgctgaaaactgaaatttaggctcttcccatcatttatttgcactattttgtactagtaaggagagtgtgcatttctgtgaaacttattgttcgtgcttttgactttgccttgacagccaacagtctacaattattccatataaattttgcctttgacctcttaaagagaaagaatgcctactactattagtacaataagtagcatctagatggctaacacttgaacaatggttaccttagaatgcctagaactagttacttttacaattaaggcatcattgataatgataatattgctcttggagatatatgcatgattagaccattgtagctggatcacatgttttctgcagaattttgcatttgt

SEQ ID NO: 47890 - DNA, 176 bp, Oryza sativa
  unsure (1)..(176): unsure at all n locations
  Clone ID: PAT_MRT4530_50616C.1
ccgccgggggggccgcatggnaccctcccgcaaggcagcncnngccgcgggnaggttccctggnnagccgtgnnnctgccgggnnagctcgccnnngccgtgccccgatgcccagtgcnccggtgcccgacgcgcctgnnnagcgtgcnntggtgcngnncggcgtgnnngtcacg

SEQ ID NO: 47891 - DNA, 462 bp, Oryza sativa
  Clone ID: PAT_MRT4530_50617C.1
atggcgcggaggacgtgcgccgggcggctcgggtgggagtgcggggacgctaggacggcgtcggcgacgatggcttggcacgaggccgggtcaggggagctcgcgcagaggttcgtggccgtcggggagagtaggaggaaggcggcgcccgcgcagaggcagagcacggtggctaaagagagcagcgtgaacgatagaagtttgcatggaataactctcacggtcaaggatcctctcacgtcgcccctccaggggcggctcgggaggcgacgacccggccgcccctctcccccacctcccttctccgcctcaccgtcgcctaagcggctgccggcaaagccgcgcggccgcaacgacggcgacggcggggctctcctcgtcttcttgtgctcgggcggcatcctgcggctgccactagcgttctccggcgctcctcttggtgtcggccagcgttggtggtga

SEQ ID NO: 47892 - DNA, 2178 bp, Oryza sativa
  Clone ID: PAT_MRT4530_50618C.1
atggagggtctgcacaaggcacctagagtagatgagagactgtcagctggagctccaaactgttttcacccggagaaatctcttgaagttgagttgaatgagggctccagtagcaacaccttcgagaagacgagatccaccccaatattcactccaatccaccccgtccccacccgaggacgcagcggatctgggcaagaggagccagatccggccgccctcctcaccaccaacgctggccgacaccaagaggagcgccggagaacgctagtggcagccgcaggatgcctgcatgcgctgcccaccgccggccaccgttggatccgcggcctccacaaccgctgccctattgctgtcgccatccccgccgccatcacccacaactccacccgcaactcacctcgaccaccaccatcgcccgtccccgccgccaaccactccaccagatccggccggaacggcgcggatctggcggcgacggtgaggcggagaagggaggtgggggagaggggcggccgggtcgtcgcctcccgagccgcccctggaggggcgacaaacgcctacccatgcaaacttctatcgttcacgctgctctctttagccaccgtgctctgcctctgcgcgggcgccgccttcctcctactctccccgacggccacgaacctctgcgcgagctcccctgacccggcctcgtgccaagccatcgtcgccgacgccgtcctagcgtccccgcactcccacccgagccgcccggcgcacgtcctccgcgccatccttgccacgtctctcgatcggcatgacgcggccgcggaagcggtggcgggcatgcgccggcgcgccagcgacccgaggcaccgcgcggccctggaggactgcgtccagctgatggggctcgcgcgcgaccgtctcgccgacgcggcgggcgcgcccgacgtcgacgtcgacgtcgacgacgcgaggacgtggctcagcgccgtgctcaccgaccacgtgacgtgcctggacggcctcgacgacgggccgctgcgcgactccgtgggggcgcacctggagccgctcaagtccctcgcgagcgcgtcgctcgccgtgctcagcgccgccggccgcggcgctcgggacgtgctcgcggaggccgtggacaggttcccgtcgtggctgacggcgagagaccgcacgctcctcgacgcgggcgcgggcgccgtgcaggcggacgtggtggtggccaaagacgggagcggcaagtacacgacgataaaggaggcggtggacgcggcccccgacggcggcaagagccggtacgtgatctacgtgaagaagggggtgtacaaggagaacctcgaggtggggaagacgaagcgggtgctgatgatcgtcggcgacggcatggaccagacggtcatcaccggcagccgcaacgtggtcgacggctccacaactttcaactccgccacgctaggacagaaagctgtcaaggcatccattgccttgtcgggcgacgggatcatcctccaggacctcaaggtggagaacacggcgggcgccgagaagcagcaggcggtggccctccgcgtgagcgccgaccgcgccgtgatcaaccgctgccgcctggacggctaccaggacaccctgtacgcgcaccagctccgccagttctaccgcgactgcgccgtctccggcacggtggacttcgtgttcggcaacgccgcggcggtgctccagggctgcgtgctcacggcgcggcgccccgcgcaggcgcagaagaacgcggtcacggcgcagggccggaccgacccgaaccagaacaccgggacgtccatccaccggtgccgcgtcgtcccggcgcccgacctggcgcccgccgcgaagcagttcccgacgttcctgggccggccgtggaaggagtactcgcggacggtgtacatgctgtcctacctggactcgcacgtcgacccgaggggttggctcgagtggaacggcgccgacttcgcgctcaagacgctcttctacggcgagtaccagaaccagggccccggcgccagcacggccggccgcgtcaactggcccgggtaccacgtcatcacggaccagagcgtcgccatgcagttcaccgtggggcagttcatccagggcggaaactggctcaaggccaccggcgtcaactacaacgaggggctctga

SEQ ID NO: 47893 - DNA, 3312 bp, Oryza sativa
  Clone ID: PAT_MRT4530_50619C.1
atggacgacatcaccgcttcgctcgcgccggagctcctctccgagatcctcctccgcctccctccggacgagccagggcacctcttccgcgccgccctcgtctgcaaggagtggctccgcgccatctgcgaccccggcttcctccgccgctaccgcgccttccacggatcccctcccctgctcggcctccttcacaggcgccaagtcctacagggtgatcccgtccgccacctcgcccgcaccaccgcagtgcccctcttccccgatcccacctttcgccgggccctcgattgccaccatggccgcgccctcctccacgcgtcggacgacggttggtatctcattgtctgggaccccgtcacaggcgaacagcaccgcgtgccagagcctggcatcccgtggctgatgtacactgccgcagtgttctgtgccgtgagtggctgtcccttcagagtggtctttgtggccacggacgatgaggacgaactcgttaaggcgagcgtgtactcgtcggagacgggtgcatggagcaagccagcaattcttgattatggttatcaaacctggcaagagcgtttgcaagccatcactagaggtgaatcataccgtacaccttatgtccagcccaggcgaggagcccttgtcggagatgaaatctacttcacacttcggaacgagaatgcaatcatcaagtacaactggggcatgaactgcttttctaagattgacccgccgatacgagaagtgtatgacattgccctcatggagatggagaacggctcactgggttatgcctgcattcagggttccagcctttatatggatcgaattgaagttgatgctttagaagactgtaatgttgatagtgaatccagtagtgattctgaattggatgatttaatcttaagaatgcacaggaaagaggttgttcatgagattaaaaggcatttgaaaaaatcttatgatttccatacatccaagtgtaccctgatcattaagcctaagtttcctacttgtatttataatttttacattgcattgatgtttgagttatcttgctttctttgcccaaattcatctttgacacctagcaccaagtatctgacagtttttgaggatattgaaaatctgagaaattatgattggtcaaagttcatttatgattggactatgacttttctgaaaaagttcttcaagtctaacaaccttggagggtgcttattctattgggctgcgctttatcttgaccatgttgattttggcaagaagaatcctggaaatagcactcctcgcattgctgtttggactaagaacatgatacaaacttactctgatcttgacaaagttgatgatgataattttggtcttaggcctcttagagattttaaatctgtgtgttattatcagcctcatcctactgctgagagaagaatttcatttaaagagaaacttgattctgctctaggttctgtgttgcctcttagtatgaaagagaaattatgttctctgatggaacatcattgttctgaagttcatgctgctgggagtcatacttgtgaagatgttcttattgatgctctagttctggttgctgaagatagtgttacaccctcagataaagttcaaaatgatgttgatgatactaatactgaaggttgtaatgctgttccttctagatttgatgataatgctgatgttgatgcttcaataccagatgatgttgttgtctgtacacccattgaaaatgatccatgtgtcaactcttttgttgctaatggtgatgatgttattgcatctggtcatgctgctgcacttatctcatcaagtaacagagattttgattatgagttgttgactcctaagagtgcttttgtgaagaagttcaaatattgtgctgatcataatttggctggttctgctagtgcaaccattgctgcttctattcataatgttgcaaagaagtttaagacaagatttccagaattactaaatcaaaatgccagagacaatattattgatttttcaaggccttcattcaaattgcttgattctgaagatgatgttagtagttctaatgatgatgccaataatcagttaaatgaagaggataatcaagctcatggagatattactcctccttcatcattgctgtgcaaatcttttcgatctgtccctgattctattgatgtcattgatcacaacaatataagaagtaatgagaactcagctgggattaatcaaatttcttcaattttttccaacagggtatttcaagatgtgactaactctccagatgttgttttcttgggtgaaaataaatttccacaaactgttaaagaatcttgtgttaaaaccgaagagatatacaatgcaaccaataatctatcacggtatacacatgggatgagctcttcaggcggaaaattacctgctcatggtcctagaagaataattgttcctagcaggcatgcttctgatccatttgttcctgcaatgaaacgtcgttttctagtgtccgatcaagagaacagatattacattgctctctgtcgcttagcagatagttccaagtggcagagttatgatgctgttgatatcgacaatgtcagagccaagttttctagctttggccattctctcaaaaagactggtgttgttttgccatttgtcatgtcagttttctgccgctttttgtttcaaaacaatcatccatcaaaatctaagaagcattatttcttcccatccattggtgcacaacttattcttgaccctgattttgttgatcaagaaaaagtgaaaaaatctttccttggagctgctagtgctcggccactacacctttgtgacatgctttttttccctatactacatggtcagcactggtttgttctcgttgttgatataaaagataggatgctggtgtttttagattcattgcatcaaccagatgatgagttttttgaaccaattctgcctttgctgttaaaaaatttgcagattgtgtgggataaatatgaacgcactccaatgaacttcagcacttttaaaattaagttcccacctgttccacgccaagaatacagttttgattcaggcatattctcaatgaagttcatggaaatttggtctccaagaattattctttctaatcaattcactggacaaaatatcaacaatatccgcgtacagtatgcgaatcagatgttttttcatccaaacaacaagatgttgcaaaccgaagttgaaaatgttggtgtcaattggtttgattcagcaaggtttccaagcaatcaccgtgctattgatgcttga

SEQ ID NO: 47894 - DNA, 977 bp, Oryza sativa
  Clone ID: PAT_MRT4530_5061C.1
atgatgaacatgcagaaccaacttttacattcatttgtctagacacgctgggtacagtgattcagaggtacaagatagtgctgccaaacaatggagagctagggacaagctcaactaaagatgtcgaacccaaggataataagcaggaaggaagtcctgaagagttcaaaaacttgcaagatcagattggttatgttgttcgtcacgcattgatcaactagtcaggagtgcttgtcaatactttaactaatatgattaaatatgtggttgatggcacgatagttgagcatcaggctaagggaccagtttttcttccagaaggtgtttttccacaatacaagactctcagttctgataaacatcggcctatctcaggtttggccccagaacagccgatagtgtcagtcttagctcctgggaaacatggtgcgtcgacatcggcgccggggcaaccagggtttaatcctcacgttctggtcaaacaacaaccgcaacatatagggcaaaacatcccccgaattactccagatcaagtcgatcaacctgttggctctcaatttgttcctgatcaacatatccatatggtgcatcagtctccttagcatcacatggggggcaatgttaacttctagtatcagcctcactcaccttaggtgcagtatcggctagggggatcacctctaccccaatatttgcctcactataactagttagaccaagtgcaacagcaatttcagggggtacctcaacagaagcctttggctgatatgatagccgacatgatgagggatcagtttgggctctactcagatgacagcagcagcccccaccatcatcatattcctcatgtttttatcaaaactggttaaccaggtaccaaatagctgagttttattcagaattggtttaatgtttaaagcacatatcacaatttttttgaaaggaatcagcacgagactgtgctatttcattagata

SEQ ID NO: 47895 - DNA, 311 bp, Oryza sativa
  Clone ID: PAT_MRT4530_50620C.1
aaatatgaaagataattttatttctatttatatcaccccaagtttcacatggcacattcgatgattcctgagctttttttttcacttccgaacttcaattttgagaaaattcagttcaagacaccgccaagaggaggttttgctttcgggtgctcttttggaccaagaggttgattccttttgttgatggcaagtttaaagccaacagagcttgagcttgagccagattccggtctaagttgagattgccaaactgctggaggagttactggtgcgctttggcctggcccacgcgtccgcccacgcgttcg

SEQ ID NO: 47896 - DNA, 390 bp, Oryza sativa
  Clone ID: PAT_MRT4530_50621C.1
gaaatgagagatattttgtttctccatacagaattagtttctgtctggattgctgacgtaactaaccatttcctatgagacatgcagaatcaccatgttgaccccatgtgtgatgatggatttaaggatacatgaaagcagattttgtgtgactttgaaactgagattgtttggaccttagaacgctgaacgaggttagattgttgctgatttttatgtttgaatgttgaaaaagaagtttagttaattccattaaggttatgcttataccatgtagaaggttccatcggaacattattatttatttcaagctatttcggctctttcttaatcttcgaaaagacagaaatttcgtaatggaaaggtaggatgaaaaaaaaaaaaaaaaaa

SEQ ID NO: 47897 - DNA, 480 bp, Oryza sativa
  Clone ID: PAT_MRT4530_50622C.1
atggcttctttaggcaatggagcaccaagttttcggccaccgcgtgcaccggtatctgccggaaggctatatcgttgtccggtgtgccccggtcctgtgatcttgtattcgtgccaagatcttaggaaccatctatgtataattcacccaaacgaggctgtagagttggtgacgccgtttatgcggtacatagaggcttctaggcgtgggagggtcggcctcccgccacggccaccgacctcggccccagtggtgccacaagcacggatgccaaccccaacagtacaaaactcgtttgtcccacttcctcccaaccttgccttctgggaggagtaccgcaagggaggaagccgtcctgttgagatagacttcttcgtaccagtcattgttgtgtcggcgcttgagctggttgcaccggccatggtgagtggctcaaatttatcagactcagagtcatctgaacttgatattctggtctag

SEQ ID NO: 47898 - DNA, 379 bp, Oryza sativa
  Clone ID: PAT_MRT4530_50623C.1
ggggaaacgaaaaaaatcattattggaaaaacaacaattttttcttcaacttcttaggggacacaacaccaactcgatcattattttggggcactaaacccattttccccaacccaaagaaaaagaactggggggccacaaatccatccaaccacaattaacccccggtaagctacgggcccccactttaattgccggggacaaaattgggggggtacccccaggcgttgttgttgacggggtcggggagggggtccgccaggtttttgagggggcccttgccggggaccatggcctggaccaaaaaccccaacatggggaacatggggagggggccgttcttgagccccttcaccttgggccccccgaaccccttggg

SEQ ID NO: 47899 - DNA, 237 bp, Oryza sativa
  unsure (1)..(237): unsure at all n locations
  Clone ID: PAT_MRT4530_50624C.1
cgaccacgcgtccgagacgctgacatcagtcgcaactccacatcaccccgncacaaggaatgaccacatctcctgagcagccaagcacgacggaggaggggagcaacgacagtgccgagctccccctatctcacctaccactggaggagggacagcgacggagacagcagcgatgcaaacatgggcgacgcagcggcggcgtggacggcgacgcctgcatggatggcccgacgacgg

SEQ ID NO: 47900 - DNA, 1053 bp, Oryza sativa
  Clone ID: PAT_MRT4530_50625C.1
atggcgcccaagtgcaaggcttccttcttcctctgcagcctcctctacttgctcctcctggtgctcgccctgtacgtcgttgccctcgccgtgtcccctttctactcgggtagctcatgcctggaggagagccttggcagtggtgccgttgcacatctcacggccgccggccatgctggcaacaggcgcaacgcctcgtcgctgccggtggcacggctgaaaccgatgccagctgatgatgccgcgtcgatcgggctgggccatattgtgttcggcattggtgcctcgtcggagctctggaagagccggagggagtacatcagaacatggtggtggccggcgctgatgcgcgggttcctgtggctggacaagccggtgtacgagttctacggcaggacgggtgaaatcgaccagtacccggcgctctacggcagcgacgaccacatccgcacgtgcatggcagagctgggcatgctgcagacggcggcgctgaggcggctgttcgaggggcccgcgaggctcggctggtgtggcgcagctgtcggtgtccacctctccgtcagcggtgacggcgagctacgcgtccacgccgttgaagagcatgcgcagcagctcgctcagcggcggcggggagacgaggcgatacaaaccagatgtaatcaaaggagatctggactcagttcgaccagaagtgaaggaatattattccaatatggtaaaggtactcaaatagtcgatgagtcacatgatcaggacaccaccgatttacacaaatgtgtagcttttatcactgagaattcggccatccccaacaaatctaatctgtgtatctttgctcttggggcccttgggggaaggaaattctacactgacaacacaagttcaaattttcgttcatttgtggttttgtactcaggaaattctacactggcaacgcatgctaaagaaaacatacagaagcagcatcggttgcctgcggcggcctccgatctagtcattagtcctcttgcagcggcaccttgccggcacaagatagccaagtttgtgggctag

SEQ ID NO: 47901 - DNA, 970 bp, Oryza sativa
  unsure (1)..(970): unsure at all n locations
  Clone ID: PAT_MRT4530_50626C.1
cttggcaggggantttttccggggcaaccgnaaggntcccgttggcncntngtntctnccggggncntcctnanaaatnaccccctgtagatattcctcccaccgnaaagcatgtggttcatgtctttntacgnggttaccccanatttgcgtcngtttggtgnatccgaggaaacaaaattcantccaatcaaatncaaagtcccagaacctgnccctctctatgaangtgtgccctactatcnagtgtccaaaggganacaggttgagtcccctgggccccaagagncccntccagngaanggaattgtttgaatcgccttccaccccatttagttggccantggccgaattgccttccgagggttggggcttggattccgccttgaccaaccccgttttccggccaccttttggcttggccgncttggttaccattggggtttttctccaccccccctcttggtttttccaaaagccttttaattggggttccgaacaaggggtttttgggggcggggcggtttccccggttccgaaanttccccaaaagggaaccggccccgaattccaaaaattttaagtttgtttatgcccccgttggaattgtttggggaanaaagttggaattcttggttccccaaattaacaaaaccgcctttccctggaaaagccttggttattaattattccaaattttaattaaatttttggttccattggttccctccccnnaatttggaaaaaatttggggtcccccctggccccaaaccaatttttttggccttggggggccccattccccntgggaaaccgccccttgtttatttgaaaaacaaaaaaaatcctttattcctttcccncgaaannggccagttaattnatttgaaattgnaatttccccagcccgtttatttttggccaattttcccanggggccgtttcttggcccctttggggggttttttt

SEQ ID NO: 47902 - DNA, 712 bp, Oryza sativa
  unsure (1)..(712): unsure at all n locations
  Clone ID: PAT_MRT4530_50627C.1
gcggccgtttgcgccgatgttcagttaaggcacgctggcaccgacacggttttcctcggacttggaaaccgggcacgtgagcgcaaacggcaattgatggtggacgttaagtctgctacttctattcacggctacctctcatggcttttgactactgtttatgcctgtgcgcaggctgcgtgaatgttgtagtggtaattcgtggatgcagcgattataccaatttcaactacacggaaactagctgtatagacctatacgattaacgctcanagctgctaatgttacgactctactgataagcgtaaatgctggcgtaaccgcctggcaacggtgtaccggtctctgcgaatgtgccccgagggtgcagaccccacgcgtccgaatatgaaatgcccangcaaaatgttgtntgcgctgccctacctagtgtcttggatgcttttgtatgttcttctggtctgggggattggtctgntacaaaatgctgcagttgtctgacgcaaaaccaccgcccaccttgccnntgcgccacgttgaacatttggacttgaaacaccacacttgattctgggtctgtatttcgagtccagtttgtgagtgacagatcggatgactgaaacacatacagggacacatgtgttgaagtttctncagtcccggcgtcctnccctcgaaataaangtttccttgttttttaaaaaaaaaaaaa

SEQ ID NO: 47903 - DNA, 429 bp, Oryza sativa
  Clone ID: PAT_MRT4530_50628C.1
atggaaactataaggactactcggatcgtatccatacttgtctccctagttctacttggacatggggacatctatgggtataaatacatgacccctaggaggagagggaacagaacaacacacagatcgacatacaagtcagaatagacaccacatgccgccaaacatcgacatcagagataagcctagacaacccaatatggtgcatacagaggccgacaaaagggatctagcgccatctctgatctcaatgagttcctactcgggaaggaagattaccctatcgtcgactatgtgttggttatctatgccaccaagtcgacaacagctagataggttatcccaaatattgtactttctcgcatattccctggtaccgacagtctccataccatgcaataaccgtagtcgagatctcaaacgtcgaca

SEQ ID NO: 47904 - DNA, 390 bp, Oryza sativa
  Clone ID: PAT_MRT4530_50629C.1
atggcttccaacaaggtagtgatctcggcgttgctcgtcgtcgtcgtctccgtgctcgcagcaacgacgacaatggcggaccaccaccaagaacaggtggtctacactcccggccagctatgtcagccaggaatcggctacccgacgtacccgctgccgcgatgccgggcgttcgtgaagcgccagtgcgatgcgctcaaccacatgctgaggatcatctacagggagagcggcgccgccgacgctgggcaccccatggccgaggtgttccgcggctgccggagaggggacatcgagcgcgcggcggcgagcctcccggcgttctgcaacgtggacatccccaatggcgtaggcgccgtggagatcaatttcaacattgcgttctcttaa

SEQ ID NO: 47905 - DNA, 330 bp, Oryza sativa
  Clone ID: PAT_MRT4530_5062C.1
gatcagggaaaaccagtccaccctttaaccattttccaactttaataaaaaaattctcgtttccccaaaaaattaaaattaaacaagattttcccatcgggggccacatgccacgtctcctatttgggcctcatttttggacccgaaataacccccataaaccagcctaatttttttccccttttccccataccccattggaataattatgccaagggattttctccgtgggcttaatgatcaacccatcataattttcggtgggggcaacggattattcaaagaagactggagaaaaaaaaatggggatttgaagaaggaaaaatttgg

SEQ ID NO: 47906 - DNA, 1252 bp, Oryza sativa
  unsure (1)..(1252): unsure at all n locations
  Clone ID: PAT_MRT4530_50630C.1
ctccatttcctgaaccactttagtctttatagctatatataaaaccacccatagatgggagagcttctatccctctcatacaaattaacaatcaagaatttctgcaaacaaaaaaaaatggcttccaacaaggtagtgatctcggcgttgctcgtcgtcgtcgtctccgtgctcgcagcaacgacgacaatggcggaccaccaccaagaacaggtggtctacactcccggccagctatgtcagccaggaatcggctacccgacgtacccgctgccgcgatgccgggcgttcgtgaagcgccagtgcgtcgcccccggcacggtgggacgagcaggtccggcgaggctgctgccggcagctcgccgccatcgacagcagctggtgcaggtgcgatgcgctcaaccacatgctgaggatcatctacagggagagcggcgccgccgacgctgggcaccccatggccgaggtgttccgcggctgccggagaggggacatcgagcgcgcggcggcgagcctcccggcgttctgcaacgtggacatccccaatggcgtaggcggtgtctgctactggctaccgggaactggctactagccttctgtatgtagctagttattggctgttcatgtgtgtgatttggttactaaataatttgtgtttccttttatctggaagcatgtatgatgaataaatgatgaactcagatgttcttctgtttaaaaaaaaaaaaaaaaaaaaaaaaaagcggccgctttttnttttttttttttcttttttttttttttttttttttaatacaaactgcaaataactcatcatgagcttagccgtttgcatttgacaaaaagttataagatctcttgtttattggagcagtggagaatacatcagccaagcattatcacttggaaagtacattccaaggaagaaatttgacaaagcaactactaaaaccattgccaaatgataatcatgattcactctcctttgcttgggccattagctcagcttgcattctctttatctcctgttccctttccatcctctctttcttctcgtcctggtggagggcgatccagacgtggaccctgtccatggactgccagaagaggaacgcgccgaaggtcatggcgaagtaggtcgccaccttcaccatcttccttcttctcctccgatctcccaccctttcgctccgcggcggatttgggatttggcaacggcggcgtcttcgggacaaggggaaggcccggccgg

SEQ ID NO: 47907 - DNA, 753 bp, Oryza sativa
  Clone ID: PAT_MRT4530_50631C.1
atggcgaargtagagccgtarargtgcgggcgcggcggcaggraggatgagggcggtggcaggraacgttacggcggcaggggagggatgcgcaagctatatcaccgcctccccgttgccgcgcgtggaattggatcgatgtctcggtctcggcagtcggcgcagcacggaattaggatcgtcgcgcagcagcaggaggcggcgaccggcggggagaatgggcacggggacgggcagcgaccgacgggagagaaggggcgccgagacaggtggcggccaatggggaggacgaccgacgagcggcggcaggcggggagaagggcggcgcacctcaccatcgcggcccccgccctcgtttccaccgtctccacggccacgcacctcgtcgcgttcgagctccgcccgccacggccacgcaccagcagctgcaacgctgtctcctcctctactaccgccgccgcatgtttcccctcggcgaaggcgggcctcacgggtggaggagcatggccaccgccaccgccacaggccccctccctccgcggcattcaggtcatcgcctcgcgggcggaggagcatgcccgcccttccccaaacccaccgccgcccatggagctcccttcgccttcctccccttcattgccggtgccgcaccgctgcgcctggctgcgccgctccctcctctctcgccggcagccggccaccgcgtgccgctgcctctccgtcgccgggagagaggagaggagagatagatga

SEQ ID NO: 47908 - DNA, 867 bp, Oryza sativa
  Clone ID: PAT_MRT4530_50632C.1
atgggtggcgagcagggacagcgggtcgtgtcggcgtccggcgttgatcggcgtccggtctccaggtggtgcagcatgatggcgatggcgaagtcggcgcagcacggaattaggatcgtcgcgcagcagcaggaggcggcgaccggcggggagaatgggcacggggacgggcagcgaccgacgggagagaaggggcgccgagacaggtggcggccaatggggaggacgaccgacgagcggcggcaggcggggagaagggcggcgcacctcaccatcgcggcccccgccctcgtttccaccgtctccacggccacgcacctcgtcgcgttcgagctccgcccgccacggccacgcaccagcagctgcaacgctgtctcctcctctactaccgccgccgcatgtttcccctcggcgaaggcgggcctcacgggtggaggagcatggccaccgccaccgccacaggccccctccctccgcggcattcagccgcgcggggcctcgtcccttccgccgccgacgccaatggacgcggcggccgccgccgccccacgcggcgtcaccgagtggcgcccgagctcctcctctgcctccggcggcccgctaggcgatggcgcgccatggagcggcggggagaagggcggcgcacctctccattcccaccgccacgcggagtcggccggcgctcagtcgagcacggctgcgccggcgtcgcccgcggcagcctctcctcgtgtcgcccttccccaccacgctggtccatcctctcgatccccaccttcgccggccatcctctccatccccaccgccgccggcctcctcttctccacaccgccgcgccggccttcccaatccaccgccgccccgtga

SEQ ID NO: 47909 - DNA, 866 bp, Oryza sativa
  Clone ID: PAT_MRT4530_50633C.1
atgggcggcggtgggtttggggaagggctggcggcggcggggatggtggtgagatcagcgcggggtggaacagggaggtcggcgcggcgtcaacagcagcggccgggcgcggcggctcggcagtgcgcggccaggaggtggcgtagggggaggaatcggggcggcgccgggcagaggagggagggaaggggagcttcacggggcggcggtggattgggaaggccggcatggtggtgtggagaagaggaggccgacggctgtggggatggagaggatggccagcgaaggtggggatggagaggatggaccggcgtggtggggaagggcgccacgaggagaggctaccgcgggcgacgccggcgccgctgtgctcggctgagcgtcggccgactccgcgtggcggtgggaatggagaggtgcgccgaccttctccccaccgttccatggcgcgccatcgcctcacgggccgccgaaggcggaggagctcgggcgccgcccggtgacgctgcgtggggcggcggcggccgccgcgtccattggcgtcagcggcggaagggacgaggccctgcgcggctgcggcccgcgaggcgatggcgctgggcacgctcctccgcccgcgaggcgatgacctgaacgccgcggagggagggggccgtggcggtggcggtggcggtggccggaacagatcgacccgggcgataaaaggggatcggcgataacagggagtcgccgaggatgccgaggtcgacgtcgacgtcgtccgcggcggagggcggtcgccactccctctcccgctggccgccgtcagctgcgcacctctccctccgtccgtcgccatcaagtccccgcccatggctctcggccat

SEQ ID NO: 47910 - DNA, 821 bp, Oryza sativa
  Clone ID: PAT_MRT4530_50634C.1
tcagcgcggggtggaacggagaggtcggcgcggcgtcaacagcatcggccgggcgcggtggctcggcagtgcgcggccaggaagtggcgtatgggggaggaatcgggggcggcgccgggcagaggagggagggaaggggagcttcacggggcggcggtggattgggaaggccggcgcggcggtgtggagaagaggaggccgacggctgtggggatggagaggatggccggcgaaggtggggatggagaggatggaccggcgtggtggggaagggcgacacgaggagaggctgccgcgggcgacgccggcgcagccgtgctcggctgagcatcggccgactccgcgtggcggtgggaatggagaggtgcgccgcccttctccccgccgctccatggcgtgccatcgccttgcgggccgccgaaggcggaggagctcgggcgccgcccggtgacgccgcgtggtgcggcggcggcggccgcgtccattggcgtcagcggcggaagggacgaggccccgcgcggctgcggcccgcgaggcgatggcgccgggcatgctcctccgcccgcgaggcgatgacctgaacgccgcggagggagggggcccgtggcgatggcggtggccggaacagatcgacccgggcgataaaaggggatcggcgacggcggtaggcggaacagggagtcgccgaggatgccgaggtcgacttcgacgtcgtccgcggcggagggcggtcgccactccctctcccgctggccgccgtcggctgcgcacctctccctccattcgtcgccatcaagtccccgcccacggcgctcggccat

SEQ ID NO: 47911 - DNA, 1226 bp, Oryza sativa
  Clone ID: PAT_MRT4530_50635C.1
atggggatatggcgctccgggacaggcggcgaccggcggggagaatgggcacggggacgggcagcgaccgacggggagaaggggcgccgagacaggcggcggccaatggggaggacgaccgacgagcggcggcaggcggggagaagggcggcgcacctcatttccaccgtctccacgcccacgcacctcgtcgcgttcgagctccgcccgccacggccatgcgccagcagctgcaacattgtctcctcctctactaccgccgccgcatgtttcccctcggcgaaggcgggcctcccgggtggaggagcatggccaccgccaccgccacgggccccctccctccgcggcgttcaggtcatcgcctcgcgggcggaggagcgtgcccggcgccatcgcctcgtgggccgcagtcgcgcggggcctcgtcccttccactgccgacgccaatggacgcggccgccgccgccgccccacgcggcgtcaccgagcggcgcccgagctcctcctccgcctccggcggcccgcgaggcgatggtgcgccatggagcggcggggagaagggcggcgcacctctccattcctaccgccgccggagtcggccgacgctcagccgagcacggctgcgccggcgtcgcccgcggcagcctctcctcgtgtcgcccttccccaccacgccggtccatcctctccatccccaccttcgccggccatcctctccatccccaccgccgccagcctcctcttctccacaccgccgcgccggccttcccaatccaccgccgccccgtgaagctccccttccctccctcctctgcccggcgccgccccgattcctcccccctatgccacttcctggccgcgcactgccgagccaccgcgcccggccgatgctgttgacgccgcgccgacctccccgttccaccccgcgctgatctcacctccatccccgccaccaccgagttccccgccgccgccagcccttccccaaacccaccgccgcccatggagctcccttcgccttcctccccttcattaccggtgccgcgccgccgcgccaaaccgcctccgcacgccgcgcctggctgtgccgctccctcctctcccgccggcagccggccaccgcgtgccgctgcctctccgtcgccgggagagaggagaggagagatagatgaagaggggagacggggagagaggaggaagaagaggagggtgagttggactgacat

SEQ ID NO: 47912 - DNA, 501 bp, Oryza sativa
  Clone ID: PAT_MRT4530_50636C.1
gcacgaggcacctggccagtctccaccacatcccgaatcccggcctcccaccaccccgtcccgctgcggcctccgtcatcgacagtctgtcgccgccgcatctcctttctccccttcattaccgaggggcatctctatctacaaaaggaaaaaaattgaggtaggacagaaggagctggccacatgcctgaagagaactgatcatctcagtgcatgataactgttgctcctcgatgaccaagtccctgtggaaggctttcaattttggcaagttctgaatttgagcgagactgaaggggaactcaattgtctaaaaaatgaaatggaaattgctgtccatggtgactctattgaccattgctcagatcaaagaatcatctactcggttggttaagaatcatgatatgctgtatatgccctccaaccttggtgacctgaaggaagtggttgttcatattcagagggatataaaaactgttggtgattccatgtctatcaaga

SEQ ID NO: 47913 - DNA, 730 bp, Oryza sativa
  Clone ID: PAT_MRT4530_50637C.1
taagtatggatccaccctaagcgtatggcttagagctgttaggtggcgagcctatgccttaacctaaagttgtggcgggaacaaatctggcgttcacgagccccaaaaataagggctcgatataccggctcgaatcgagccgatgcatcgagtgcatccaccctgcattgccccataatctcaaatccaaaacatcaattacagataatgaactcccgaatcaaccaacatcaatcacaaaaattatagactatgaactcccgaatcaaccaacatcaatcacagacatcacacaacaaacattgaaataaagatcaaagaaatcacagacatcaccgctgctcaccgtcagcgtctaccagatccgccaccgctgccgccgtcactgggcttccacggcacccctcccacagtcgggccaccgggaagtaggggccgtcgcacctacgctgtatgggccacagcctccacgccatccaccacctccgcgcctcccttcccgctggatttggcggagggacggcaccgccgcaactcccacccctgccaggccagtgccgccaccgccgcccttcctcccgccggatctggcgaagggtgggcgcctctgggtggctgccactccttgtgccgacgctgccgcacgctgcctctaccgccgggagagaaagagaagagaatgtgaagagaagaggagaagagaagaagaggataaaaacccacgcgtccg

SEQ ID NO: 47914 - DNA, 462 bp, Oryza sativa
  Clone ID: PAT_MRT4530_50638C.1
ctttttgtttaaacttaattgagaagacattatgacaattttcaagttaaagcactaggggcttcccatttggaggtgtgagttcccttcacctctgtttctacttgacgcgatctacacctttctttttttggcttccaaatcttctatggtctttgctctccatcctgatttgttgtatgcttcttctgtgcaatgaagctaacaaaaagtccaaagcagagctttgcttcagagattctaaattcagttattttagctattgtaacatgtaatagtcattgcttattgtgttcttggctcaacgtgcagctctccaattatgttccctttttcgttacaacaattcagtttgaatgtggacccaggttctagaatgttttatgtataatgtttttagttgaataaatatccataatccatatatgactatgcataatttccagtgaagaaagtactatt

SEQ ID NO: 47915 - DNA, 470 bp, Oryza sativa
  Clone ID: PAT_MRT4530_50639C.1
gcacgaggctcacttcttttctgagccatggatatgcttctctgtttcgtggagatcttctccatcctttgttgctgcatcatttactactaccaccttcaaaccaagaaagcaagtgcttcggagccgaccgaatggcccgtgctgggtcatctcttcggcatgttcgccaacatccaccgcttccacgactgggccaccgacatcctcgccggcgggtggcacaacttcgaggctcgcgcggggctcaccggcatacggttcttcatcacctgcgacccgtccaacgtgcgccacatcttcacgtccaacttcgcaaactaccccaagggtgacgagtacgccgagatcttcgacgtccttggcaacggcatcttcaacgccgacggcgagtcgtggcgcatccagagggcgaaggtccagatgctcatggccggcgcacggttccgcgccttcgccgcgcggagcag

SEQ ID NO: 47916 - DNA, 456 bp, Oryza sativa
  unsure (1)..(456): unsure at all n locations
  Clone ID: PAT_MRT4530_5063C.1
agacaaaagcccagggcccggctttttaaaaaagccaaatcggcatcttcctgctggggttgccagcaaacatttttgtatcctccacgcagggatggcagaaacaggggaaacaaagttcacaattaaaacgtgcaagagactgggcagataaacaacaagaaactctaagtaagctacaggagacaagcaaccccaaaaaccaactcttcggaaaccaaacagaaaacagcagcttcccagggacttctagtattagcccacacccgtcctggaaggtctaagagtcgccaccatccgcttnatcttctccgctagtgtttccagtttagttggcttcccaggacgacaaagnttntttcattgagctatggcacgagtagcaaagggaagggttagggtgcgccgcctggtgatgggntttaataccacacttgaagcatttgatcttaggag

SEQ ID NO: 47917 - DNA, 1187 bp, Oryza sativa
  Clone ID: PAT_MRT4530_50640C.1
gcgaactattctttcgccttttactaaagaataccgtgtgcgcgccgcacttagcagcatacgctaatttttggagggaaccgactcttctgaggagggaagtttctcgttctgattttgtctgctctcctcctgaccgaagggaaggatatggaatcatctgatgctgggcattttttttctttttataacgctccctctgttttttcattgaatgggacggttaggatttgttgtacttctcaatgcaatgatgatgaattaatgtatgacgtggctcatcttaggtgacatctcaagattaacttttcactaatgtagatgaggccgagaaggcgaaaagaagttgttgggttccgaggattaggcccacataagacgtaagcccacttccaatcttccattccttccacctcttccgtcaccacgccgccgcagccgcacgcgcagcagggtggaagaagaagaagaagaagaagaagcggaaggcctcgtgcaggatgcaggcggtgagaaccctggtgctgcggcacctgcgtcttgcctgccgccgcgcgccgccctcggctgctgcctgtggtggcgcgaggccggcggtgtaccgcgtcgtcggcgtcgcccccggccaccgggggatggccgcgtcggcgggccaggagggtgggccgccgcgggatttctccgagggcgctgtcagggcgcgcgtcgtcgagctcgtcaagaagttcgacaggatcgacgccgacaaggtaactgagacagcagattctctatgggacctgagtttggacagcttagatcgggtggaactcgtcatggcctttgagcaagaattctccgttgaaattcctgatgacaaagccgacaagctttcttgctgcgctgatgttgcaaaatacatcatatcttaatcccaatccaacaaaagtaacgctgggagcatttaaattgcaagccatcacaaagcagattttttgcgccccttgaatctcagccacaaacggcatttctattttagataatgccacaaagggaacttttgttgccatttttgattatgttgtagctccaactatcaagtcaaatgcatcagagctttatgtagtgagaatatttgtcgatgactgaattactgatacttgttatatgcaaggtttcaaccgttaatcatggttgatgtttattat

SEQ ID NO: 47918 - DNA, 216 bp, Oryza sativa
  Clone ID: PAT_MRT4530_50641C.1
gtgatggtgtgttgttgaggggtgcacaatgactggcacacaaaaaggttgcacagtgaggctgaggatggtgttgatgtgatgttgcctgtgtgctgttgatggtgaagtgcaatgtgctgttgatgtgatggtgtgctgtggtgcattatttggaaagatctacgggttgttgatggtgttgccaggggtaacctcgcatcgcggggtggcctc

SEQ ID NO: 47919 - DNA, 270 bp, Oryza sativa
  Clone ID: PAT_MRT4530_50642C.1
atggcggacggattaaccaagtactatctctgttgcaatatatatgcaagtcgtttagctctctgttacaacgacttagtacatttccgtaacagagggagcatgtcaaatgtgtcgttcagtaagagatgcaaggacagtagtactactcgctatcacgtggaccccacagaccctcggaaaaatgtgaaccttgcagcggctgcaattgtgcagctgcatgcccataaagatacctcccatttaggggcggatgtaaccattaggtag

SEQ ID NO: 47920 - DNA, 1224 bp, Oryza sativa
  Clone ID: PAT_MRT4530_50643C.1
atggggagcaaacggcgagtaatcttgctgccaactttgggcgtcgtcgtcctggccatcgcggcagccgtcctcttgcacgccggcgaggcggccgacgtcgccaacgggcaattcgcgagggcgagcgggacgcggttcacggtgggtggccggccgttctactcgaacggcttcaacgcgtactggctcatgtacatggcgtccgaccccggcgaccggagcaaggcggccggcgtcctccagcaggcggcgagcctccgcgcgacgctggtgaggacgtgggcgttcagcgacggcggctaccggccgctgcagaagtcccccggcgtgtacaacgaggacatgttcatgggactagattttgtgatagccgaagcgaagaaacgagggctgtatctgatactgagcctggtgaacaactgggacggattcggcgggaagaagcagtacgtgcagtgggctagggatcagggacacaacctgggctctgacgacgacttcttccggagcgacgtgaccaaacagttctacaaaaaccatgccgtcctgaccagagtgaacaagataaccggagtggcgtacaaggacgatccgaccatctttgcatgggagctcatcaacgagcctcgctgccagagcgacctctccggaaaaacacttcaggcttgggtcacggagatggccgggtacgtgaaatccgtggatccgaaccacatggtggagatcgggctggaagggttctacggcgagtcgatgcacaagaacttcaacccgggctacaccgtcggcaccgacttcatcgccaacaacctcgtccccgctgtcgacttcgccacgatccactcctaccccgaccaatgggtgtccggcgcgagcagcgacgagcaggtggcgttcatgaggaagtggatggccgaccacatccgcgactcggcggcggtgctccggaagccgctgctggtgacggagttcgggtggtcggcgaggtcgaacgggtacacggtggcggcgcgggacgcctacttccgcacggtgtacgacgcggtgtacgcgtcggcgcgggagggcggcgcgtgcgccggtggcctcttctggcaggtgatggcgcccgggatggagagctggaccgacggctacgaggtggtgctcgagcgcagcaagtctacggccgacgtcgtcgctcaccagtgcgccaggatcgccggactcagcccggcctag

SEQ ID NO: 47921 - DNA, 611 bp, Oryza sativa
  Clone ID: PAT_MRT4530_50644C.1
tgaattgctccttcatctccggcataaaaaacagacgcaccttgtccacaaatcgccccctcacagcaaaaacagcctacgacttaagcttcttagggttataggatgaccttttcgctaagcccatttgggacaaccacgctcaagtcaaatgcaagatcttcctttgtactacacacaagaggcgcatcttcaccaatgagagacaagctcgatgtggattagtagcatccgcacgttgtcctttttgctcctctgttaaagatgtggagcacctcttcctacgctgcaccggagtggcaacaatatggcacacctttggcctggacgaacaacagatcgcctccctgccgcagcttgaaggtgtctgggacatccctccacccagacaacccgccactccacgagtctggcgctctatcctccttgccgtcatgtggaatatttggaaacgacacaacaacaaggtcttcaattctcttgatgaacctgctaagttagttctccggcgttgtgctagcgacattgacatttggtcccatcgatgtaaaaatgttaagagcaaacaatagctccgcaagtgggccttatacctctttgtaattaattct

SEQ ID NO: 47922 - DNA, 442 bp, Oryza sativa
  Clone ID: PAT_MRT4530_50645C.1
aatgaaatgctcgagaatcagaatattatggtcactgttgacatgtccaagggctacgtaatctccgcttgtttgctccctactgactttggcgatcagctgcctgggttgtatggtgtcatgctgccgcgtatgctgggctccaacttcttccggttctgattggcaaaaaaagaagcacatggaacggcaatgagaaaacacatgcaatttatctatattattagatgtaatcgggatatttgtagttctcttcttatctttctctaagcactatgttagtggtggaaactttatctgcactgcaagctatcttagcactgatgatcggcatgcaatcttagtaaaatttcttgagatgagaatgtgccatgtttgtaaaagatggacctattaagaatcaccttatgtgacctcacctttcaccaaaaaaaaaaaaaaa

SEQ ID NO: 47923 - DNA, 521 bp, Oryza sativa
  Clone ID: PAT_MRT4530_50646C.1
cattcccatctaccttttggtcgcgatcaatgctccaaaatgggtgaccaagggaattcataaagtccggtgaggtttcctttgggcgggtaaggccaatgcccatggtggttgttgttgtgtcgcttgggccaaggtatgcgcccctaaagagtacggtggattgggtgttcccgacttagagcgaatgggcatcgctttaagatctcgctgggcttggctgcagagaacaagcttggataagccttggcaaggtctgaacatcccaatctcacccaaggaacgcagcttcgtggcggcgtccacggtgtgtatcgaagacaactagctagaaggatactctgttcgctcctttgcaccagccgtctacaactgtgtccctgaggttcgagcatttcaaacgtcgcaaaacgatcgttgaggcacttcaaggtagaagatgggtcagagacatctatggagcagggagctcaagaatatgcatgacagatttattagaacataaaagtaacccagcagaa

SEQ ID NO: 47924 - DNA, 2330 bp, Oryza sativa
  Clone ID: PAT_MRT4530_50647C.1
atgacgagcagcggtggcgccgggtgcagccgcagccacagcttcagcggcatcagcagcgccgcggccaccggcggcgccggcgccggcgccgacgtgttcgtccgggcggcggacaacgagatgtacgtgcgggcggacaagatcgacctcaagaacctggacgtgcagttcgagaagacgcggtccaaggtgtggctcgagcagcaccgctcgtcgtcggcggcgtcgccgctgccgctgctggagtgggagatcgacctcgccaagctcgacatccagaaccaggtcgcccacggcaccttcggcgtcgtctaccgcggcacctacgacggccatgacgtcgccgtgaaggtgctggactgggggcaggaggggcaggagtcgacggcgaagcaccgggaagccttcgagaaggaagtcgccgtctggcagaagcttgatcaccccaacgtcaccaagttcgtgggcgcgtcgatggggacgtcgcatctgaaggtcccgtcggcgaaggcggagtcgcggtccagcagcgtcggcggcggcagcgccggcggcggcggggggcagcgttgcgtggtggtggtggagtaccagcacggcgggacgctgaagacgctgctgtacaagcaccgggacaagaagctgccgtacaagaaggtggtgcagctggcgctggacatggcgagggggctgcgctacctgcacggggagaagatcgtgcaccgcgacgtcaaggcggagaacatgctgctcgacaggaagaagacgctcaagatcgccgacttcggcgtggcgcgcgtggaggccggcgccgacggcgacgacatgaccgggcagacgggcaccatcgggtacatggcgcccgaggtgctccagggccgcgcctacgaccacaagtgcgacgtctacagcttcggcgtcctcctctgggagacctactgctgcgccatggcctaccccaactacagcctcgctgacatctcctaccacgtcgacaagctggggatcaggccggacataccgaggtgctgcccgaaggcgatggcggacatcatggcgaggtgctgggacgcgaacccggacaacaggccggagatgtcggaggtggtggcgctgctggagaagatcgacacctcgcgcggcaagggcggcatgacccccgtcccggagcacgcctcccagggttgctcctgcttcggcttctcccgcggcagcgcgtgagcgaaactgctagagcaaagctagcacctcgccggccgggacggctggccgtctcgatcctcgaactgtcgaacaccatccgtgcaggagttgcagctgtgtcgatccgatccgttacctgattttcttccgggattgatgtgtgttgttggcttgaaactatgcctgatctcagtgatgttgttgtcagctttagctttggtatgcaggatgttacctcgttgtgaacttgtgaggagttcgttcatctctattgcctgggtctggatcttaccgcctcctgagctgtactctttgtgcgcgctcgagatggcgccggagcggccgcggagagaggcgttgtttcgccacgcaccgacgcacgccaggtgctcgacggtttgatcgccaacggcttcgaaatccccgactacttcagggacttttggtccatggttgacatacacgccattgcttgctagagctgtgttggggtggcgcgaggccagtatgttggcagccacggcctttattgttttgtggaggtagtccaagaggagggagctatcaatggactggttcacgggcggcggctcgccgacgccgccacgcgcctcgctgccgccaccctccttcggccggattttggaggggaaaggaggggagccgcgccccgcgccgtcgtcgtcgccgccgccgccccgcgccgtagtcaccgccaccggcctcccccctccctcctccggccggatctgggaggggggaggggagccgccgccgcggccccgcgcgttgtcgtcgccgccgccccgacccgtcgtcgtggctgccgccgccgccccgacccgtcgtcgtggccgccgccgctgccccgtgccgtattcgctgtggccagcctcccccctccctccttcggccagatctcccgctatcggggaacttccctcgacagctggtgcaccaggtagggggaagttgcgcgctttgaagagaagccgtttccttccgccccaagtttccttaggccctcgacgatcatggtcgaggtcctggaggaggaggtggtggcgttcacccccactccgtctgggagtgaggatgccagcgagagccgcggcccacgtcat

SEQ ID NO: 47925 - DNA, 348 bp, Oryza sativa
  Clone ID: PAT_MRT4530_50648C.1
atggcggcggcggcgaacctggaggacgtcccgtccatggatctgatgaacgagctgctacgccgcatgaagtgcagctccaagcccgacaagcgcctcatcctcgtaggtccgtacgcttcctccggcctcccctcatctagcttccctcccttctctttctttctccttccacgctccaagatctgtgacatggagaagccgttgattgtgattcgggtaaaccaggtcgaagtgcgtgtggacttggtaccaagagtagaactgtttcgctcttccagatttcttgccgttgttttgatggattatttcggcaatgagtgcttgtttgatggactgatcttctaa

SEQ ID NO: 47926 - DNA, 649 bp, Oryza sativa
  Clone ID: PAT_MRT4530_50649C.1
acaatgcgattttatatttcaaagttttaaaatatcatacatcaatttgatttctcagtagcagcatgaaagcataatacaactccactaatttataacctcgatacacgccaaacatgaccatttcaacaccatctttaagtgttgggattaattgcaaataagaaatacacaagttatatgggctccaaactgggtacatcccgtcaatcaattggtatgttatgtacaaccaaccgttcaaatcttgccaaactcttttgttgagcagaagtataacttctggcagagcaatgaagatactctaacgaatcaaaacgctctcgcatcacctgtttggaatcggcctatgacactcctaataacttgttcgtcaaagcagaagtataaatcttgctctgtagatcgctctgagagaagaggtcggtgacggtgatgatggcagcagcggtgacaccattggtcagcacaagccgcctcggcactgaccctgaacccaccattcgctcgctctatgacgatggcgacgcttgcttgaacgacggttgtgtgtggcgaaagtactatacagtcttaaatgaacgcttcatccatgccttgttactatctcgttatcagtttatcaccgtgctaactactccctcttgtc

SEQ ID NO: 47927 - DNA, 1149 bp, Oryza sativa
  Clone ID: PAT_MRT4530_5064C.1
aaaaaggtttataaaaagaaaaaccctaaaagaagtccttttcccccccccttcccttcttgggccggctcggcccacttctctccctttctctcctctctccccgcggcccatcggcacctcccccgcgcgcgcgccgctgacaggcgggcccgcccgccaccctcgctgacgggtggggcccacctgtcatcgccttcctcccgccgctcccgccgctcgcccgtgccctagcgccgccgccgccgccgaatccgccgcatcccgccgtccccgcgcgccttaaagaggggggaaatattccccacgattccctctctctttccccccgtttttccctctctctctccctcggattcgtccggattccatcccgcaaacctcgccggaacaatcaatggcggccgagatctccgcgccggtttccatctcctccggccgctttccctctctcccgacgctatttaatccacccccgtgcctctctcctccgtttccgccgctcgccgctcgctctctccgtcggattcgtgctcgcgccgtcctcctctctctccgccgtcgccgccgagctccggtttgccgccgtcgtcgctccggacttcctcccgactcggcgtcgcctccatcggcttcgccgcgtcctcgtcgacctcgtccgcgcctccgtttcacccgccgaccgccggagcaccgccgccctcgtcgacccgagccgcgccgccgtcttcctccgctccggccgtcgtttccgccgccctcgtcgtcccggggtgagccgtggaccgctccgctcgcttcccccttccctcctctctctcgggtgccgctccgccgcgccgttggtcgccggcggcgaccatcggggcgcgggcgcgtcccctcccgtcggccgtgccggcgaggccgccttcgggcgcgccccgcggctgccatgtggggcccggccgtcagccgcccgcgcctgcgggtgcggctgacgcgtgggacccacggcgccggccgccgccagccgcgtgctcccggtccaccgtggaccgagaggctgacgcgtgggccccactcccgtggacccggtccgcgcgccctctctcccggcttgttcaccctagaataaacaaaaccccaactagtggacactctactcat

SEQ ID NO: 47928 - DNA, 1407 bp, Oryza sativa
  Clone ID: PAT_MRT4530_50650C.1
tttttgggtttttttttatgggtctgtgcgtgtatcagttgatcaattagataaaaccaacattgcaactttacatgatctgcagccggtaaggtgatcaaatcgtctgaaacttttttttttttggctacctatgtatgtatctttctctgaacccacacagttcaagcaaagcacatatcacccaaaccttaaatgaacaatcatatacacaatttcacaaacccaatctctgacacgccaagaaaaacggaggccactgcagcaaactcactcactctatacagggaacaaactgtgaagattctactggatcagctgccattgccggcggtgattgagcgaatgctaggagatgttgtgcacggtggtgtctcttgctctcgacgaccccaagctgacgaactccaccgaacctcagatcatgctcacctccggaactttcacaatgctcttgctgttattgtcatcgccgtccattgcggcggtggcaggagtttcagtccagctgctttcactcaaggcaccgccgaagccgaacctcgtaacgaggttgccattggccaagcccacaaactgcaagctgtcgtagatcaccgacgacccgacgcagtggaaccctcgccggagctggttctggttaatggcgtctgccttcggcgtctgcatcggcaccttccgcggcttcgagagtctgacagccaggagctggttgttcaggaagccccagcagtagttgtcaaatgatccaaactcctctatgacctttaggacctcctgtgcattttcaatgattatacgcagcctatgctctgacaggagagaccttgcagggctgcatggccccagaattttcctctcacttagctttgctaccaatagaggatcaaagtccatgaaaacctccttgaatgtttccctcttgctgagaattgcaggccatgtcatttcagccaatgcaccagacaggactagcatctcaaacaatttcttgtcatcatgcaccgggactccccattcatggtcatggaaggcagcatagcatggatctgttacaatgtcatgatcagggattaccggccggcgcccgatcctgccggtggacgcccggctgcagaacgagtcgtttgacgcctccgacgcgcacgacacgttcagcgaccgcggcccgccgccgccgccgcccgccgcacggcgcagcagcatggacggcacccccggctcccttgcgccggacgacgacggcgggtgctgctgctggtacagcctcctcctcatcatggtagtagcgtccttgtccctgacgacgctgcttccagcagccggcctcgggccaggagacggggacgacctccgcgcggcgccggcgccggcggccaccctggacgacgccaccggcgacgacat

SEQ ID NO: 47929 - DNA, 1521 bp, Oryza sativa
  Clone ID: PAT_MRT4530_50651C.1
gaaaccaatttacaatgcgattttatattcaaagttttgaaataacatacatcaatttgatttgtcaatagcagcatgaaagcataatacaacgccactaatttataacctcaaacgccaaacatgaccatttcaacaccacctttaaatgttgggattaattgcaaataagaaatacacaagttatatgggctccaaactgggtacatcccgtcaatcaactggcatgttctgtacaaccaaccgttcaaatcttaccaaactcttttgttgagcagaagtataacttctggcagagcaatgaagatactctacgaatcaaaacgctctcacatcacctgagaggagaggtcagtcacggtgatgatggcagcggcggcgacgccgttggttagcatgagccgcctcggcgctatatttataaacacatttcttatgtctctgagagaagaggtcggtgatggtgatgatgacggcagcggcgacaccgttggtcagcacgagccgtctcggcactgaccctgaacccactgagcgatgaccctgaacccaccgttcacttgctcgctctaagacgatgacgacgcttgcttgaacgacggttgtgtgtggcgaaggtgctgtacagtcttaaatgaagcttaatcgctcaatccatgccttgctgctatcttgttatcagtttatcacctgctaactactacctcttgtgaaaaatatatgtgttcaaaaaagatatatgcctagagcgtttgcataataggagtgtaaagtacatattgtaacttagcatttgcataataggagtgtaaagtacatcagtaaatatttacctaatagtatgatatattaccaatgtgcagttagtgccattaaacaaggcccccttttttttcttcttacattctagataaatagccgctaaacaattatataaggggtgtttagctgagatcaatggcgattattagaattaaggttcttgtattgatcagttgaaaactgaagactacgtatcaataatcaaaagttggattgtactgcactgatctctgatgaactcaacatagcagctctgagtcctttttgttcagattaaaggaaggaatccacaaagaagcactgggcgattgcctccttgctgattgcggtggtcattagcattccacaaaatttccacaagcggaagcgggtaactgcttgacttgtagtatagctcgaccctttcctaggcactggcggcgaggatgggcgtaatggagttgggtcgaccggggtgtccggttgtccagctgtcgggttcactgtggcgcatgaggggattgcccaactagagttgaaattcttcctagttggagctgtctcagagaggttggtttcgtcgctgccgtcgaggatgcctgtggagtggagtcgccccactaacgtcgacttggtttggccctccaccttgacttggacgtcctcgatgatcatccatggctctaagtccttctccaagtgtctccttgtcccctccat

SEQ ID NO: 47930 - DNA, 177 bp, Oryza sativa
  Clone ID: PAT_MRT4530_50652C.1
gttgaattgtaccagaaccgacgcccgctgcagctggagaagagagctacacgagctctgctcaatggacagagctctctagacactgcctcacatgaaaacgggtataatgcagttgatgtctaatccacagctgaaaagcgagcatcgcccaaggatggaccctctattgactgc

SEQ ID NO: 47931 - DNA, 407 bp, Oryza sativa
  Clone ID: PAT_MRT4530_50653C.1
gatcacaacattatatttattcaaaagaattaaatagtcaaagtcctgtcccatagattttaaatggtacaaaattacttccttttgtgactagagaggagtagtagtacaactcaatacaacaatctgatcaacaatggcgcattatcgatccgcggagtaagtacaacttaaaaaaagaacttcttttaaaaccaagttatcaactttctaatatttaattaatttacttatatttactctcgaataatggttaatcacaaaaactcattttcattcatcatccataactctgttgagaatgcatataggtgtgccatcctacaagcgcttcaaaagcaatattatttgcccagagctcaaagggtctatatcaatgcctgaactacctttcagaatcacggggg

SEQ ID NO: 47932 - DNA, 2668 bp, Oryza sativa
  unsure (1)..(2668): unsure at all n locations
  Clone ID: PAT_MRT4530_50654C.1
atggatggccggatctggcaccccggtgtccagatccagcgtgctctcgacggattcgctgaggctggcatcgacggcgaggggtggctgcagcggcggcgacggggtggctgcagtggtggcgacggggcggtggaagcaagggttggagccccgcctcccctgccgcgcgtgggtgttgtcttcttccccccacaacccgcgcccctcgcctccgccgcctcgccggaatcgaagccgcctcctcccctctcccgctctcaccggacggcaccgatcctttccctgctcctgtctccaccgttctactcgcctcgaaagggaggggggaggatgtggtcgtcgagccaggcgagcacgaggggcgtgattgaggtggggagggtggaggcggggccttcccatttccccaagaggcccgcgccgcggaattcctccagggtcaatctgtcaaggacatatgcaattaaatcttgttcagtgagtagccgtacagggctttgccttggacaatgttatcataagaagtcttctgcttgcaaatgcaagttgggatggtcttctcaaccactgtctagcttgaggcatcacttaagagtacattcatcagcatcggaggcggttcttacttcccaatctgatttcacaaaacttcttgttgggaatgaaaaaattggtgttctcttgctgaatcttggaggtccagagacccttgatgatgtgcagcctttcttgtttaatctatttgctgatccggacattatccgtcttcctagattgtttcgctttcttcagaagccattagcacaatttatatctgttgtaagagcaccaaagagcaaggaaggctatgcatccatcggtggtggttctcctcttcgtcaaattactgatgcacaggctgaagcactgaggaaagcattatgtgataaagatattcctgccaaggtgtatgttggaatgcgttactggcatccattcactgaggaagctatagaacaaataaaacgggatggcatcacaaaacttgttgtacttcctctgtacccccagttctccatatcaactagtggttcaagtctccgtttactggagggcatattcagagaggatgagtatctggtgaatatgcagcatacagttataccttcctggtatcagagggagggatatatcaaggctatggcaactttgattgagaaggaactgcgaacattttcagaaccccaaaaggttatgatatttttcagtgcccatggagttcctctggcatatgtagaagaagctggtgatccatacaaagcagagatggaagagtgtgtggatcttatcatggaggaactcgaaaaaagaggaataacaaactcatgcacacttgcctatcagagccgagtggggccagttgaatggctgaggccctacactgatgagacaattatcgagttggggcagaaaggggtgaagagccttctagctgttcccatcagttttgtcagtgaacatattgaaactttggaagaaatcgatgtagaatacaaggagttggctttagaatccggcatcaagcactggggacgagttcctgcattaggttgtgaacccacgttcataacagatcttgccgatgctgttattgaaagcttgccttatgttggtgctatggcagtttcaaaccttgaagctcgacagccactggtgccacttgggagtgtggaagaactgctagcggcgtacgactcgaaacgcgacgagctgccccctccagtgactgtatgggagtggggctggacgaagagcgcggagacctggaatggacgggctgctatgctggccgtgctggctctcctagtgctggaggtgacaaccggagaagggttcttgcaccagtggggcatcctgcctttgttccactgagccgatggctctcttcaggtcagctctttttgaggtgatctaatcataattttgattcatatggataatttcccgatgctgtatacgaatggaaaaagaaagaatattaactgaatttgactacgcaccacattacccatgttgtacatatgaaatattctacggactcttagtacgaagattaacaaattgaacactggcaaaacgcctggtttcccaaggcagagacatgatatttgtgtttggccatctgggtttaagagatgggattttgctgttgattgcgtggtgggggctgcggcagggttaatcttatcatgaaggctttaatcttatcatgcaaaagaagacggaaaggaagacaacaacagaagcaccgcgaagttaggctgtgaaccactctgcatgcacgattacctgtatcgcaacaatttcacctcctgtgatagtaaagggatttctcggctgggcagtgggcactcatacagttcacggtctatgatatcaagtactactatactagaccattttcgtctaagtaattttatctaggggcataatgacttactgcaattagttgtagcttaagggccttttctgagagcttcggacagctgtatctactagctaattctagaatctttcagctccttaaattgtctactccctccgtctcaatatattgtaattaggatgggattagatccattctagaactacgagtcttgttcagcnctaaaaaaaaaaaaaaaaa

SEQ ID NO: 47933 - DNA, 348 bp, Oryza sativa
  Clone ID: PAT_MRT4530_50655C.1
ggcggggcgtccgctccaacttaaaatgaccacacaactaactaatatcgagacatgccgtggaaatcaaggagggggggtggggctatctgtactggcagggagatcacaaagactcacaatactcagtcgggcatccattgatgctattgcctttacatacattcgcgctgacggcaaagaacatcttccacgaccttgtcggggacggcgtggaaatccaactaccattacactaccatctcagcaattactgaaaggaaactccggaactttcaccaacggccttacaaaccttaaactagacaccaatgggaccacttataattatcgacaagggggtcgaac

SEQ ID NO: 47934 - DNA, 285 bp, Oryza sativa
  Clone ID: PAT_MRT4530_50656C.1
atgtgggtcgacgcagtcccacaggcgggtgcgagagcgcagtgcgttggaggtggacggggcgggacgggtgacccgtcgtggcgggtgcgagagcgtggggcggaggaggtggacggggcgaggcgggtgacccatcgtggtccaaaccaccggcaacgagtagctggagacggcaaatacggtggaggccttgggttcgtggtggcgacagggtttcggtgggattcggtgccgaagaagtggaggccgagctacggcgtgcaacgacgaagccggcggtga

SEQ ID NO: 47935 - DNA, 516 bp, Oryza sativa
  Clone ID: PAT_MRT4530_50657C.1
atggttgagccctgggaggacaagcgaaacagaggccagtacagtggagtacttgtatattgttacgatgctggccgtggcctagtacatgcacagacacgcgcagctggagaaggagaagcctcacccccctcgagcgccaaaaacaaggcaacgtcaatgatggcctttgccgtctcaagggccctagagaccagcaaccgcaacaactaccaaggcggcaaggcgggttgggcgagaggcgggagcaagtgcatgcatgcagatgcaggcgcagctcctcgtcaccggagggggccgcgcgtgcggcagctagtgcaggtgcaggcgcagctcgtcgccgcgcgcacgcgacgcacgcagcagcggccggcgcccaggcggcccagcgatggcgagagccagcagccatcatcagggcctcgttgtctctgcatccttttgcgtgccacgccttcaactgttcaggtcaacactcgtgcatgcaaatgcacgcacggtgtaggaatattgtag

SEQ ID NO: 47936 - DNA, 352 bp, Oryza sativa
  Clone ID: PAT_MRT4530_50658C.1
ggccatcgtcaccggcaagggcctggacgagaacttcgcctaccacctattcgaccccgtggacaacaacgtctgggcgtacgtcaccaacttcgttcttggcaagtgaagtgggggaccgtatcttagcagtgtttaattgcggttggatggatttgtggccatcgagtttgttgtttttgggttgtgtaagatggttttagtgcgacgagatgttgatcgagttggtgttgtgtacactaagaagatgatgaataagatgttgtttttgcattttagattaattattttttctttgcttggtctattgttttttttttttattccttcattcaatttattttttttattt

SEQ ID NO: 47937 - DNA, 549 bp, Oryza sativa
  Clone ID: PAT_MRT4530_50659C.1
atgacaaaaaaccttctccggcgagcagcggatgatgacgagcatcgcttggtagcgttgcgtcgtctacggactcaggcggctcggcgacgacgcgacgtccccggcaactccgacgagatggcttacgacgtagctggagctagtgacgccttgcgggcaccgagtagtggcactccggccggcgttctcctcgagcaaccagctgatgagttcgaagaagatggtaacgtcgacgagagcgagcggacgtcagtgatgtcgcgaagaggaggctgcgaccgggaaggtgacaacgtccagcgtctcggcgacatcacaaggcgtcgtgggatagaggttgcggccggcgaggcaaggacgtcgtggcagcagagatccttattcagcatgattccatccgtgttacgccgaccgatctcctttccaagttggaatgatacagagggatcattttcctcgtattctcgtatatacgcgcaatctgtccatggtgaggcatcgataagaaatcaactgccggcaaatgatttgattattgccctctaa

SEQ ID NO: 47938 - DNA, 6240 bp, Oryza sativa
  Clone ID: PAT_MRT4530_5065C.1
ggagtccatagatggaaggactcctactcggacaaaactgggtcgttactgtatcgtgtggggtccgatgtctccgagttctacttagagaccaactgacccgtggtataaaagggaccccccgggaggacctaaggcatcgaatctcactgccaacacaaccaccacagcctacgaaatcctcgtaccagcgtaccctaataccctctatattcggtctacgggtatccaccgtcgacagtggcgcgccaggtaggggtacttggtgctcaaggttctactactatatcatcaagcttcgtcgacaatagcgtcaaccccggcatcaaccaaggagttcctacttcaacaatgctggtctggactcaagtcggcgagatcgtcttcccggtttacaccacagtgccgatctcgactggtccatcgatgaccggaaacgagaacaccgtggttacaaccctgggcgactccatgtcgaaggatcctcccgcagaagtggagaacggaacatcgacgacatccgagtctgagaaggatcctagtgcggccaaatcttgtccttccgacaagaatcacgagccgacaaggacaacttccgaggcgacaaggttctggtgtcctattcacaaaaccaagaaacacaccttgcaagcttgctgggtttttctcgacgtacaagctgagatccgtgcctgcaaagagcgtggaattcaacgtacttcttcaacccgtgatgtctattgtcctattcacaagacaaagaatcacgacctctcaagctgcaaggttcttctcagcgccatgaggacgtcactgcctaaggtccaacagtcacaaatctctctcagagatgcagacaaggaacgaggagtgacggttatctcagatcgattcgttggggtaatcgacatcgatccccatgagctgtcagttctacacttgctcgaagaccagggctcatcatcgacgagtacaccacgcgatgtatttgctatcgatgggaccaggacgtttgcgcgcgctaacgtagaagcggaggatcaagtaactacaccggcccagcatatcggggccatcaacgcaatactgagggaaaccccttatgatcccgttctgaacgatgacctcgcacggtggacagaacgactacgggaatcagtggctaatctcagtaacgcgttcaaggaggccgccgccgaagcacaaccagagcaaccgccagctggcgaaccacctgagcagcggacatcacgttgacaagccactcctccacctcgcggcaccagcgatctccgtgatcacttgaatggccgccgagaagcacgacgtgcacgagacaacgaaaatcgttcccgacatcgtatctcttcatgacgtcgaggaaacggtgataaccgccacagccgccacgaacgcgatgatcgcgaacaacggatgccaggcgatactggtcgaggacgccgccataacgatgacgacgacggagatcagcaccgggacaacaacggggagcgacgacaggattctcgagaacccggacgtcatcctcgtaatcgtacaccggaatcgagtgactcgtcgtcatcgtcatcatcctcatcatcctcatcgtcagacagacattcacggaggacatacgatcgccgacagcccaccgcccccggcggcgggtgtagagctttcagccgtgctctacgtgatgtccgatggcctgagagattccgaccgggagcaataaagaagtacgatgggagcaccgacccagaagaattccttcaggtctatttcacagtactctacgctgccggagcagacgacaacgcgttggcgaattatttgccggcggcattgaaaagatctgcgcgttcatggctagttcacctcccgccatactcgatttcttcgtgggcagatatgtggcagcagttcgtcgctaacttccaaggaacttacaagcgccacgcgatcgaagacgacctacacacgttgacgcagaatccgggtgaatcattgagggactacgttcggcgctttaatgagtgcagaaatatgatccccaaaatcacccatgcttctgtgatccatgctttcaagactggtataagagatcgctataccacccaagagttggcgacaaggcggatcacgactgctcgaaaactatttgagattgtcgatcgatgcactcacgcggacgacgcactgagacgcaagaacgacaagctgaagacgggaggagagaagaaaccagccaaggacgcacctgaatcaagcaagaagaagagtcgcaagagtgggaaaaggaaagctcaaaaggaagtcctcgcggcaaagtacgcggaccctcccaagcacccagacccacaaggcaacgacacgaagaaaatatggtgccctatacacaagtcggacagacactctctggaagattgcttcctcttctaaaagtcactcgcaaagcaactggcattggagaagggaaagcaagtacgtgtagtcgagaaggccgctgaggcagctactcaggactcggactcagcatacccagattccgatctccatgtctcgcacatcttcggaggttctacggcgacgatatccgatcgtggttgagcccactattcggaacatcaaggtcgcgggtcctcatcgatggcggcagctccatcaacctactcttcgccagcaccttggacgcgatggggatcccacgaagcgagttgacgcccacctatcaacccttccatggaattactcctcaatcatcatccaagccattgggcaagattacgttgcctatgactttcggctaagcaaattacttctgaacaaagcagatcacctttgatgtcgctgaatttgatacaacatgcaatgccatcatcgggagaactacactcgcgaagttcatggccgcatctcactacgcgtatcaagtgctcaagatgcccgggccgaacggaacaatcactgttcaggggaacacaaagctagcggtgcaatgcgacaagcggagcctcaacatggtcgagcacacgcccaacccacccgccacagctgagccacccaagaaagtgagcaaaacaaataagacgccgaaaccagacggtgcaatcaagatcgttccactctccagtgccaaccctgacaagaccgaactcgcgctcatcaccttcctccgcgacaatacagacgtgttcgcttggcagccgtccgacatgccgggggtccccaggaggtgattgagcacaaactcatagtgcgacccgatgccaagccagtaaaacaaaaactgcggagatttgcaccagatcgaaaacatgccataagagaagagcttgacaagcttctcaaagctggcttcatcagagaggtactccatctagagtggctagccaatccagtcatggtgtggaaggtcaacgggaagtggaggatgtgtgtcgacttcaccgacctcaacaaggagtatcccaaggatcacttcccccttccttgaatagaccaattggtggactcaacagctggttgtgagttgttaagctttcttgacacctactctggctactaccaaatcagcatgacgaagaggacgaggagaagacaacattcatcacgctgtttggtgtattctgttacgttaagatgccgttcggactgataaccgcagaaaacaccttccaacgcacggtccaaggggcacttaacaatcagcttggaaataatgtcgaggcctatgtcgatgacattgtagtcaagaccaagacaagcgactcattgattgacgatctccgggaaacgttcgacaacctccgacgatatcgcctcatgctcaatccagagaagtgcacgttcggagtaccatcgggcaagctgcttgggttcctcgtctccggaagagggatcgaagcaaatcccgagaagatcaaggcaatcgagaacatgaagtcgcccacaagactcaaggaagtccagaagctgactggatgcatggcggcactgagtaagttcgtcgctaggatgggagaacgagtacaaactttcttcgctctgctgaagaaacaagacaaatttgtatggacacaggaagccgaagaggcgttcatcgctctcaagcgctacctgtcaaatcctcctgtacttgttgctccccaacctaatgaagaattattcctctatatcgccgccacgcaatattctgtgagtactatcattgttgtcgagagagagaaggtgcaaagaccaatctactacgtcagcgaagctctccatgacgcgaagacaagatacccacagatccaaaaactgctctatgcagtaatcatgacatcaagaaagctatcccactgcttccaagcccacagggtcacagttgtttccttcttccctcttggtgaagtcgtgagaaataaagacgttgtcagccgcattgcgaaatgggtagtcgagctaagccagtttgatgtctactttgtgccacgaacaaccatcaagtcccaagttctcgccgacttcgtagctgactggactatgcctcaaaacaggtcgaacagtcaaaccgaagacgaaacatggacaatggcgttcgacggcgcactcaacagccaaggagcaggggcagggttcatcttgacatcaccttcgggagatcagttcaagcatgcaattcacctcaacttcagggcaaccaacaacacagccgagtacgaaggactactcgttgggataagagcagcagccgcactaggagtcaaacgactaatcgtgaaaggagattccgaactagtcgcgaaacaagtgcagaaagactacaagtgctatagccccgagttattcaagtacctcgcagaagttaggaagctgaaaaaaaggtttgacgggatcgaaatctgacacgtatatcgcaagaacaacatcgaacccgacgacctagcacggcgtatgtctagacgagagccacttgaacctagcactttcctagacatcctgacaaagccatcggtgaaagaggcaaacggcgaagatagcacagttgtccccgacatcagctcgggggctatagaggcagaacacgtcgtcgccgacatcgagaccacataagactagcggaccccactcatcaaattcctaagtagcgacgagttgcccgaagacgatgcggaggccgagaaaataacccgtcaagccaaaatctaatgtatgatcggcaacgatctatacaagaaggcgccaaacggggtactcctcaaatgcgtctcgttcgatgacggaaaacatctcctcatcgacatacaggaagggatctgtgggtcacacgctgccggtcgcacattggttggaaaagcttttcgacaagggtttttttggctgactgcactcaaagaagcttgtgacatggaaacacgcaaagctaccagcgcaagcgctccagactatctctcttactttctcgtgctgggggctcgacatactcggaccattcccacgaggacagggcggctacaggttcctattcgtggcgattgacaagttcaccaagtggatcgaagcgacactcacgggggaaatcaaggccgacaacgctatcaaattcattaaagggatattctgcagatatggattgcctcaccgcattataacggacaacggctcccagttcatcagtgccgacttccaggattactgtatcggattgggagtcaagatctgcttcgcctcggtttctcaccctcaaagcaatggacaggtcgagagggcaaacggcatagtactacaaggaatcaagaccgtgttatgggcggtgcgtaccacaccgacaacgtccaacaaggagacacctttcttcctcatgtacggctcagaagccatgctccccactgagctacgacatcaaagtacacgagtacagaagtactccgacgaggatcagaaggagcagcgaaacgatgacgtgaatctacttgaggaacatcgagaaagagttgccgtcagagcagccagctaccaacaggcccttcgctataccacgagaagcgcatcagagcacgcacactttcaatcggcgactacgtcctctgacgggttcaaagccaagcatggcgtaacaagctctcacccaaatgggaaggaccgtacacgatcacgcaagttttgcggccaggtgcattcaagattgcatacggcgatggtcgcgagttagtaaattcttggaacattgatcaattacgtaatgtcatcatg

SEQ ID NO: 47939 - DNA, 408 bp, Oryza sativa
  Clone ID: PAT_MRT4530_50660C.1
atggataccctccgaggccgtgaggtgtggttcaactcgtacctcaagagttgctgcacggccatggcggaagtctgtaaggagctccgagttccttgtggagatcccgaggagtccgtggctggttatatctcgtggatgaagggggcctgcgcacaactcgatgggattggcaagcgcatcaacgaggccctgaagcaggagtgtcgtcgagcgagccgctacgccgggggacatgtgctggcctgcatccgagatcatcgtccgcagctgaacctcgagttcttacgtgaaggattctcaagttctcggaggacgccagctgaaatcgacggccttgcgcagtcgatggcaccgctcgctgagaaggtttaccgctccatggattggcgttggccgtcctggtag

SEQ ID NO: 47940 - DNA, 340 bp, Oryza sativa
  Clone ID: PAT_MRT4530_50661C.1
tccaccagccgtaccgcacccgaactacacaagagacccacgcgagagacaacgcgtcccaaacatgaatagaaaagagagagagaggtcccatacagtatctctgaatagaagcctgctgctatcatcatctatatctgacttaagaggagcacatctctccatatgaacccaagctatgcaggaagtaatggctgccaacgtgagcaacgttgcagggagcagcagatccagactcaatgaacattcttgggacgggctgaaccacatggatgggcgcctagtcacactagctactagaggaggaggcgcactaacccacattgtgcactaaaagaaa

SEQ ID NO: 47941 - DNA, 327 bp, Oryza sativa
  Clone ID: PAT_MRT4530_50662C.1
aattctttcttaaatcctcctttgctatatatgggtggtttattttcttctatatggggagggattctttcccacgtagacttgttttatataaaaaagattcctctaaaacgcatacatgatgagatgaggacgagccctgcaaacaaccttgacggaatgcgattcatattacattcatcgacaaatctatctgacttgagtaaaacaacctatggcataaaaactgtcactgacaaacgagaagaaatcattgcccatattcttctgtcaactacaggtcgcacaccaaactcccataggttgaacttagaatctgctcgcgtt

SEQ ID NO: 47942 - DNA, 414 bp, Oryza sativa
  unsure (1)..(414): unsure at all n locations
  Clone ID: PAT_MRT4530_50663C.1
aactgctggatccaccactcggacctactgcccggaagaagagagcctaagatgctgttcctgtttaccttacgtcaaacaagtgccttgagaaccactcatttttttcatctgatcatctcaccgaatgcttactntttatgaagaaggtatcgctgatgatgttggtcgtctcacaattttcccctcggagctaaagcttgtaacatcttgtgcagatggcttcgaattactagtttgtttttnttttctttataaaggattgctgtactgtgggcgtgtcaccaatgtaagactacgcgatgttatgtattccgtccatagatgtaaacttcccgggagaagttactatttgggaatgaaaatttaggagagtggtatttgagcaaaaacaaaaaaaaaaaaaaaaaaaaa

SEQ ID NO: 47943 - DNA, 728 bp, Oryza sativa
  Clone ID: PAT_MRT4530_50664C.1
atttggcttattctggtttacttgaatatttaaaagaaaagctagatggtcatactttcttagatgtaagccaattacttcaaaaggctttaactcaagagagccgagttaaagaggccaaaatctcgcaaaaagttaagtctgattgtgcccatgttaatatagttgatcaacaagaatctttgaacaaagagacagttgatgtatacatacacaaatgggttttgaactccaactctaaaccatccgtttgctccgctcttaagctggtggatgagctaccttttcctatacagaccgttgaattgcaagagaaggagattcccgatggcaaggagaagaccacattgaagacttcaatactgtcggtgaaatgggcccggggaattattaggacgggattcagggctgttaccacttgtcgcctacctctgacaaatccgtgggatacacaacaaacaaaggtattgacggtccgatattatgatttaaggaccgtcaacaccatatcaatcgagcttgaccggcctgtgaccggtcacaggcgacgggacgggggcagtgcccccacgttccgccctgtgtcaggcggagtgggggcaggtgactcgatgtctcgggagagtatttacggtgatggaccgggagttggcttggggataagacgacgtccgttgtggtcagagatcatgcgggatactaaggctagagttgatgcacgtggttga

SEQ ID NO: 47944 - DNA, 2199 bp, Oryza sativa
  Clone ID: PAT_MRT4530_50665C.1
atggacgtcactacatgggtggcggagggtaccgctgcgagaccgactgcaatagcaagtgctctacggcaccctgctcaacatgaaccaggaggtggcccacgttgtgctctccccaagtgtggtgtgtggcggagcatcggcgccggcgtggctctcgcgctgcagcggcgacgagtgcgggaacgatgcggacccatgggcctaggcgcaaaggtcctcctcaaaaccttgcccccacagagccacctcaccggctgcaggtgcggttgtggtgtcagaggggaatatcgatcgatcgaaccgccgaagtcgcctgccacgcctgccgccgccaccggtcagaccgcccgtatgccgctggtctgtccgccgcgtgccgccggtctgacgctccccctctatttgtacccgaggtaggcagcgtaaagccacgaaccaaactcatactaagagtcctaaacaccttaggaaaccctctagtacaagaaagaaactttacataaccaatcgtaccaaatttggactccttccaaattcgactccgcatcccacacgcacacaatacctccatcgtatgccatatagaatctccatcaaccacgtgcatcaactctagcctaagtatcccgcatgatctctgaccacaacggacgtcgtcttatccccaagccaactcccggtccatcaccgtaaatactctcccgagacatcgagtcacctgcccccactccgcctgacacagggcggaacgtgggggcactgcccccgtcccgtcgcctgtgaccggtcacaggccggtcaagctcgattgatatggtgttgacggtccttaaatcataatatcggaccgtcaatacctttgtttgttgtgtatcccacggatttgtcagaggtaggcgacaagtggtaacagccctgaatcccgtcctaataattccccgggcccatttcaccgacagtattgaagtcttcaatgtggtcttctccttgccatcgggaatctccttctcttgcaattcaacggtctgtataggaaaaggtagctcatccacctgcatctttgtaaaagtcaatcgtcattcgtcaattgccgattgaacttgtctatggaatacattgcaatcatttgtggcatgagaattggagttgtgacacttataatatgctcgccgctctattcttcaagtgaaggtatggcgtggccatgtgacaatttaattttcttcttttactagtaattattcaaaaatcctattgcatttggccacatcaaacgtgaactttatttcctcttgctgattcttacgactaaccagcttaagagcggagcaaacggatggtttagagttggagttcaaaacccatttgtgtatgtatacatcaactgtctctttgttcaaagattcttgttgatcaactatattaacatgggcacaatcagacttaactttttgcgagattttggcctctttaactcggctctcttgagttaaagccttttgaagtaattggcttacatctaagaaagtatgaccatctagcttttcttttaaatattcaagtaaaccagaataagccaaatctactaagtccttatcagaaagtgttaaactataacatctgtttcttgtatatctaaatcttctaatgtattcaaaagcaggctcattatacttttgtttaaccaatgttaagtatgacaaatttaattcggtctcaccactaaagaagtaatcacgaaatttttattctaacttagaccaatcatgaatagagtggtgcaagtgaaataaaccaagtaaatgcatcaccaaataaagacaatgcgaaaaggctaagtttcaaaatactagcactagcttcttcgcattgaataataaattggtcaatatcctctatagtagactggccatcttctccaatgaacttacacattgaggcaatctaaacccttgatgatatggaacattatcatagtggtcagaatagagtttttgatatatatgaagaaaccccaaggacctgaacccaagccggaccccaagccgacgccattgccggcgaacggtggtggtggcggtgcaggaaacggtgatggcggcgccgaggggaacagtggcggagctgcgccgtctcccagctgcatgttcagctgactagctttctcgtggcattctatgcattgccaattccctc

SEQ ID NO: 47945 - DNA, 198 bp, Oryza sativa
  unsure (1)..(198): unsure at all n locations
  Clone ID: PAT_MRT4530_50666C.1
tcgcgatctagaactaggctagcggcggctgcggcaatggcgaccagcgggctgagggagctcagcgacgtgggcgtgccgagccctcatggccaaccaggggctaacaacagtttancacactncaaaaagtgcaccccctttacgggcatatgcattgccaccgaaccgatgtcttctcacacacccatcattaac

SEQ ID NO: 47946 - DNA, 168 bp, Oryza sativa
  Clone ID: PAT_MRT4530_50667C.1
atggcgaaaaacgacggtggttgcgcatgggcgtcggaggtcgccacaggccgagcgtcgttttctccgttggatctgccgccgctttttgtcttcctggacgttgacggcggcttcgtccccgtggtggcggccgacgcggaggacgacacacgtgcggtgaggtga

SEQ ID NO: 47947 - DNA, 754 bp, Oryza sativa
  Clone ID: PAT_MRT4530_50668C.1
atgtttggcccggcgcgcggcgcggtgggccgtgggtcgcgcctcgcgtgcgtgcgggcgcgcgcgtacgtctgttttggtaccattgcaatggcgaagattcgcgggaatgccaaagccaaaccgagcagaggccaccggctgagtggcagacgcactttcaccagcgttgctgttgctgcgcctgcgccgatgagcgaatcgaagaccatgtttgacgccccaagatggatgtctcgtacaacaatctatacagggaaaacgtcatccttacttgttcagttgccccaaagtttccattgtgactacggatccatgccttatactgatagtcttgatgctgttgctgcttgcctgcgacctcgcgaaatgccgtgctactactacagtcgtttaataattaatcaattgggtaaagactatagttgcaggctgtgtcggagaaaatggaaggaatggatcggaccagatccatgaaccatgcggcatgcgcaagaagccagcagaaggcaatggcctactcacgctgtcacaggcctctgccttctggtccattgacgtgcggtttcaacgcagcgtgctgcgtgcaccgtgctttgtcctcggtcctccaaaacccaagttaacctgcttcattcgaacacactctggcatgatactagtagctggattttggtcaccggaattcagctcgtttcggacgttatttccacagctatacagtgtcgagaatttcttgctgggaaatttgcat

SEQ ID NO: 47948 - DNA, 328 bp, Oryza sativa
  Clone ID: PAT_MRT4530_50669C.1
ggctgcaggaattcggcacgaggcaactgacttaaagaacaaatttgctaccccacgacgttctttcatagaagattcaggaggcactgaagttgatgatcttgatattattcctaatgaggaaatgcttttgattcttagtgagaagggctacgttaagcgtatgaagcctaataccttcaatctacaaaaccggggaacgatcggaaaatctgttggaaagatgcgagggaacgacaatacatccgatttcattgtctgccaaacacatgatcatgtcctttacttcagtgacaacggaatagtatactcagcacgtgcttataag

SEQ ID NO: 47949 - DNA, 1020 bp, Oryza sativa
  Clone ID: PAT_MRT4530_5066C.1
tcctctttcccccccccccttccttcttgggccggctcggcccagtccctccctctctctctctcttcccccgcggcccatcggcctccccgcgcgcgcgcgccgctgacaggcgggcccgcccgccgctctcgctgacgggtgggacccacctgtcatcgccttcctcccgccgcgtcctccgccgcgcccgtgccccccgcgatcccctctcccgtttcccccgatttcccctctctctctccctcggatccgtccggattcatcccgtaatcctcgccggcgacatctatggagcccgagatccccgcgcccgtttccttcctctccggccgcgttctccccctctcggtgctatataattgctccccgagctccgctcttccgtttccgccgctcgccgctcgctctcgccgtcggcatcgtgctcgcgccgtgctcctctctctccgccgtcgctgccgagctccgttccgccgccgccgccgctccggtcttcctccttactcggcgacacctccatccgcttcgccgagtggttgccgaccccgtccgccgctccgcttcgcccgccgaccgccggagcaccgtcgtcatcgtcatcccgagccacgccgccgctttcctccactccggccgccgttctcgtcgtcgtcgttgtcccggggtgagccgaggaccgccgttcgccttcccccttccctcctctctctcgggcgccgctccgccgcgccggtggtcgccggcggtgaccatcggggcgcgggcgcgccgctcccgtcggccgcgccggcgaggccgccctcgggcgcgccctcgcggctgccaagtggacccggccgtcagccgcccgcgcccgcgggtgcggctgacgcgcgggacccacggcgccgaccgccgccagccgcgtgcgcccggtccaccgtggaccgtggggctgacgcgtgggccccacttcccgtggacccggtccgcgcgcccgctccctcggctgacgcaataaataggatttttaattga

SEQ ID NO: 47950 - DNA, 312 bp, Oryza sativa
  unsure (1)..(312): unsure at all n locations
  Clone ID: PAT_MRT4530_50670C.1
aggattanatgggtgggggttcctttgtgtggatttttttaaagcccaatcacattttattttcttaacatttggttgcttgaatttacaaagggtatctccatcaactggttacagaaagagggaaagctgaaaccgttctgcaaaatttcaccaagaatagcttaaacttctggggtgtgaagcgtgaactaatggcacggaaaaaaattgaaccgtgtttgccaagtgctttataccctaaaaaaggttaaaaagggttcaaccggagttggagaaaagatactattttttctaccaccattaccaccc

SEQ ID NO: 47951 - DNA, 333 bp, Oryza sativa
  unsure (1)..(333): unsure at all n locations
  Clone ID: PAT_MRT4530_50671C.1
agccgcttcttctggcgaactccggccatcatgcgcgcatggaagaagcacaatcctatcaactctgatgatccagagagagaacctgggacaccgggatgcgggcccacactccagtggcccgtncgcaacgtgaggctcagattccataggtgacattggacaacggcatcaattatcgatcattattctccattgctccatgccaaccaatccatctatcctttgtacagactacagtacatganccttgttttgctggcaatgtgcagagtttggaccatacctggcttcctctgcaagcgagaacatctatctgacagcttgtcttcg

SEQ ID NO: 47952 - DNA, 295 bp, Oryza sativa
  Clone ID: PAT_MRT4530_50672C.1
agcgatagctcacgtgtctacagcatgcgtactgaatagcatctgcaacgtgaacaaagcctaactggtggcactctgatcatcatgaagacttagacgtgaccgacgatgtacgtcgacggggcgtcttcatgtacgctagactctgtgaaagacaagaacctgcactatgcatgcaaaatgcttctagactagtagcagatactgggcgcaagacagatagaggagggcatgagaggagatgatctacggagagagagtgagtgacacctccacgtgtgcactgctgcgatag

SEQ ID NO: 47953 - DNA, 611 bp, Oryza sativa
  Clone ID: PAT_MRT4530_50673C.1
tcaccgtggagaccttctgaagcaggatcgagtacctgctccgttccaagtggtgcccctggctccgagttcagcaagttcgggattgtgtcttcacccgtgagaaccacaggtcccgtggatatctacgacgcaggtactggcaccatgtggaatctgcaccatgtttcgggtcaccgacgccacccaggtgctcaaggagtctcgaggaggccaagaaggcctaccctgatgcctttgtccgtatcatcggcttcgacaacgtcaggcaggtgcagttgattagcttcatcgcctacaagcccccgggctgcgaggagtctggtggcaactaagccgtcatcgtcatatatagcctcgtttaattgttcatctctgattcgatgatgtctcccaccttgtttcgtgtgttcccagtttgttcatcgtcttttgattttaccggccgtgctctgcttttgtttttgtttcacctgatctctctctgacttgatgtaagagtggtatctgctacgactatatgttgttgggtgaggcatatgtgaatgaaatctatgaaagctccggctatatatatttatacaaagggtatgagatggatgtgaatcctc

SEQ ID NO: 47954 - DNA, 867 bp, Oryza sativa
  Clone ID: PAT_MRT4530_50674C.1
gccgctccaccaacttcgggcttcggcaactgtcaccaatgccggaaggatcaagtcatcagtttgccaattgaggccatcaagaagttcgagaccctatcgtacctccaccactcaccgtggaggatctcttgaacagatcgagtacctgcttcggtccaagtgggtgccttgcctcgagttcagcaaggttgggttcgtctaccgcgagaaccacaggtctcccgggtactacgatggcaggtattggaccatgtggaagctgcccatgttcggctgcaccgacgccacccaggtgctcaaggagctcgaggaggccacagaaggcctaccccgatgcctttgtccgtatcatcggcttctgacaaacgtcaggcaggtgccagttgattagcttcatcgcctacaagcccccacaggttgcgaggagtctggtggcaaactaagctaagatcacagcactcgccgcctggtggattgctgcctataatgaatagtatgcagctttgcttttgggctatgttgatgatatatcaatatataatatgctatatatttttatgtttacacgtttggttatataccatctctatggtctctgctcttaacacatgatgtaataatgctgcttgccctgccctctgccgatcggttattattgtaagagtactaccaactatcgttgggtgaggatatgtgaaagcaaagctccggctatatacacaccaagatatgtatctagagcatatctgataaattcgtcgacaataaaaaaaatggatggtattacgtaattatgtttgtttttaaaaaaaaaaaaaaaaaaactcgagactagcctcgtgccgaattcctgcagcccgggga

SEQ ID NO: 47955 - DNA, 711 bp, Oryza sativa
  Clone ID: PAT_MRT4530_50675C.1
gcactagctcgagcaaagaaggagagagcttggtgagctgcagagatggccccctccgtgatggcgtcgtcggccaccaccgtcgctcccttccaggggctcaagtccaccgccggcatgcccgtcgcccgccgctccggcgaactccagcttcggcaacgtcagcaatggcggcagggatcaggtgcatgcaggtgtggccgattgagggcatcaagaaagttcgagaccctctcttacctgccaccgctcaccgtggaggacctcctgaagcagatcgaagtacctcctccgttccaagtgggttgccctgcctcgagttcagcaaggtcggatttgtctaccgtgagaaccacaggtcccccggaatactacgaacggcaggtactgggaccatgtggaaagctgcccatgttcggatgcaccgacgccacccaggtgctcaaggagctcgagggggggcccggtacccaattcgccctatagtgaattcgtattacaattccactggcccgtcgttttacaacgtcgtgactgggaaaaccctggcggttacccaaacttaatcgccttgcagcacatccccctttcgccaagcttggccgtaatagccgaaaaaggccccgcacccgattcggccctttcccaacaagtttgcgcaaccttgaatggcgaatgggcaaaattggtaaagcggttaatatttttggt

SEQ ID NO: 47956 - DNA, 2900 bp, Oryza sativa
  Clone ID: PAT_MRT4530_50676C.1
ggggggggagtatatatagccggggcttccatatatttcattcacatatgcctcacccaacaacatatagtcgtagcaaataccactcttacatgaagtcaaagagagatcaggtgaaacaaaaacaaaagcagagcacggccggtaaaatcaaaagactatgaacaaactgggaacacaccaaacaaggtgggagacatcatccaatcagagatgaacaattaaacaaggctatatatgacgatgaccgcttagttgccaccaaactcctctcaacccgggggcttgtaggcgataaaacttatgagcttcacctgcctgacgttttccaagcctatgataccgaccaatgcatcagggtacgctttcttggcctcctcgagctctttgagcacctgggtggcgtcagtgcacccgaacatgggcagcttccacatggtccagtacctgccatcgtagtatccgggggatctgtggttctcacggtagacgaatccgaccttgctgaactcgaggcagggcacccacttggatcgaagcaggtactcgatctgcttcaaaagatcctccacggtgagtggtggcaggtacgatagggtctcgaacttcttgatgccctcaattggccacacctgcatgcacttgatccttccgccattgctgacgttgccgaagcccgagttggtggagcggcggctgacggggagcccggcggtggacttgagccctaggaatggagccacgataccattaacagtctccatgtttggcctcccaacattgggagcagtactaggtcctctttgcccattgtttccattatggccacctgaaaagctcccgttcacactatagtttgccgcatgaccttcaatgggaggatcaaatacattggatgaaccacactgagcatctgatgatcctcgctcaatggatggctgctgctgctgctgtgtcataacatggacgtagtaatgaacatgatgatggtgctgcataaagctattttgtacatctacagggtggcccacattaactccattagcaattccttcatcaactttgtctttccctacaacattagcaggtgacgtttgacgctgcacaggatggaatgctgatgtatgttgggtagctttgacagctgatggtgatatcacttttcccctgtttgaagaaggttttgtgatggcattcttagtactggagcccatgtcattgttgttgctactaccattggagccttgctttatttcagcagcatctgaatttgacttcaccttgcagttggagtctgttttcagagcctctgaactgttatcttgaggtgaacagcttcccccaaatccagctccaccttgattagaagccacagttgtatggtacctggtgaaagctgagagatctgatcttttcagaatatttcgttcatcatggatttcagttgcagatccagttgttttcaatctcttcaaacccaactcttcagatgtcatatcaatgagagaatcacgatttttatcatttccatctggaaccttggaggagcaatcaggagcattattgattctaactacttgtttgtcatctgtgcttctggctattgaactaattaaatcaacagtttgagtagttggttcattctgtgtgttcctactatctgtttctcttgttgttttactttggggcatgagagtttcatgctgtttttctgttggattaacggacatctctcttggagaagattggtactccatactagaatttctaggagctcctatttctaagtacttccccatggagtcatcgttattttctttatgtttctttccgctccttttatttgcagtcggtaaccacctgttgctgcatatctctgatgtggggtgaattacttgcgcacaagtactatctggtagatcggatggttgatcaggagacatttgttgtgggctgtcaatctccactgcacgctttgtccatgaactctgtgttttaaaacaggctgatggcatgagaatacattggcacaattgtcctacatttagagaaaattgagtgccactgccattatcactgccatccctagcgttgtgtccaacacttaagtcgtcatcatcttcatcattgtcatcatcatcctcgttgtcattattgctaccgctgttattctcatattcatcatcaacctttggtttggtacacttttgtgttcggatgccactttcgcttccactgccactggaactgtggcatcgtctccaaacatgctgccaaaggttcttaagttcattcttacgtataggcttcactagaaagtcaactgctccttttgacaaacacttaaagactgtacccattgagtcattcgaagacatcataatcacgggaatatccttgcaaattttgtggcttgtgatcttactaagcagaccaatgccagacagacgtggcattacgacctcggtcaatacaaggtcaatgtggttttgcagatcttcaagacattgccatgcatgtagcccattttcagcagggataactgcacttggaaatctggaagcgcagaaccctcttgaatcttcataacaacacttacgaagcagtgcgctgaccacctgacgggtagagtcatcattctccaccagcaagaccctcagtgtcttcacagggaggaacctctcccaccggacaatctgcacttggtgctccttctgttcatctgtttgctggggctctggtggtgtactgtgcccattgggtaagtcctctcccatgccattcctccattcctcctcctctggcttgtgactatgaccattctccaggatgccattccctgtccccttaacatcgtctcgggaaggctcgtccgtaccagcttcgcaggcgctacccat

SEQ ID NO: 47957 - DNA, 311 bp, Oryza sativa
  Clone ID: PAT_MRT4530_50677C.1
caaaatagacagtggcggatccaggatttcaaagttgggtattcccgtctaagcgctgagccactggccgcccctgcccctcgcggccgccggccacccaaccggcctgaccgcctgagcttggcggagtggcgggcgccggccgccgccctccacggtagcacggtccagctcccgctgccggttacctcctcgccgcgccgccgcctaggtatggggagcggcgcgaaggagccgagccagggagggatgggtcacggagggagagtgagagggggccgtctagaagagtggtggctaaatgggtcaac

SEQ ID NO: 47958 - DNA, 453 bp, Oryza sativa
  unsure (1)..(453): unsure at all n locations
  Clone ID: PAT_MRT4530_50678C.1
caagaagtactcgagcaaagaaggagagagcttggtgagctgcagagatggccccctccgtgatggcgtcgtcggccaccaccgtcgctcccttccaggggctcaagtccaccgccggcatgcccgtcgcccgccgctccggcaactccagcttcggcaacgtcagcaaatggcggcaggatcaggtgcatgcaggtgtggccgattgagggcatcaagaagttcgagaccctctcctacctgccaccgctcaccgtggaggacctcctgaagcagatcgagtacctgctccgttccaagtgggtgccctgcctcgagttcagcaaggtcggattcgtctaaccgtgagaaccacagattccccggnatactacgatggcaggtacttggaccatgttggaagcttgcccatgtttcgggtgcactttaggcaacccaggtgctcaaggagtt

SEQ ID NO: 47959 - DNA, 738 bp, Oryza sativa
  unsure (1)..(738): unsure at all n locations
  Clone ID: PAT_MRT4530_50679C.1
ttcacatgccgccagaatcaggtcaatccaggtgtgccgattgagggcaatcaagaagttcgagaccctctcttacctgccaccgcttcaccgtgggaggacctctctgtaagcagatcgagtactatctccgttcccaagtgggtgcccctgtctcgagttcagcaaggtcggatttgtctaccgtgagaaccacaggtcccccggatactacgacggcaggtactggaccatgtggaagctgcccatgtttggatgcaccgacagccacccaggtgctcaaggagctcgaggaggccaagaaggcgtaccctgatgcattcgtccgtatcatcggcttctgacaacgtcaggcaggtggcagctcatcagcttcatcgcctacaagcccccgggctgcgaggagtctggtggcaactaagccgtcatcgtcatatatagcctcgtttaattggttgcaatgctgctgggatgtgcggatgatgtgctgcccccacctgtgtgtgtgcgtggtgtttcccccagtttggtgtcatgcggtcgtgtgttggattgttgacccggccgtgcgtcgtgcttgttgtgttttggtgtgtcacctggatgctnctctgctggacttgtgatggttaagagtgggtatctggctgtacgactatatgttgatgggtgaggcatatgngaatgaaatctatgaaagctccggctatatatatttaaaaaaaaaaaaaaaaaaaa

SEQ ID NO: 47960 - DNA, 1302 bp, Oryza sativa
  Clone ID: PAT_MRT4530_5067C.1
attcctgcagcccagacgctcttagcaggaaaggctattgcaatgctacggagggacgacagttgccattggagttatgcaaggaatttgaaagaataaatttgggaatggtcagaagaggtttcgttgcagccttagaagcaaagcccactctaattgatcaagttagagaagcccaaattaatgatcctgatattcaagaaatcaagaagaatatgagaagaggaaaagctatcggtttcttggaggatgagcaaggaactgtatggttgggtgagagaatctgcgtccccgacaacaaagatttaaaagatgcaattctgaaagaagctcatgatactttatactccattcaccctggtagtaccaaaatgtaccaggatcttaaggaaagattttggtgggcaagtatgaagcgtgaaatcgcggaacacgtagcagtatgtgatgtttgtcagcgagtcaaggcagaacatcagaaacccgccggtttgctgcagcctttgaagattcccgaatggaagtgggaggaaatcggtatggatttcatcactggtctacccagaacgtcatcaggtcatgactctatttgggtgatagtcgacagacttaccaaagtggctcatttcatcccagtaaagacaacttattctggaagtcggttggcggaattgtatatggcaaggattgtgtgtttgcatggcgtccctaagaaaatagtgtctgatcgaggcagtcagtttacttgaaaattttggaagaagcttcaggaagagatgggttctaagctgaactttagtactgcttatcatccgcagacagacggacaaaccaaaagggtaaatcagattttggaagacatgttgagagcttgtgctttagacttcggtggaagttgggataagaatctaccttatgcagaattttcgtacaacaacagttatcaagctagtcttcagatggctccttacgaagtactgtatggtcggaagtgccgcactccgcttttgtgggatcaaacgggagaacgtcaggttttcgggatggatatccgaagaagctaatcttgaacagatagaagtccaagaggatcttgtgccgcagtcgtcgccgtcgctccagccgtgcttcgccgttgttccagtcgtcgccgtcgctcgggaaggtcgccatcgtggtcgccgtcgcgtcgccgtcctcgtccgccccttcgctgtcgctgaagaccgccggagcatcgccgtcgtcgtcaagccgaaggactttgccgccttttcctcgatgccgccgccgtccgttcat

SEQ ID NO: 47961 - DNA, 962 bp, Oryza sativa
  Clone ID: PAT_MRT4530_50680C.1
gcacgaggccagtaagctagctaactaactacgtggctatggcccccaccgtgatggcctcctcgggcacctccgtggctccattccaagggctcaagtccaccgccggcctccccgtcagccgccgctccaccaactcgggcttcggcaacgtcagcaatggcggaaggatcaagtgcatgcaggtatatatgatatatacctcctcaggctgcgtcctttaaagtgaaggatcaaattaactcatgttacgaaattcaaattaacctgatttaaattttacattatttattcaggtgtgccccattgagggcatcaagaagttcgagaccctatcgtacctgccaccactcaccgtggaggatctcttgaaccagatcgagtacctgcttcggtccaagtgggtgccttgccctcgagttcagcaaggttgggttcgtctaccgcgagaaccacaggtctcccgggtactacgatgcaggtattggaccatgtggaagctgcccatgttcggctgcaccgacgccacccaggtgctcaaggagctcgaggaggccaagaaggcctaccccgatgcctttgtccgtatcatcggcttcgacaacgtcaggcaggtcacgttgattagcttcatcgcctacaagcccccaggttgcgaggagtctggtggcaactaagctaagatcacagcatcgcgctggtggattgctgcctataataatagtatgcagctttgttttgggctatgttgatgatatatccatatataatatgctatatatttttattttacacgtttggttatataccatctctatggtctctgctcttaacacatatgtaataatctcttccctccctctccgatcggttattattgtaagagtactacactatcgttgggtgaggatatgtgaaagccaagctccggctatatacaccaaaaaaaaaaaaaaaaaaaa

SEQ ID NO: 47962 - DNA, 528 bp, Oryza sativa
  Clone ID: PAT_MRT4530_50681C.1
atggccatcgtcgacaatgaaaatttgctctcacaaaacatgagaggctattccctcgataaaaacaagaggggccttcgaaactccgtccgcttaagtacatgcacgggtaggcggcaatcaagtttttgggagcgcgactgctctgcatcggttctccacggtattgtcttcttcctctacatcgactccctactctgcttcgtctacttccactacttcaacatatctattggtggaggcgctggtggaggtggcggcaaggacactggagaaggtgagaacgtcaacatcaacggaggcaacaacaccaataatgcctcatctagtaccaaagcgttctccggcactccttttcaactggtgaccatccttttctttaagcaacgatcaccactagcgtgcccagtaccaatggaagatcttgattttcaacgaaattctaagcttccaaatgaactatatgtcattgtagtcacatataataaaggtgaatggagaattggcagagtctatgatcccctctag

SEQ ID NO: 47963 - DNA, 615 bp, Oryza sativa
  unsure (1)..(615): unsure at all n locations
  Clone ID: PAT_MRT4530_50682C.1
ttttttttttttttgtataaatatatatagccggagcttccatatatttcattcacatatgcctcacccaacaacatatagtcgtagcagataccactcttacatcaagtcagagagagatcaggtgaaacaaaaacaaaagcagagcacggccggtaaaatcaaaagacgatgaacaaactgggaacacacgaaacaaggtgggagacatcatcgaatcagagatgaacaattaaacaaggctatatatgacgatgacggcttagttgccaccagactcctcgcagcccgggggcttgttggccgatgaaagctgatgagctgcacctgcctgactttgtcgaaaccgatgatacggacgaatgctccagggttaccccttcttgggctccctccgactcccttgacacctgggtgggttcngtgccccccaacttgggcacttcccccttgtccatttcctncaccttatttccggggatttttgttccccccggtaaaaaatccacctttgtgaattccaagggggggccccccttggaacgaaaggttccatttctccggagtcccccggganngggggtgaaggtcaattttatccccntnggccccggt

SEQ ID NO: 47964 - DNA, 326 bp, Oryza sativa
  Clone ID: PAT_MRT4530_50683C.1
ttttatttatattttttttttttttatttttttaggaaaagttgatcatatgtggtagggaataattaataagacaatgattgtgtggaaaattgatgtaaaattacccaacgatcccgatttagttttttagcaaagaaaaataccaagaaagttgaaaagaagggaacaaaaaaagacaaaataaatggaatacatttgtatgattgaaacgcagcgaaagaaagatctgataaaagaaggtaaaggaaccttaaagtttggatgagtgggaagaagcaacgttggttaaaaaagagaaagctgatttggacccaaactggagc

SEQ ID NO: 47965 - DNA, 1092 bp, Oryza sativa
  Clone ID: PAT_MRT4530_50684C.1
ccggccgggaaaaatctcaacagcactagctactcggacatactctactactactagccagtaagctagctaactaactacgtggctatggcccccaccgtgatggcctcctcggccacctccgtggctccattccaagggctcaagtccaccgccggcctccccgtcagccgccgctccaccaactcgggcttcggcaacgtcagcaatggcggaaggatcaagtgcatgcaggtgtggccaattgagggcatcaagaagttcgagaccctatcgtacctgccaccactcaccgtggaggatcttttgaagcagatcgagtacctgcttcgatccaagtgggtgccttgtctcgagttcagcaaggttgggttcgtctaccgtgagaaccacaggtctcccggatactacgatggcaggtattggaccatgtggaagctgcccatgttcggctgcaccgatgccacccaggtgctcaaggagctcgaggaggccaagaaggcctaccccgatgcctttgtccgtatcatcggcttcgacaacgtcaggcaggtgcagttgattagcttcatcgcctacaagcccccaggttgcgaggagtctggtggcaactaagctaagatcaagcatcgcgctggtggattgctgcctataataatagtatgcagctttgttttgggctatgttgatgatatatcaatatataatatgctatatatttttattttacagtttggttatgtaccatctcaatggcctctgctcttaacacatatgtaataatctcttccctccctctccgaccggttttattgtaagagtactacaattatcgttgggtgaggatatgtgaaaacaaagctccggctatatacacacaagatatgtatctagagcatatctgataaattcgtcgacaataaaaaaaatggatggtatcacgtaattatgtttgtttttaagtatttgtttgcaatgtttgtttctatgtttaaccgaatgtattgtgaatataggatctgacataaaaaaaaaaaaaaaaaaaaaaaaaaaaaaaaaaaactcgagactagttctctcctcgtgccgatt

SEQ ID NO: 47966 - DNA, 644 bp, Oryza sativa
  Clone ID: PAT_MRT4530_50685C.1
ttacattccccaaacttcattacatgaattggaaaaacgctgagaacaaaaatggaacacaaattgggatgctggcaaggcaaagtggcaaacttcaatctattggaggaagattgattttattcaattcaagccttagcaatgtgcccctttacatgatatccttctacagactgccacaaggagttagagagagattggatttttacaggaggagatttttgtggcaagaagatcaagggataagaaaatatcatctggtacaatggccggtggtatgttcacccaaagatcaagggggcctggggatcctggatttggaaacaatgaacaaagcgttgttagggaaatggatctggagattggaaaatgaggaaggttggtggcaaagctttttgacaagtaaatacatgggttgcaaacccatatctttattgaaatttaaaaatggagagtcccatttctggcatgggctcatggagatcaaaaacatctttctgaaattctgctccagggtgataggcaatggtgaaaagacacttttctgggaggacagctggatagggggcaaacctttaaatgaacaattccccaacctttacaatatcactttgacaaaacatataaactgtggcaaactgaaa

SEQ ID NO: 47967 - DNA, 1308 bp, Oryza sativa
  Clone ID: PAT_MRT4530_50686C.1
atggacgcgctgtccgcgcagccggcgtgggcgctggcgctggccggggtgggcctcatggtggccgcgaccgcctcggcgcgcctcgcgcggtggctctacgcggcgttcctccgcccggggaagcccctgcgccgccggtacggcgagtgggcggtcgtcacgggcgccacggacggcatcggccgcgcgctcgcgttccgcttcgcgggcgccgggatgagcctcgtgctcgtgggccgcagccccgacaagctggccgcggtctccggggagatcagggggaagcaccccagggccgaggtccgcaccttcgtgctcgacttcgccgccgagggcctcgccgccaaggtggccgcgctcggggactccatccgcgggctcgacgtcggcgtgctcgtcaacagcgccggcatgtcgtacccgtacgcgcgctacttccacgaggtggacgaggagctgatgcgcaacctcatccgcctcaacgtcgaggcgctcacccgggtcacccacgccgtgctcccaggcatggtggagcgcaagcgcggcgccatcgtcaacatcggctccggcgcctcctccatcctgccgtcctacccgctctacagcgtctacgccgccaccaaggcgtatgttgatcaattctcgagatgcctctatgttgagtacaagaacaaaggcatcgatgtgcaatgccaggtacccctgtacgcggcgacgaagatggcgtccatcaagaaggcgtccttcttcgcgccgtcgccggagacgtacgcccgcgccgccgtgcgctacatcgggtacgagccgaggtgcacgccctactggccgcacgcggtgctgtggttcctcatctccgcgttcccggagcccatcgtggacaggctcctcctcaacatgtccgtcggcatccgcaagaggggcatggccaaggacgccaggaagaagacgcagtgacgaaccagcaccaaagaatctgagcgatagtactctctacttcttctcctctgcagcttccgaaacattgggcgtttgatttaccccgtatctctggattagttcttctcatgagtaaggtgatgatgagctgatggttaaacagtgtgtctggtttgatgtactaagattgaagagtttaagaccatgtgacacgaactcgatctggcctggttaataaagcgcgggaaaaaggctttgccttctgctaatataaaaaaaaaaaaaaaaaaaaaaaaaaaaaaaaaaaaaaaaaaaaaaaaaaaaaaaaaaaaaaaaaaaaaaaaaaaaaaaaaaaaaaaaaaaaaaaaa

SEQ ID NO: 47968 - DNA, 384 bp, Oryza sativa
  Clone ID: PAT_MRT4530_50687C.1
atgggcatcgagaaatccaagcagcagctcgcgaggggcgcaaggggcagcatctcggcgccggctcacgagcggaggggcgacggcggtagcttgtgggtggaggaccggcggcgcaggcggtgggtcatgggcagaggagcggcgcgacagtcactgggcggaggagcaacggcacgggcggtggggtcgcgggcggggagcggcgtgggcggtcgccgggcggaggaggagccgcggcacgggcggcggggtcgcggccggggagttgcacaggcggtcaccgagcggaggagccgcgacacgggcggcagggtcgtcggcgcggagcggcgcgggcagtcgccgggcggaggagctgtggcggcgcttcttctccgataa

SEQ ID NO: 47969 - DNA, 3088 bp, Oryza sativa
  Clone ID: PAT_MRT4530_50688C.1
ccggtcatcgccgtcggtggccgtgcctcgctgccgcctcgggggggggggcccggtcccgtcgggttgctttgattggcaagatcttttgggcgcgattcgctcgccgttggttaaaatgttatatatgtagaaaatctaatacgttgtattttggtattttctgttatattggatcgaccctggtcctccacctggtgcctgcgtccccttctgtgtcgtcccttgactctcctttattccctcccgcagtcatagcgggagtgtcatggacgatagcgatgacacggacgcttggactggagtttccgtcaatgatttttgttgtagacgttcgtcgatgtagccgatcatgaagtagctgtggttgtcggtgtagccgcatatagccgaaggcgaaaaaaaaatatttacgccatggtgtgaagacaaaaactgtaattgttagcatcttgcaccttgtagatgtcagaggatgccattggggacgtcttgcatatgtcagaggacgtcgttggcgatgaggccaccactttggttggtcgtcgtacatgacgtgatcgatgccgttgtcggtgacgcggtcgttgccgtcgtagaggacacggtcgatgtcgtcgatgaagcgtgcgaggtgtccatctatgtagacgagtcggcagcggcaagttgatgaaatgatgtagaatcggcgaagacgatcgtcctggagagctcggcgacttgacttggactccgcgaagacgtcgcagatgatcggccggtgtcttgatgcaggtgtgcagcacaggcgtgtgcacatgttggcgacgaacagcatcaggcccttgcttcttgtgaagtaggcgatgcagatcgatccatggatgaggccggatggtatgatgcttgttgacgttgtctgctcgtcctccgccgcctcggccagtgccgcttcgtgacccacatgctcgtcggcatcttcctcggcccctccgtcctcggccgcaacccccacctccgcaccgccctcttctccgagcgcggcacctacatcctcgagagcgtctccctcgtcgccctcatcctcttcctcttctccatggccgtcaagaccgacctcaccctcctccgccgccccaccgcccgagccctcgccgtcggcctcgccggctccctcgtccccctcgccgtcaccctccccgtcttccacgccctcagcccctccctccccgccgacctccgcggctcctccctcatcaccgagctcgccgtccgcctctccctctcctccttccccgtcgtcgccgacgccctcgccgagctcgacctcctcaactccgagctcggccgcgtcgccctcaacgcctccctcatcaccgacgctaagtccccgctcttcaccgccaaggtcctcgcctccttcgccgccttcgtcctcttcgtcttcttcgtcgcccgccccgccggccgctacatcgcccgcaagcgcaccccgcccggggacctcctctccgagggctccttcgtcctcgtcgtcatcgccgcgctgctctccgcgctcgtcaccgacgtcatcggcttcaagtttatgatcggccccatgatgctgggcctcgcgctccccggcggcatgcccatcggcgccaccctcacggagcgcctcgactccttcttcatcgcgctcttcctcccggtctacatggcgctcgccggctaccgcaccgacctggcggagctgagcctgataggcgtcagcgcggagcacgaggagaagttctgcgcgctggagctgttcgtggcgctgtgcgtggccggcaagatggtggggtgcgtcgcggcggggctcttcttctccatgccgttccgggaggccaccgtgctggcgctgatgctcaacatccggggcatcgtggaggtggccgccatcaacaactggggggacacgatgaaggcgacggcggagcactactcgacgctgacgctgtcgatggtggtcatcacggcggtggcgacgccgctgatcaagctgctgtacgacccgtcggggaggttcgcgcgggcgaagcggcggaccatggaggagtcgcggcccaacgcggagctgcgggtgatggcctgcctcttcagcgaggaccacgcggcgccgctgctggacctgatcgaggcgtcggggtcgtcgcgcgacgcccccgtgtcgctgatcgtgctccacctgacggagctggtggggcacgcggcgtccgtgctgaagccgcacaggaagtcccggagcagctgcggcaacccgacgccgtcggaccgcatcgtgaacgcgttccgctacttcgagcagcaggcgccgctgggggcggtgacggtgagcccgtacgtggtggcgtcgccgtacagcagcatgcagcacgacgtgtgcctcctggcgcacagccgcaaggccaacctcatcctgctccccttccacaagtcctcggacggcgcccggagcaccgccaacaacgccatccgcggcatcaaccggtcggtgatgcagtacgcgccgtgctcggtgggcatcctgatcgaccacggggtggcggcggggtcggcgtgcgccacggcgtccaacagcacgctgcagcgggtggcgctctacttcctgggcggcgccgacgaccgggaggcgctggcgtacgtggcgcggatggcggagtgcggtttggtggcggtgacggtggtgcggctgaagctgcgggactgggtggggatggggggccgcgacgagatgagggacgaggaggcgctgcaggagttctggcagaggtacagctgcgcgggcgcggagagggtggcgtacgtggagaagacggtggaggacggggaggggacggcgtcggtggtgcgcgccatgagcgacaagttcgacctgctggtggttggtaggagagagggcggcggcgacggcgcggaggggtcgtcggcggcggcgctgacgagcgggctgtcggagtggagcgagttcccggagctgggagtgctgggcgacatgcttgcctccgccgacttcgcggccaaggtctctatcctcgtcgtccagcagcaggccgccaccaggaacgacgccgattactga

SEQ ID NO: 47970 - DNA, 611 bp, Oryza sativa
  Clone ID: PAT_MRT4530_50689C.1
gggctgcaggcaacaacccgggaggtagcgcgaggccctcgaaaaatatcagctcaggtcggaggccaaaaacagtaaaacaagcatggcggacgatgaggcgaagaaggccaagcaggccgagatcgaccgcaagcgtgctgaggtgcgcaaacggatggaggaggcctcaaaagccaagaaggctaagaagggtttcatgacccactgacacggaagaagaaactgcggttgcggctcaggaagaaggcagctgaggaactgaagaaggaacaggaacgcaaagcagctgagagaaggcgcatcattgaagagcgttgcggaaagcccaagaacatcgatgacgccaatgaaggccaacttaagtcaatctgccaggattactacaagagaatctgtgaccttgaaagcaagaagtgggatattgagtatgaaatcaagaaaaaggacatggagatcgccgacctcaacagccaggtgaacgacctccgcggtaaattcgttaaacctaccctcaagaaggtctccaagtacgagaacaagttcgccaagctccagaaaaaggctgccgaattcaacttccgtaaccaacttaaggtggtgaagaagaa

SEQ ID NO: 47971 - DNA, 1481 bp, Oryza sativa
  Clone ID: PAT_MRT4530_5068C.1
ggcacttgtcacgcccccaccccctttgctttgatgcacgcctagctaatcaattaacttaacctgcctcgcctctgcctattcgaaacagcagcggctccagctcgccgtggtcgactttcccggcggcgatcaccggcagcggaggaggagcagtacgtgtgtatatataaaggatggggaggcagccgtgctcggacaagctgggggtgaagagggggccgtggacggcggaggaggacaagaagctgatgagcttcatcctgaccaacggccattgctgctggcgcgccgtgccgaagctcgccgggctgctccgctgcggcaagagctgccgcctccggtggacaaactacctccgccccgacctcaagcgcggcctcctcaccgacgccgaggagcagctcgtcatcgacctccacgccaagctcggcaacagatggtccaagattgctgccaagctaccgggcaggacggacaacgagatcaagaaccactggaacacgcacatcaagaagaagctcatcaagatgggcatcgacccggtgacgcacgagcccctcgaccggaagcaggagagcccggccaccacctcgcagtccaccgtcacggcggagtcgtccaagtccggcgaggcgaccaggcagcaaagccggcagcttgacgacgccgtcgtcagggacatgtccgtgtctgccggtggcgacagcccgccggagtcgagcactaacaccgccagcaccgccggtggcagtagcagcagcagcagtagccatcaccaggaccctctggtgaagtggctgctggaagaggacctgctgcccaccggtgacgagccatggctcaatttcacggccagcaacgacgtcgacgagttcagtagcatcgccgccaccggcgccacgccggcgctgccgtgggacgtcggcatgacgacggactggctgctcgactaccaagattttgggatgggagactcgagcttggtggtcgatgcctccatggtcaacagctcaaatgggtccaacttctagctagaagatgtcagcagcttacttaattgtgttgctatcagtgtagataatcaagtgaagtgtataattaataaaagcatcaagattgtgaaagcagctaggcatggccggccaagatcggagggtgatcacaagtcgaggcctttgctcttcggaaaaccaatcaacggttgggattgatgcatttgagagagggtatgcgtagatggtgcatgttgttgtgtattttccccttgagattgattcgggggtttgtgccattaactagaagtgttattacttctcaaatggagatacttagatctttgttttttttttggagagatagaactatttgttggtgtagtacctatacatgttttcaataaaagatgtgggtgggtaatgtccaataatattagctcactagtttgtgtatatatacaatggtgtatgtgctgctaaaaa

SEQ ID NO: 47972 - DNA, 480 bp, Oryza sativa
  Clone ID: PAT_MRT4530_50690C.1
atgtaccatgtcagatcgagccaccacagctatccaacgaactccaccgcctcgatgtacatgtttatctgccatgggagcgggagcggggatggtttgcaagaggaaccgccgcatgttgaaggctccactgttactgtcctcgcagagcacggtgacgacatagctgtcaggcggcccgtggccggcatcggagcaggtgaagaggctagtgttgcggcacccggggaacatggtgctccgcttggtgccttcgatgtccgggaggcggaacagctcgccggtgagcgggttgcagacggattgcatgtattctggttctgggtcaccgaggtggcttccgcgagtggcgccggtggcggcgacatgcttggagaggccgctttcccaagtagcacgggctatgaggtcggagacgacagaggccgggacgcgggcatccatgtagatgaggtggaggccattgccgcttgtgcgtag

SEQ ID NO: 47973 - DNA, 289 bp, Oryza sativa
  Clone ID: PAT_MRT4530_50691C.1
atggcggccagagacgtcgacatggcgggggcatggcgaaaaggtgggcgccatgctgcccgtcatcttcgtcatcatccagccctcccttggcaggtgtggaggggcagggaggtggaaggcggcgccgactgccgcgacgaggaagcatcgggcgagcggtggcgaagcaggacggggcggcgtcggtcgctggggctcgagcttgtcgcgatggaggagatggcaaggacggcgggagtggccaccgtggcgctcgcggcgagagagatcgaggacggcgggagcg

SEQ ID NO: 47974 - DNA, 353 bp, Oryza sativa
  Clone ID: PAT_MRT4530_50692C.1
attcggcacgaggcaacatgaatgattaacggaaggctttccttcctagcaaatgagttcccttgtttggaaggaaggaaggaatgatagcctatagaaatgatagagccatggcaaagaattggccattggaatgtaagaaaatcagtttggttaccgatgtgcgactgatcgagagaattcagcactggcaacacatagggaggcaacagtgtgcaatcaaggaggctagaagagcttcgtattttgcatgcgggtatcaaattctgcatgcatctcttaagccctagcatatggtgtaatggaaatatcgatgcactctgatcagcataacttgataatttcactggagt

SEQ ID NO: 47975 - DNA, 174 bp, Oryza sativa
  Clone ID: PAT_MRT4530_50693C.1
cccttaacaaaaaaaacttatgggtatgaacttgcataggaaaacacgggttaacagggtataattaccccagaaataggagcagcacacaacatacggcttttaaaacagcattaaggtattgcacaacaccttgtggatcagataacaaggcttaaaaaacttagaccgaaa

SEQ ID NO: 47976 - DNA, 441 bp, Oryza sativa
  Clone ID: PAT_MRT4530_50694C.1
atgaaaggctatactaactgtagagtattgattttttttagtaaagtccatcgccggtccctaaacttgtaccgctgtctcatcccggtccctaaactcgcaaatcgaccgttcaggtccttaaacttgttcgactgtatcatcctggtccctaaacttgtagatcactcgtttagctcttctccaacttgttcagttgtgtcaccccggtctctaaacttggatttgaatatcatctgagtcaaataggacgggaccggggtgacacaactgaacaagttggaggacctaaatgagtgatatgcaagtttagggaccgggatgactcaacagccagaacaggagaaactgtgttgccatggacaagctctggtcagaaactctccaccacactcttccagtctgtgtcctttgttactggctatagctaccatagcagtt

SEQ ID NO: 47977 - DNA, 1715 bp, Oryza sativa
  unsure (1)..(1715): unsure at all n locations
  Clone ID: PAT_MRT4530_50695C.1
ttttttttttttttttttttgaactggaaatacatagattttattgaaaacaaacttgaaatgcaatacatagatatattgaaaacaaacttgaaatgcatcacttcattgaaaacacaccatatgcctcctgaacagaggaaatcgaatcctacgatgattcatccaacttcaaaccacagcaaccacaaacttctctccattttttgcttcttttttttcttcttttcttgcatgcttccatcatcacacccatgcacaatcagccaccatcttctccggcgccggcgagcccaaaccacttcacgcaaccttctccttgatctcctccgcgcactccgcctccagctccggcgccgcctcctcctcgacgagtaccttcttgagcgcctcgtagcacatgaaggagatgccggcggcgggcatgagcttgatgcagctggggccgaggccgcggtagaggcccgcggcgccctcgccgcggaggatgcagtacatggcgtggagcacgtggcggtacacctgccggccgccgacggcgccgacctgcatctgcttgcgggcgacctcgagcgggaaggtggccgtgctggcgatggcgcccgccgccgacccgatgagcagcgtcgcggccgggccgacgtcggcgcgccccgtggcgcggcggtacaggcggcgcagcgtctcgtaggcgtagaagttggtggccgcgtagggcaccacgccgatcaggctcggcgccaggccgcggtacagctcccccggcccgccctcccgcacgatcttcacgaacgcgtgcagcacgttgtcgtacacgtccttctcgatggtgaggcgggtcttgacgagctccatggggtaggtgcagagggtggaggcgacaccggcgagggcgccggcgacgagggggacggggatggggatcttggcaggctcgccgtcctccggggtgaggtacttcttggccgtgtcgtaggtgaaatgcgttgacggcgttgccgcggaagaggccggtccagccctcggtgcgcatgatccagcggaagacctcggccatggagccggcgccgcagctgccgaccatgaggtgggtgcggatggtctccagcggcgccacgaaggtgcgcgacacggcgccggcgatggcgccgctcaccagccggcgaaggtgcgggttcccgatcttcaccctcaccttcctcagcgacagcagcccgccgccgcccttcatcttcctgccctgcctcttcttccccgccgcctcctcggcctccgcggcggcgagctgccgcgcgacgtcgcagttgtcccggcccttcgccgcagacggcaagctgagcccgacgctggcgaacagcggcggcgccgccgtccggcgagggaactccaacctcttgctgctgctgttgatgcgctccccttccaccgagctccacgggaacgacacctccgggacgaaccaccccttcctgtccaccaccgccaccgcgccgccgccgacggcgttgttcctcgtcaccatcgtcgtcaccgccatcatcgccgccatcgatcacaccaaaattaaaactacttcctgctagctcgaggaggaaagaaagaatcagagcgagcgttgctgcttctggcttctgattcctggctggtgttcttcccggccgattttcccggccggctcgccaatnntcgnccctataagtgaagtcggtattacg

SEQ ID NO: 47978 - DNA, 787 bp, Oryza sativa
  unsure (1)..(787): unsure at all n locations
  Clone ID: PAT_MRT4530_50696C.1
gcgccaggccgcggtacagctccccccggcccgccctcccgcacgatcttcacgaacgcgtgcagcacgttgtcgtacacgtccttctcgatggtgaggcgggtcttgacgagctccatggggtaggtgcagagggtggaggcgacaccggnccagggcgccggcgacgagggggacggggatggggatcttggcaggctcgccgtcctccggggtgaggtacttcttggccgtgtcgtaggtgaaatgctcgatggccttgctgggggcgacgcggaggacgttgacggcgttgccgcggaagaggccggtccagccctcggtgcgcatgatccagcggaagacctcggccatggagccggcgccgcagctgccgaccatgaggtgggtgcggatggtctccagcggcgccacgaaggtgcgcgacacggcgccggcgatggcgccgctcaccagccggcgaaggtgcgggttcccgatcttcaccctcaccttcctcagcgacagcagcccgccgccgcccttcatcttcctgccctgcctcttcttccccgccgcctcctcggcctccgcggcggcgagctgccgcgcgacgtcgcagttgtcccggcccttcgccgcagacggcaagctgagcccgacgctggcgaacagcggcgttgttcctcgtcaccatcgtcgtcaccgccatcatcgccgccatcgatcacaccaaaattaaaactacttcctagctcgaggaggaaagaaagaagaatcgcgagcagcgctctgcttcggcttcgat

SEQ ID NO: 47979 - DNA, 849 bp, Oryza sativa
  Clone ID: PAT_MRT4530_50697C.1
atggcgatcggagcggctccagcttccaatcagcctcatgacacgagcaacatactcgagaacgtgtgggccagcatcatgacgtcgtcgtcgtcgccggcggtgtcgtcgtcggtggcggtgtcgtcgtcggcggtgaccggtcaggaggagaattcggcgatcttgcagaggttgccgagcttggggaggtggatatccatgggcgcagaggagtgggacgagctgctgctcagcggggcggcgctcgcgtcggaatcctccggcgagctacagctcgtcgccgcctcccccggtgatcacaaccaggtcgtcggtggcggcggcggcgccaactacaggacgacggcgacggccgcggcgcggaggagctaccgcggggtgaggcggcggccgtggggcaagttcgccgcggagatacgcgacacgcggaggaggggcgcgcgggtgtggctcgggacgttcgcgacggcggacgaggccgcgctggcgtacgacatggcggcgctccgcatgcgcggccaccgcgcccacctcaacttcccgctcgccaccgtgcagaagcacctcgagcgcgacctcgccggcggccgctcctcctccgatcagacctccacccgcgcgcgccgcaggaggaggccgagagcgaacaccaccaccgatgccgcagcaagaagcgtcgtcttctccggcgtgcagaccgcgacgaactgtgatcacatggtgtcgttcgcttcagaaaaagatcaagtttcgatgcaagaatgctcgaaaagtgacgcaggagtgatcgatttcgaggagattggtggcgagtattgggattatttgttcccgcctcttgtataa

SEQ ID NO: 47980 - DNA, 692 bp, Oryza sativa
  unsure (1)..(692): unsure at all n locations
  Clone ID: PAT_MRT4530_50698C.1
gtcgttcccgtggagctcggtggaaggggagtgcatcaacagcagcagcaagaggttggagttccctcgccggacggctgcgccgccgctgttcgccagcgtcgggctcagcttgccgtctgcggcgaagggccgggacaactgcgacgtcgcgcggcagctcgccgccgcggaggccgaggaggcggcggggaagaagaggcagggcaggaagatgaagggcggcggcgggctgctgtcgctgaggaaggtgagggtgaagatcgggaacccgcaccttcgccggctggtgagcggcgccatcgccggcgccgtgtcgcgcaccttcgtggcgccgctggagaccatccgcacccacctcatggtcggcagctgcggcgccggctccatggccgaggtcttccgctggatcatgcgcaccgagggctggaccggcctcttccgcggcaacgccgtcaacgtcctccgcgtcgcccccagcaaggccatcgagcatttcacctacgacacggccaagaagtacctcaccccggaggacggcgagcctgccaagatccccatccccgtccccctcgtcgccggcgccctcngccggtgtcgcctccaccctctgcacctaccccatggagctcgtcaagacccgcctcaccatcgagaaggacgtgtacgacaacgtgctgcacgcgttcgtg

SEQ ID NO: 47981 - DNA, 663 bp, Oryza sativa
  Clone ID: PAT_MRT4530_50699C.1
tggttaaaacagattgagattgtccggtgttccatgtgcgtgtgcactgggagtggctttgtcagaattcttgttcgacttgatctttggcttaagtgaatctaatgtcaagcaatttatgtgccaccctttctctaacatagtggtagtcaacttcaacatgctttggttctagtgtggaattattggataagctgatataggttgcatcaagattgtcacgccataagcatggtgttctgttcaggtatactccaatctcaactagcaaagactgacctggctactgtgtgctggtttcttgagctccatgagaccaagtttttgccaggaaaagctgcaaatcgtccagtagaacatgtgtcattgaggcatctggatcaagctgcatcagtaattgcgctgattaattttgtagtttccttcttgtctgataacccatgatatatgatgattcagatatcttattatcctctttactgcagaccaatgtatatgaactgcaacaattggcaacaacgacctcaagagacccaagcttcaaactgccatgtgaatcgatcggtctgtcaacaagcggaggcgtccatcaaccgtaggatatgattgttggctgcagccaaaaattacaaaaaaaaattgatatgtttgcactgaactgga

SEQ ID NO: 47982 - DNA, 1767 bp, Oryza sativa
  Clone ID: PAT_MRT4530_5069C.1
atgtcgacctccgccagcccatctggcgcatcttcagcagagtacgcagagcacctctccaatctgatcgcagttccaagtttgtctcatgaaaaccactactttcttggtccaatcggcaatcccgatcccactgagtttatcattggtgaaaccaataggattcccttcagattagccaatccaaatctaggtcattggaagaataccttcaagtcttggtcatcccttgaaaaaacctcacccgagaaaagctggaccacatgctgcggtcctacgaccaattggcagtttgtagccgaggccttagaatcaaagagacaactccccttaggcaaaatcctcctcggctatctgtaccaaacgttgaacaatgcatcgacaaaaatagctgtcggctcagtggttggagcaggtggtccatggtggctgctacagtcttggctaaacctgatggtcatgaaatttgtcaatcggccatatgtgacagaagctgaattcccaagactagaatcaatcatagaagacgatggagaagaacgcactcatcgcagatgcacatcttatggagaatatgcatccaccccagccgatgcaagagcaaaactatcagctgagctgctcaaggactggttctgcagcttttatgaaggttttcagaaagatgctcgaatttggttcccctacgaagattcaacacttctagagcacccatcggacttcagatttgaggacatcaaccatgagcgattccaaaagtccagagagatcttttcggctgcaatcagcccatgcatccttcctgttggcattcatcaagggaggaatattcaaatttcttatgaattctatcacccaatgagctctgccagcattgaaaatatagagctggcaaccttcaggagcagggcgtttgacaggtggtggggtgaatggaagctgcatctgtttcatcaatcggcttctatgtacatgacagatctttttcctgatattatccctcagacaacagaatcttctcctccacaccaaagcaatagtggcagagatatagagtatgccccaggtctaattccaaatggaggtgggccatctccccctgtcatcggctatcatgcccccaagacttcaactcttctccaagggctcattagagaaccagccaatgccggtaaaaagaaaaaaactagagcatcgggtgtagatccatcggctccggctccaaagaagaaagctaagtcaaagaagaccaagctgaccgatgatttgcctgccctagatccatccattgagcaagctttggatgaacaagagatcaaagaggatgttgacaaagctgcagtcgagaaaaagagaattgctgtgaagaagaaatcggcaacaacaactctcaaaccggctccaccagttttagccgatctgttctcttttgacatcaaggactatcttgatgtccttgatgaagaaacagaagtagataccactagcatggctctagctcccctgtctgatgatgtgaagaaaacacttgaagatatttctcgtcggctagagacatcatcactagacagtttggtggtcgactgtggatcaattaggactcggctacacgaagttcaagctttgattcctgaagaactagctgatgttctcactccagctgcttatcttgaacagcatcaattcaagctggggaaagccaagcaaagattagcagaacgccgagaacgcaaagagattgaagctaccatccaggccaatcggtaa

SEQ ID NO: 47983 - DNA, 1424 bp, Oryza sativa
  Clone ID: PAT_MRT4530_506C.1
atcttttcttggttcgacccagctcccagatgatttcatcctgaatcatcgtcgtcgtcgtcgtcgtcacaggcaagaagaggagaaggaattacacctgggattatcgattggttgttcggattttcttttggatctattcatgctcgctctgtgcgccggggattcgatcgttgggcagggcagtgatctctgcgtcgagggtttcgacgaattggactgcagattcgtcgccatctcttcgcagaggggattctgcctccgccatggggagggtcaagctcaagataaagaagctggagaacagcagcggccgacatgtcacgtactcgaaacggaggtccgggatcctcaagaaagccaaggagctctccattttgtgcgacatccctctcatcctgctgatgttttcacccaacgacaagcccacgatttgcgttggcgatcacagcagcatagaggatgtcataacaaagtatgcacagcaaactcctcaggaaagggctaaaaggaagttggagagcttagaagccctaaagaagacattcaagaaactagatcatgatgtcaatattcaggactttttaggctcagggggtcagactgttgagatgctgattaagtcaattgtttggcaggaattatcgagccatcttggtgctttgcaatgtcaaatggcagatgtcgaaaagcgcctcagttattggagcgatcccgagaaggttgagaatattgaccatataagagcgatggagcaatctctcaaagaatctctgaatcgcatccggattcataaggagaactttgcaaagcagcatctgatgagcctacagtgtgcagctgctcagttccagaacgacatgaagctcccactaggactaacaggtgacccgaacacttcatcgtggttccatggcggcggcggcgcagaggcgcagcagccaatgatgctacctgaagaccccagcttgctccatcagagagacatcgggtgctcagcgagcacgtcgttgcagagctacccgggctacttcagcatgggcaagcagtccaccgacaacgccggcggcggcgagcagcaccaccacgcggcggtgcagcagcagccggagttcagccaggccgactgcctgacgtcgctgcagctcggcgcgcagttcccgtacccgtcggcgttcgacaacgccgggctgctcagcgaccggctgttcgacaacgcggcggcggcggcggcggcgatggacttcggcggccactacgacctgccgaggcccggcgacgaggccagcttccagaactgggcgtcggcggcctgcggcgccaccatgtatgatcatcagcagcagcagcagcaacagcagcagcctgcccaaattatgactgaatctctgacccccatcagctccctgcagcagcaactgtag

SEQ ID NO: 47984 - DNA, 264 bp, Oryza sativa
  Clone ID: PAT_MRT4530_50700C.1
atggcattattcatcgcatgtgctcccaatcaacttcacgtcgtcgtcggacctcgccagagacacgagcaacatgagtttgccgccgtcgaacttcagccaccaccaccaccttcgagctaccgccaccgcctcccatggccatatatggcgaggagggtgcgcggagtagccgctggcggtggctcggtcgagctacgccatgcaccaccgcctctcaaggctatatccaacgagtctcaggccggatctggcgaggagtga

SEQ ID NO: 47985 - DNA, 183 bp, Oryza sativa
  unsure (1)..(183): unsure at all n locations
  Clone ID: PAT_MRT4530_50701C.1
caaaacattnaattattcattgattgtttggataactatttcgtgcaatgcaccacagcaccggggggatcctactagctatgaggcaagccagttaagcttagtactggccgggggaaaaaatgctgaactgctggggctcaacccggcacatcaacggcagctgccccgggtactggcctc

SEQ ID NO: 47986 - DNA, 534 bp, Oryza sativa
  Clone ID: PAT_MRT4530_50702C.1
atggctgcaccagcttcctccacctcgtctcttctcctagtgttggtgatactgctcgcagcagcgctgatcagccactcatcagccaatgcctggcctgctagtagctccggctccggcggcggcggcggcggcctcagcgccggattctacgacgagacgtgccccagcgcgcaggacgtggtgcggcgcgtgatccaggacgcccgcgtcgccgacccgcgcatcccggcctccctcatccgcctccacttccacgactgcttcgtcaacggctgcgacgcctccatcctcctcgacgaggacctgccgtccgggatccacaccgagaagcgcgtcccggccaacgacaactccgcccgggggttcgacgtcgtcgacgacatcaagtgcgagctcgacaaggcatgcccgggcgtcgtctcctgcgccgacatcctcgccatcgccgcccaggtctccgtcgaccttgttggagttaatttatttatagaacataccagcctactctctaactctctctactactcatga

SEQ ID NO: 47987 - DNA, 330 bp, Oryza sativa
  Clone ID: PAT_MRT4530_50703C.1
atgatccatccatccatccgctttgcaccctatctcgcagtattcccccgatcaggaggctacccatgccggttgctcgcggcctatcccgccgcgccttgccctccccggctacaagagccaccatatcacaatcaatgcgtagtcgccttcgccttgcagtttggaggggtcgcacgggctccatgcatatggttggatggagcgaccgtcacagtggagtttgaaggccagccagccagctcccagctgctcgctaagtcgctagtgtgtgtgcattctgatgtggctgaaatgtttcacatggttcatcgatggacggatgctccg

SEQ ID NO: 47988 - DNA, 239 bp, Oryza sativa
  unsure (1)..(239): unsure at all n locations
  Clone ID: PAT_MRT4530_50704C.1
gacgcaaggncggcgctgctgcnttctgcacgctgcggctgcnacggccgacggcgacgggcgaggggcgctcgctgcttggncgcctggttggtcggcgtgacgatccgagccgaggtcgccaagacgccatcncngacaccnaggctgccggccgcagcnccgccgagcagccgaggtcgcnaactcgcnaggagtcgacggcatttcccgatttccggcgttngcggcgagccggc

SEQ ID NO: 47989 - DNA, 120 bp, Oryza sativa
  Clone ID: PAT_MRT4530_50705C.1
atgaagaggcgagaaagaatcaacagattcgcatcagagaagaacaacggcgtcggcaaagcacttcggcgaggagttggccgccgcggctgcatttatgggagggcaagagagagctag

SEQ ID NO: 47990 - DNA, 278 bp, Oryza sativa
  unsure (1)..(278): unsure at all n locations
  Clone ID: PAT_MRT4530_50706C.1
ctcctttcctctctgcgtgtgcatctttcgattccaatgccgccgccgctcgaagcgcgaaantacatcgggctcgcggcgtccccggcctcgtcctcctcctcctgctgcgcgtcgacccccgtngccgaggtcgtcggggcgcacctngcgctccgcctcggcctcccggggtcggagtcgcccgcccgcnctgaggcggaggctgtcgtcgtcnacgncgcgntcacgctcggccctgctcctcctccnaggggcggngccaagcgcgggttcgt

SEQ ID NO: 47991 - DNA, 2686 bp, Oryza sativa
  Clone ID: PAT_MRT4530_50707C.1
atgagcatgtcgtttgctctgaatgctgagccaaacactgtgtggtataataaccgctccctcctccagaatacattttcagatgacaatttcttgatgcgcatcttcctccctcatgacattgcagttccaagtataaatgatagcatcgttccttcatttgcttgcgggttcttctgtgcaggatctgcaaccagctgtgatgcctacattttttccatcttctttggctatgttagcaccgatttcagtcagcggctgcggtggcccgagatagtctggtttgccaaccgtgatcatccagttggagagaatgctactgttcaatttactgaacttggggatttagtgctctatgatgcagatggaacacttgtttggtccacccatacagcgaacaagtctgttgtcagcatgaaccttacagggtcaggaaatctggtattgttagaccgcacaaatgtggaggtctggagatccttcgatcacccaactgacacgcttgtcatttctcagacactacagatgggtcagaagcttgtggcaagaacttcgtcgacaaactggactgagggaaaattgtacctcaccgagtcaccgtcctcgctgatggcatcttacgttgcactcaagaatggtagccttgaggtgttcacttctttccaggagacaaaggcgcctgattaccacatccagctgcctgagaattcctttgggctggagtttgcaaggctagattgggatgggcacatgagactatatcagtggatcaattacagtgcctgggtgccttcagatatttttgacataactgacccttgtgcttatcctctagcttgtggagagtatggtatttgctcgcatggacagtgcagctgcccagatgtagccattgggcaatcaggattgtttgagctggtcgatgccaagggagttaaccatggctgctttctgacgtcttcattgacttgtgggtcagccaggaagactaggtttcttgctgttcccaatgtcacccacttcaattttgtctacaattggacaacaaatgaagatcattgcaaactatcatgcatggatgattgttcttgtcgggcttcatttttccagcataaggacatttcttctggtttctgttttcttgcattcaacatattttcgatgataaattttagtgcacaaagttattcaagtaactttagttcttctgcttttctcaaaattcaggactctacccacaaatccttattatctaaagagaaaagagcaatcgttttggttgctggttctttgagttttgttacttcagttattgttgcagtgcttatagttctgagaagaaagagagacgaaccattagaagatgaatattttattgatcagcttccagggctacccacaagattttcttttgtggatttgaaatcagcaacaggagatttctcaagaaagattggggcagggggatttggttctgtttttgaaggacagatcggtgataagcatgttgctgtcaagagattggatagcataggtcaggggaaaagagaattcttagcagaggttcagacaattggaagcattaaccacatacacctggtgaggctaatcggattttgtgttgaaaaaactcataggcttcttgtctatgagtacatgcctaatggatctttggataaatggatttttcagaatcaccaagctgatccacttgattggaaaaccagattgaagattatctctgatgtagccaaggcattagcttatcttcatagtgattgccgacaaacaatagctcatctggacatcaagccagaaaatatacttttggatgaggtgttcactgcaaagatatctgactttggacttgccaaactgattgaccgtgagcaaagcagtgtcatgactagattaagaggcagactgggttacttagcccctgagtggttgacatctgtgatcactgaaaaggttgatgtgtatagctttggcgttgtgataatggaaattttatgcagcagaaggaatttggactactcgcagcctgaagaaagctgccatctcatcagcatgttgcaggagaaggccaaaaataaccagttgatggaccttatcgatccatgtttctttgatatggaattacatatggatgatgttttatgaatgatgaatttagcaatgtggtgcttgcaagtcgataacaatagaaggccttccatgtccatggtggtcaaaatcctggaaggtaccatggatgttgaaactgaacttgattttgacctggtaaacatagacccgatggtagtagcacatcgagcagctcaaaggagcagtattactttgcaggtagactgtgtcctttcagggccaagatgaaatacaaggagctcaaatatattcttcaaagatatcaagctcaagattgaaaacacgtactcctgttttcctatactatggcatttagataagcaaaaatgtagacatgtagtgatgtactatagtgataatgattttttttctgttctccaatgcaacagctttatatacttgtgatgacaaacatttgcagttgcaaactgtatggtatctgttgctaggaactggaagatcccagagttctctctttagataatgttcccagacatataagtcatagataacttccaatgtctgataactttatatt

SEQ ID NO: 47992 - DNA, 282 bp, Oryza sativa
  Clone ID: PAT_MRT4530_50708C.1
atggtgagttacccttatggaagtgcccaaggttgttgtcgaacaccgtatgcgtgcagatttttcatgtgggaatctcagtatgagcagtatttggcggatggtcgcgtaggagtgggacatcagtcagggcgagaaagtcatgttgaagcaatggcatctatggggtttggggtctcagaattgaagggatgcaatgcagtgggacagattttagtgtacattagagttttgcaagctttattgctactattgatattggtaattgtcattagcaagtaa

SEQ ID NO: 47993 - DNA, 211 bp, Oryza sativa
  Clone ID: PAT_MRT4530_50709C.1
tttgtgtttttttgaagggaagtgaatttacaaggcataatagagtgcagaaagctggaatattaaaaacagctgatgagttatgagcgataaaggaccgactaaagttcaatgggcacgaacctcataacatggcctgaactgagcagtggtacatgctcagggagctgacattccacatattcccttttcattctgtatgccagtttcc

SEQ ID NO: 47994 - DNA, 789 bp, Oryza sativa
  Clone ID: PAT_MRT4530_5070C.1
agatgtaaagaacccatttttgtgctttgtttctgctgttatgtggagttatctagtgttaaagcctttttcttttccgttggtcgtgtagccgctgcagcttcggaagatccgctcttcgtggaagtcgaagccgtcgattgggaaaacgagcaaggcaagacacatcatctcttcctctttcaaaacccctaaaacctgttttcggtggggtttgggtgcatgccagttgtgggaagtagcaccccggccactataaggattaagctcgggcctctgttgcaaagcactaccgtacttccacatgtctaatgggtaaggcttagtttgtggctcagtcggtggaggagggttgaaggcgttgtatggcaccactggtagcaaatgcgaatagctgaccatgatagcgtttgagaagattttgtacattctctccttcatgaccttaaaatcaagagagtctggatcttcacggttcgggtcatgcttgccatcaaactcaaaggccgtacgggatctctctttaattggagctagccggctcttgataaaatgccgggtgatctgttctccttgcaggccttgctccttcagtttcagcatacggtccattagggcaagcgcctgattctcccattggaagtgagttccaggtgtcctgataactggaggaagacaggagtactcggggagtgcaggctcggggttttgtacatagaacagtttgcatgccagcctttgtttgaggttttgaagggcatgaaaaaatatttttggctcaaagttccc

SEQ ID NO: 47995 - DNA, 544 bp, Oryza sativa
  Clone ID: PAT_MRT4530_50710C.1
atgagtcttttcggatcaaaggcaacgacagttagtatagcttttggcgaaacacttcaaggtttcactgaaaggcagcaagccaaaggaccccatcgtcaccagaagcatccacaactctcggagtgaagagtacttggttgacaaagttgacgccaaagatatgaattatgagaagttctagaacggaagtcccatcttcaagtgccataatccagtcgaagtcagctagaggtgcaaccagggaaaagtcaggtgaagagaagattccatctgcacctccctcttccctctccctcccgggctgcctctctcttcccctcccctcccggcctgcccggcccaggccgcctctccctcctctcttcctgggccggccgccggcccaagccgccccagcccccgagccgttcccctttcgcacgtgccgcgcgcgtgcgcgcgctgacgccgtcgcccgaccgcgtggggcccgcgcgtcaggcgggcgttgtctttcttctcttgtccgggtcctctgactcctgtggaaccctagctcgtt

SEQ ID NO: 47996 - DNA, 1026 bp, Oryza sativa
  Clone ID: PAT_MRT4530_50711C.1
atggcgcgcggcagcatggcagcttgccttcctctgatgatgagatggttagccatggatgcactgcacgcagtcacccgagaacacaataaaattgcaaagcatatgcatgctcaaacttgcaggcaacgacatgcgcagctggctgggacgctggggactcctcgtctcttcgtctcatcgcctcgacctcttgtctcctcgctgctgccatgccgccaccctagcaggccgccggagtgccgtgcggctgcgaggaaggcggcggcagggcttcggcgggacctgcgacggacagtgggattgggtctggggtttgcccccagatctggcggcgcgctagtgcgagagacggcagggccatgggcggcggtggcaggccaatacctggttgcgcatggtagcagaggtggtcaggagaacagcgccgcggcaggcggtgggcgctgcggaggacgttggcggcaggtgcgacggaggatggtggcggcggatgcggcggaggacggcggcgacctaagcgtcaacggccaaccctcggcagggagaaggcagatccgacggaggtggttccgtagttgtaccattaagatatgtattttacctgtatttgataaaaatgtcctcaccctctggtggtcgagcgggacaggtggaccggcggcgaagctctctcgagcagatcaagatgatggagctcgagtgcgacagacggcaaccacgttcataccagctaacattagatacacgtgttctacccaaaggccaatcctttcgatgctctatcaacttgctgccattattctgctcgactacaagaagaacaagcttgccaagctagatgctggagtgcagcagcgcgcacagtgcagctacggtgacggtggtggtgggtcttgggctcgccacgttctcgcggatttggcggcccctgccccgccaccgccgctcctcccctgggagcccatcgccgtcagttccaacttccacctactgcttcgaagaaggagagggaagatgaatatg

SEQ ID NO: 47997 - DNA, 810 bp, Oryza sativa
  Clone ID: PAT_MRT4530_50712C.1
atggtggggatgaggtcggccgacggcgcaaaggacgacggccatcagcgagcgccgcgcacggaggacggcccgggcgtctcacctcgcagcctggatgcatcgcccgcctcccggatgtgtagtcgacgttgggggaggaatgacggcaacgaccccaccgtcatcctcacgacaaatccagcgggcgccaccgccgccgacgagaatcgattcaggacgctactctcctccccccgccgccggtggatccgtgcggggccaggcgagggacgctcgccgccggagggcatgtttggcacagctctagctcccaactccaacttacttagagctggagctgtggtggcggcgggcgaacaggcgctccggcggcggctcgacggcgcgcgcaggcagcaaaccggcggctgcgcggcggggaagcagggcccgacggcggctcggtggcgcgtgcaggaagtaggctggcgactgctcgcggcggggcagcagggcccgacggcggctcggcggcgcgcgaccgggcagcaggatgatggcggctctgcggcgcgcggctgggcagcagactgcggtgctccggcggcgcgtgcgggcagcataccggcggctacgcggcagcgtgcggcggggcagcatggcccgacagcagctcggcggcgcgtggctgagcaactggctccggcgctccgacggcggcttggcggcgcgcacgggcagcaggccggcggcggggtggctagacggcgcacggcaggcgtcgaggagccaatcccctcgattctttttactttttttttcaactag

SEQ ID NO: 47998 - DNA, 1422 bp, Oryza sativa
  Clone ID: PAT_MRT4530_50713C.1
tcctccccttccgtctctccgcgctccagctgcacgccaattaaaccctactcctcttgcgttgcgttatctgcggttccgtctcccactactcgcgcacacgtagaaacggaaggagaaacaaacaaaaggcgccgagtaacgcagatagagagttgtttccgcaccgagcgcgtccgcggcagtgtgtgtgtgtagcggtagcgcacgcgcggctcgcgggcgcgccggttgcaccagctgtgcgttgcggcgacgatggaggtgacggccgagttcggcggcgcctactacggcggcgcggcgggccgcgagaagaaggcgctgcagcaggggtgcggggaccacttcgccgtggacgacctcctcgtgttgccctacggcgaggaggatgaaacaacaagggagggtgaggccaccggcggtaaggaggaggctgccggctttgggaacgcgtcggcggactcgtcgaccataacggccctggatagctgcagcaattccttcggcctagccgacggcgacttccccggcgagctgtgcgagccgtacgatcaactcgcggagctggaatggctatccaactatatgaacgagggagacgacgcattcgccaccgaggacctccagaagctgcagctcatctccggcatcccctccggtgggttctcgacggcgagcgtcccgtcggctcaagctcaagctgcgtcggcggctgcctccatggcagtgcagcccggcggcttcctgccggaggcccctgtccccgccaaggcacgaagcaagcgctcccgcgctgcgcctggcaactggtcgtcccgcctgctcgtgctgccgccgcctccggcctccccgccgtccccggcatccatggccatctcgccggcggagtctggcgtgtcggcgcatgcgttccctattaagaagccgtcgaagccggctaagaagaaagacgcgccggcgccaccggcgcaggcgcagctctcgagcgtgccggtgcactcgggcggctcggcgccagcggccgcggccggggaagggaggcggtgcctgcactgcgagactgacaagacgccacagtggaggacggggccgatggggcccaagacactgtgcaacgcgtgcggggtgcggtacaagtccgggcgactggtgccggagtaccggccggcggcgagccccaccttcatggtatcgaagcactccaactcccaccgcaaggtgctggagctgcgccggcagaaggagatgcaccagcagacgccgcatcatcaccagccgcaggtggccgccgccggtggagtggggagcctaatgcacatgcagagctccatgctgttcgacggagtgtcgcccgtcgtgagcggcgacgacttcttgatccaccaccacctaaggacagacttccggccgcccatctag

SEQ ID NO: 47999 - DNA, 3725 bp, Oryza sativa
  Clone ID: PAT_MRT4530_50715C.1
ggagagagagagaactagtctcgagtttttttttttttttttttttttttcagcatgaaccacacaagtacactgaccgagcaccatgtgtccatgtatatatagaacaatcaaatattgacaatccatagtagttacaaccaatatacattcggatgcccatatatctggaaaaggccctgaggtagaaaatgatatgacagtaatggcagtagctaattagagaacccaaggcaatgcatcagctagactagagcttatttagccaacaaataatgctatactattgtggactacagataattacagcgatccctatacagataatatcatcaacaatctagaattattcttggcgggagcaaaactcctaaaccatctcctttcactgctggtactgtgtcctcacaggccactagtctaagggtagagctactcacatgcttacgcttgagcttcagctcgtcaaggctcctggcaaaaacctgctccagccaggtcggcacaggtttcctatcctcctctgatttccatgctgcggcaagtatttgctccattgcaccaacatcaatctccaacatgcactcagaacccagatttttcctgagtatgttgctgaactcctgcagcatgtcatccgcaagtttatcaaagtcaaacggcttaaaattgattgatccatcaactgaatgcaaaagggcatcaatggatttttctgtgttgccatatgagttttcatggctactactgtcgtcatcagcatcaaggggttcatcctcatcaacagggaggttcaggtcgaacggtatactcgatgttctatgcagtcgcttcaaactgcttggcgactcttgtagcttttcctggtcatcagacatgctgagctttctcttgctgattgaaccagagcacaaagatgcttgaattttggtgagaaaatgccttggggaaactaccaccttaccactagggcatccactggtgattgccctacccggttcaaccaggatcttcagtcgatgtccgcgagttgccagaatcttttcttcagaaaatgaaaggccctcttccaacccatttttgctgccatgtatcatgcttcttgacaaaaccacaatcgagtcattaatgtcaaccaccttgcctcgcatgtcctggaacctgccagacttaatagcatcagacagactatcctgaacaaggcagtcagctctatcaatgttgtcaaggaagagaacagatcgccgtttcttgctcaactgctccacaatgcagtctatgccagtcttccctctgaaactggagtcatcccaatcctgaaggtttaggtccagataaatcaagttctctttgctgccgtgcatgagctctgcaagtgccacggcgattctcttcttggccatgctgtcagaaccatgaaaacacaaccagatgtcattcctgctaggaccacggcgcgactctgttgaccggcaccgcacaatggattcacaaatagcactcacggcttcctcctgccttccaactaccttgaacaggcgttcgacaagtagcttgtaattgctcagatcagaattttgtgcagcaaggggtgaccgtttctgccattggccaaaggcagagaagcctcctgaagctactgagtgtagtgtactgtgtgatgttttcccaacatttatggaactccaggagcaagagttaggttgaacagagagttgtggatgcttcagatttaaatcatccaccttcttgggtaccagatggacagacctctctgaatcctctacacgtttactgcaggtggaacttgaacctttcgaactacaatctcgaggggtgcacaaaaccaagtcagtctccacaggtgcagcagatgatggtgaggcatgatcatccggattgtcagcattcgacagggtgccatgttgggattgcatgcccctttcttgaaggttttcatcactcttggaatgcctggcttgaaggttcaatacaagatcttcatttcttttgttggtgacagatggagatgaaataggccttgcagttgagctggaatgtacagcagacactgcacaaggtttaataacatccttttgaaccccaattgactcagaacctttgcttggatttgctgatctttctttgtcagcgggaacaccaatatagcgtggaaatggtttgtaaggatctctgttgatcctctggcagtcttggtggagccgcaggcagtactcgttccacttcttctgtagattcaatatttttgaattcaataccatccgatcatctctaaccttgactggatcaaatccattgttaggacccatcatgctgccattctgcagcagtgaaggaagacctccctggtgatggtcttcagctgtaatgccacttgcgctaatgatagttgcaacttcttgctcatatttatcattgcactgctggcaccgcagggcctgtgggcatgaatttgctgtcaggctgttctcttcgtagttatcacagagaaagcctccaaaaggaacaaaggagtccatcaagcttgcagctggcttggagaaggcagcaacagtggttgccggaggcatgagtccaccagcagcagcagggccggcggcggcaggggcagcatgcaccgcggtgattggcagcagctggaggtcccaatccttgtcgaccaaggggaatttggagaggaaggcgaggtaggtctcgtacgttgccgaccaccccatcacccagacgcggccgaccttgctgtgcgcctccagcactcgcgtcacctccgccaccacccgccgcccattctcctgcgcctccgcgtcctcatcggggaccagctgcttgaggtctccgatgcttatgatgaggccggaggtggcgctggccattgccgccgccacgccgaggtctgagcggtcgatggtgttggggtcgacatggatgatacgatacggggaggcggccgcgaagtcgtccgcggcggaggcggccccgacgccgacgagcatggggttgcggccgcgggagaggatctcggcgatgcggcggcagttctcctcccccgcgcccgcgaggttccccgcaggcgaagggacgtcggcgtcgtccgcggcggcgaagctgcagaggaagagaggaggcgggcgggtgcgcgtgggtaggcggccgaggagcggcatgggcggagccgggcggaggatggcgagcttgatgtccccgctgcggaatccggcctcggcgaagacgcggctgacgacggggtcatcgaggatggcgaggacgaggtgggagagctcgaccttgacggcggcgggggtctgggcggtggcggcctggtggtagaagtggaaggtgtccgggttgcggcgctggttggcctgggagcgcttgatggcggccatgagggagttggagacggggggctcgtcggcggcgccagaggaggaggaggcggagacggaggggagcctgtcgagggagacggcgaagcagaggtcgagggccttgagctggacgcgtggggagtaggcggcgctgcgggcgcgggcgagggcgtcgcggaggaggggaggtgcgggcggggcgaggagggaggagatgaggtggagggaggtagtctgggcgtgggcgcggcggcgagcggaggcgacggcggcgtcgagggcggggacggcggccggcgagaggcactgcctcgcggcggccaccggagtgggcat

SEQ ID NO: 48000 - DNA, 1136 bp, Oryza sativa
  Clone ID: PAT_MRT4530_50716C.1
cgatttcgatgaggaagacgaggacgaagaggaagaggcggatgggctcgacaagtgcgcgatcgacgacgaggacgacgacggccttctcggcatcgggcgcggcgaggacgaggcgtgcgagtcgctcttcctgcttccaatgagcaagactaaggagagcggcggcggccatgaagcggcttccggcgtcacctcgccggaggcgccgcccgcgcctcaacagacgcgcgacgcgaatccggtgctcagctcggtggagaatctcacccagtggaaggacgccaaggcccgcgccgccaccgccaccgccgcgccgaatgcttcggacaaggagaacagaacgacggcgaacttgctccccgagccggcgatcccagccaagaagagagagtggcaggtggtctgctccgactacagccccagcacgccaagcaagcaagaagtctcggtggacgcgagcctctcgacatggctgggctcttcggggacgccggagagcaactccgtccggtccttctcgccgatcagccgagaagaccggccgatccttggggccctgaccgtggaggacatcaagatatcctctgccaactcgtctccgaggaggtcgaggtctccgagcccgagccctgacgacatgcccatcctgggaaccgtgggggcttactggaattgcagctccaaggctggtgatccggtgacaagaggagggtttatgaggactagaacaaggtttgggcagaactttgcaggatgaagtggtgaattgctactgaaagcttccaagctggaagctggaagagtttggtttcaggaggaaaattgcagaagatgcatacatgcttttgtgagaagaacatacatatagagtcagtgagattgtggaagtagtggcatgctttattcaaagatgttgcttgtcaaattcttttatttgttgtaaacaatgtccatccatattctattatggtgatcttttttttttggcgctgtcgatatggtgtattgtttcgatgttacattgtcaatatggtgtattgcacttatgcctttaaaactccaaaaaaaaaaaaaaaaaaaaaaaaaaaaaaaaaaaaaaccctcgtgccgattcctgcagcccggggatccac

SEQ ID NO: 48001 - DNA, 454 bp, Oryza sativa
  Clone ID: PAT_MRT4530_50717C.1
tgtttaatagtactctattatcattttatcattgtgtgcctcggttgattcctagacgaggatttaacacacattgtcggtgatatggacccgggggtatcaagactggatggaggaggctgccccccgatgccacgtggccctcccccgaggggagtcaggccccaggtcaccatgtacggtgggttaagtgtctgcctccaggtgcccacctactcgcatttatggcggcccgagtagtcgcgccacgccgcatttaatgcggtgtgcaatgcactcaaccggtctgtgaccggtcgaatgaccgatgggactggggtagtgcgtccgtctttggggatggaaccccctgaaggtcacacagcttcgctcaccaaaccctcgaatctcacccgctgcccccggccgaactcacaaaggggggcctcacggtcccctgatggaggagttcatt

SEQ ID NO: 48002 - DNA, 114 bp, Oryza sativa
  Clone ID: PAT_MRT4530_50718C.1
atatgggttgtttttaacgatactggcacagaacaccatcattacttaaaaaacgtggtaatgatcctaacaggcattcagatactgccaccaactaagtaatgtgcactacca

SEQ ID NO: 48003 - DNA, 369 bp, Oryza sativa
  Clone ID: PAT_MRT4530_50719C.1
atggagatggaggcggtgccggcgctggcggtggtggacgcgcggttcgtcgcgggggacgcggcggcgctgtccgtggcgaagacgctgagcctgtccgggagtgacttcaccgtcacggacgccgccacgggcgccgtcgtgctgcgcgtagacggcgtgctcttcagcctccgccgccgctgcctcctcgcggacgccgaccgccgccccgtcctcaccgtccaagaatcgatcgaccggcggttcagcgtggcgagcgcgctgctggggaagaacgcatacagcgtcaccgtcaacgccggcatcgagtacgccttcatcgtcgcgctcgtcgtcgtcctcgacgagatgcatttccagccatga

SEQ ID NO: 48004 - DNA, 1380 bp, Oryza sativa
  Clone ID: PAT_MRT4530_5071C.1
atggggaggcagccgtgctgcgacaagctgggggtgaagagggggccgtggacggcggaggaggacaagaagctgatgagcttcatcctgaccaacggccattgctgctggcgcgccgtgccgaagctcgccgggctgctccgctgcggcaagagctgccgcctccggtggacaaactacctccgccccgacctcaagcgcggcctcctcaccgacgccgaggagcagctcgtcatcgacctccacgccaagctcggcaacagagcgctggctcccactagcttgatttctgtggctaagagaaccctacacgttgattcagaaatagaaagcatcctcttaggtccagttgcctcattggaaaatggaagaaagctttttaaaaaatggtccaagattgctgccaagctaccgggcaggacggacaacgagatcaagaaccactggaacacgcacatcaagaagaagctcatcaagatgggcatcgacccggtgacgcacgagcccctcgaccggaagcaggagagcccggccaccacctcgcagtccaccgtcacggcggagtcgtccaagtccggcgaggcgaccaggcagcaaagccggcagcttgacgacgccgtcgtcagggacatgtccgtgtctgccggtggcgacagcccgccggagtcgagcactaacaccgccagcaccgccggtggcagtagcagcagcagcagtagccatcaccaggaccctctggtgaagtggctgctggaagaggacctgctgcccaccggtgacgagccatggctcaatttcacggccagcaacgacgtcgacgagttcagtagcatcgccgccaccggcgccacgccggcgctgccgtgggacgtcggcatgacgacggactggctgctcgactaccaagattttgggatgggagactcgagcttggtggtcgatgcctccatggtcaacagctcaaatgggtccaacttctagctagaagatgtcagcagcttacttaattgtgttgctatcagtgtagataatcaagtgaagtgtataattaataaaagcatcaagattgtgaaagcagctaggcatggccggccaagatcggagggtgatcacaagtcgaggcctttgctcttcggaaaaccaatcaacggttgggattgatgcatttgagagagggtatgcgtagatggtgcatgttgttgtgtattttccccttgagattgattcgggggtttgtgccattaactagaagtgttattacttctcaaatggagatacttagatctttgttttttttttggagagatagaactatttgttggtgtagtacctatacatgttttcaataccccatgtgggtgggtaatgtactataatatt

SEQ ID NO: 48005 - DNA, 420 bp, Oryza sativa
  unsure (1)..(420): unsure at all n locations
  Clone ID: PAT_MRT4530_50720C.1
gggccatgcatnggggttgaacacccatttccantgtttgaaaggnanggnctgggatggcttaccctcccttctagacatggttancccatcagaatcaaagttcccggcctatganctttgaagggcntcataaatatatgtancctgttaggancaaatgctcagtganccanccanccaaagtanctgtattgtgttttcttgcgtacccagtaatgtgtgcattgtaanttgttgtctttgtaaagttcagtatccagatggtgcaancttgaacctttgtaaaanacatgtttgagggagttccttgaaatatgataatatttatgttggttgttgcctctatttgtttactgaatnaaatatagttttgccnccatanaaaaaaaaaaaaaaaaanaananannacncgtccg

SEQ ID NO: 48006 - DNA, 807 bp, Oryza sativa
  Clone ID: PAT_MRT4530_50721C.1
atggagatggaggcggtgccggcgctggcggtggtggacgcgcggttcgtcgcgggggacgcggcggcgctgtccgtggcgaagacgctgagcctgtccgggagtgacttcaccgtcaccgacgccgccacgggcgccgtcgtgctgcgcgtcgacggcgtgctcttcagcctccgccgccgctgcctcctcgccgacgccgaccgccgccccgtcctcaccgtccaagaatcggtgcgcgcgacactcgactcccctcccctactctcttctcttcttccccaccgtgccaatctgatcggtggtggtgagctccggtgggtgcaggcgatggtgatgaacaggaggtggaaggtgttccggggggagagcacgagccggcgtgacctgctcttcaccgtggtgaagccgtcggcgatccagctatggggttcgaccaaggtgagcgtgttcctcgccagcaacgacgccgagcaggccagcgacttccgcgtcaccggcagctaccacgacggcgcctgcgccgtctccctcggcgactctgacaccgtcatcgcaaaggcaagcaaagcaacccctctctctcccccctgctcaaaccacttccgtcatttcatcgaacacctggtgggcgtgctgctcgacctgacgcaaaaactgtttcgcgcgcagatcgaccggcggttcagcgtggcgagcgcgctgctggggaagaacgcatacagcgtcaccgtcaacgccggcatcgactacgccttcatcgtcgcgctcgtcgtcgtcctcgacgagatgcatttccagccatga

SEQ ID NO: 48007 - DNA, 966 bp, Oryza sativa
  unsure (1)..(966): unsure at all n locations
  Clone ID: PAT_MRT4530_50722C.1
ntttttttnntagatgatgaattgacccccacttggtccatcagaccaaagtgcaattgcttgcctctacaaaaacacagctgtacatgaccatctgccggtttatacaggtcaagacaatataaatatactgtgcacctctaaagaaaagagggtagaaaaatatacaccatgccacggtttttgtgacgccgtactatttcatatctaaccacaagattaggaatttactccctccgtctcaaaatataagcatttttagccggtggccagattcatagccaaaagttgttatattttgggacggaggtagtaggcaaaataatattcagtgcaaatacaacaactagcattttacatgtactacttgtagtaagtaccatgtcacgatcattgtctggagttgcttggctggtcctgctgctgctgctgctggtggtttagcttctggtacattgccatcatccggttgtacgcctccatgccgttcggttgctgtgcgttttgctgcgccgcttgggaggcgaggaaggcggagaaggcgtcggaggtggcggcgccggtgggctgcggcggtcggtcggcggcggcggcggaggaggaggatgcggcggcgtcccaggagacggggaggaaagggggcgtgtgcatatgcatgggcgcgtatccgccggcctggcccatgttcatcatgctgaggccgatctgagccatctgggccatctgggccatgacggacatctgcagctgtggcatggccatgcccatgggcatcatcatgctgcccatccggctcatcacctgcacctgcgcctgcagctgcttcaggtagtcgatcacctcgtcaagcatcgacgccttgtcagtcttgcttgaattgggaacgagcttctgcaatgttttcatcttttggttgatcctgtcccgtcgtttgtgattattctttcgcacaaaccttaacttcat

SEQ ID NO: 48008 - DNA, 344 bp, Oryza sativa
  unsure (1)..(344): unsure at all n locations
  Clone ID: PAT_MRT4530_50723C.1
gcccgcagagcccggaccggaatttttggggggaggggggagcccgcccaaacgacaacgcacgcgaccgcgcggagacgcggggcaaccacggccaccaaaagcggcgcgcagacgccacacgcgaggccggccgccacgcgggcctcgccgacnccagcaacaacaagcccaacccaaaggattcctaaggggggggcccatccgcgcctcggatgcaccggcgttggcgtcggctccggcgcagcgggaggccgacgccgcgggagtcccgcggggctgctagatcgaaaccctggagagcaccgagtctctggagaggcggctaacgaataacggggctc

SEQ ID NO: 48009 - DNA, 1101 bp, Oryza sativa
  Clone ID: PAT_MRT4530_50724C.1
gccggaattcccgggtcgaccacgcgtccgcctccacccctcgcgcccagccgctccctccccctcacccatacatacggagcgccacccaccgcagcgcgcgatcgatcggttaatctgtaggctgctacctcgctagctccgtccgccgtcgtccgtccgcgagccaccaccaaccggccggccgcgcgcgcgcgcccatggacagtaaggacaaggagaaggagcatgagcagaccgcgtcgggcaggaaccccgacgtgaacgacgtcgaggaggaggaggaggacgaggagggcaacaagcgcgccgtcgtgctcggcccccaggtccccctcaaggagcagctcgagctcgacaaggatgatgagagcctgaggaggtggaaggagcaactcctcgggcaggttgatactgaacagcttggagagactgctgagccggaggtgaaggtgctgaacctgaccatcctgtcgccggataggccggaccttgtactgccgatcccgttcgtccccgacgagaagggctacgccttcgcgctcaaggacgggagcacttacagcttccgcttcagcttcatcgtctccaacaacatcgtgtcaggcctcaagtacaccaacactgtctggaagactggagtaagagttgagaaccagaaggtgatgctggggacattcagtccccagctagagccctacacatatgagggtgaagaggagaccaccccagctggcatgttcgcaagaggttcctattctgctaaactaaagtttgttgatgatgatggcaaatgctacttggagatgagttactactttgagattaggaaggagtggccaaccatccaatgatgtgtggaactaaaaaagggcttcagaaacatgttagctgctagctaagccaagtcagatgcgctgttgcttctagaaatgattcaatgtgtcgtcatcgttaaacgccttttaatttgttttgagcttgtcacactttcttttttctctttttcttcctgttcttcggtcgcataatgtttattcaaacctatataatcgattctctatacatggagacgcgctgatatatatttatgtactactg

SEQ ID NO: 48010 - DNA, 216 bp, Oryza sativa
  Clone ID: PAT_MRT4530_50725C.1
ttagctttctttagcattttgatcttgagtactttgttgtcgtttgtagagatgttgatgtcgaggatgtccagcagcgcgagaagcctgagttgccagtgatcgttccagcacttgcgttcgagccacttgtgccggggggcgatgtagatcaaagttcgcctgtggggacgagcctagcaacgactcccttaggtcggttgtctttgttctcat

SEQ ID NO: 48011 - DNA, 327 bp, Oryza sativa
  Clone ID: PAT_MRT4530_50726C.1
ttttgtctgccaagtgacgtgctaccaatgtgggcgcttgactggacacacagcccaagaatcgaaaccttccagggcttactacatccacaatcggatgattcccacagactgcgcacctaaggacagcgcgacgcgtgtacaacgcaaacaagggtctcttaggaggagtacagcagcgccatcaaggtggaaaacagcaaggtctgcaagttccaggaggagagtcgacatccacgccaccgttcacggcaagtctccgagaaacgatacggccgagttgttcggagagcaggtttctgcatttgccttcactgccaacagctg

SEQ ID NO: 48012 - DNA, 269 bp, Oryza sativa
  Clone ID: PAT_MRT4530_50727C.1
atgccggatcggatcgccgaaggagatgagattgaacagaagatcgctcgatcgctcgacgatcgccacagcagaaggaagatgctctacagccggaacccacgatcgactgacacctcgccgccggcgccggcgtcggcagcattagaggccaggagggcggtggcgagccggagacaagaaagctggtccaccagggcagccggggaagcccgacgggaggaggtagtcgtcgcgctcgcaaagtcaatcagggacgacaagtggag

SEQ ID NO: 48013 - DNA, 412 bp, Oryza sativa
  Clone ID: PAT_MRT4530_50728C.1
atatgaagctgtttacgcgagagatattccagagatcataaccggggatgcatttttggagaagtatggagatcataatgatgcagtaacaactgttgacccaaaacgatcttactgtgtgaaggctcctactagacatcctatatacgagaacttccgagttgaggccttcaaagcattgctaacagcagccaaaacagttgagcaactttcggcccttggagaattgatgtatcagtgccactacagctacaatgcttgtgggcttggttctgatggaaccgacaggctttgtaatatgattcagaagagatacaaagctgctaccgggtacctaccaattgttttcgagggctcatctccaggtgcaggcaagtttggatacctgaagattcgacggcgatccacatag

SEQ ID NO: 48014 - DNA, 412 bp, Oryza sativa
  Clone ID: PAT_MRT4530_50729C.1
ctcgactttaccagtgactcctccgtctccacacattacagctaccacgccgccgccgccgccgccgacgacgaggaggagatgtggcggagttctgtagctcgtgctcttcttcttctgcgctccgttatacacaggcctctcccgccgtcgtcatctacacttcgagccttaacccgagcgccaccggctacccgccccctctcccgcttcctctcctcctccccggagcccctcccggatgccggtgggggcgctgcttacgagtcctctgattccaccgatgccggtgaggatggtcttgtctctgatcccaccgaagccttttaggacatcctgttctttttttgggaggaggaactctgggactctgattatgtctttttcgttgtctttttccccgaccctttgt

SEQ ID NO: 48015 - DNA, 176 bp, Oryza sativa
  Clone ID: PAT_MRT4530_5072C.1
tattatcagcagcagcagcagatgtatcaacagcagcaacagcctgagcagccagtactcaacagcattattgcagcaatsssaacagtatctctcgcagatccgcagcagcaacaaaacatgacacagcaacacgacgtattaacacgcaacgagcaacacgacgaaatgtagts

SEQ ID NO: 48016 - DNA, 5599 bp, Oryza sativa
  Clone ID: PAT_MRT4530_50730C.1
ttaaccttggtagtttgtcaccaaggcaattttttgtcgaattgtccctattctacaaggttgtatatgcggagcttggtagggatcaattggggcataccaagctttgattcggatgcaagaatgcaacacaactttgcatttgttctgcctggttccctgagcatctgtcttctcatagtccaaggagcgtggtatgaatgttgaggttattgtacatatttccgtgcaccttgagaggtgatatgtttctcctttgcctgttttggcaattgatttgttcctggcccttaacttacctccagtgtgactcgtgcttgagaactcatccgttaaattgaaatgatttccaagataatctggggtatctcccgacagtgctttgtttttggtcacaggctcgaccatggagacatctcgcataaggtggttgtggtcctcgcacgaagaagcggcactgatcagacaagactctagagattccttatgtgagcatgaatcctggttgattttgaaatagaagctttcatgctcatttgtggagttctcatcctccagagttgatgtctcaaacttgtccctggcctgaatgttctccttctcaagagagacgtcattcaagaatgaggttgatacttgatgattatcaagaacgacgttttgaaggccagagggacaaggtttaggctcgataggaggttgtgatggtggttctatggagagcaattcaagggtctcaccagaatctttttgaatgaaatgaagatcatcctgttgtagaattgattcaggggattcatgaagcagaactaacattacttcctctatcggcgtgttatcagggaggatgcctgtcaaggttttctcataatcggtatgaggatcatccctgaatttaggagcgtaacccggagcttgaatttcattggaatccggcgatggctccagggaggactctttagtcagacctgaagatgttgaaggctcgggtttaggctcggcaaaagaaggttcctcccttcttgacacatgcttcttgatggggttcaacatactgcccgacaaaggaggtattttctaatatgcgatataaaagggacccctggggagaggcaaagatcatcgcatttcatcgccaacacacccaccaaagtttacggaatccctgttccaacgtacgccaataccctattctttcggtccgcgagtaccactcgtcgacagtggcgcgccaggtaggggcacttggcgcttatggatatgctagtatgacttcaggactccccgacaacagtctcatcaccagcgccaatcaaggagtttctacctcgacaccgctggtgtggactcaagtcggatctattgtctttccggtctatatcgttacaacaatctcgactggtccgatcgtcatcgggagcgagaagggtacggcaacgactgagagaaacgacgccccgccgataattcctcccactccggtggagaacggaacatcgacggccccaacacctgggaggtatcctcaagcagctgaatttcattctccatgtgaaagatcaaagccgacaaggacgaccaccctaagaccgagaacttggtgtcctgtgcataagacaaccaagcatgctcttgaggactgcccggtgatattccatgtgcaagctgaactctacgcctgttgggaacgagggatacaatgcacttcaccaacgagtaccacctactttccgatccatagatccaaagtgtatgatctcaccaactgcaggatcttcctcagaacccttaaaccggcgcatcatcgcgttcagcaaccacgagttcaaaccccatgcgttgccaaggaaccagttgcggccccagatcggtttgtgggattcatcggcgcgaatgagccatccgtgttacacctcttagaaggctacgagtcctctttgcagtcacctagagaagtgaacgtggtcgacaacactgaaacaagcatgttcgtagcagcgagaacgctagctcatcaattgcgcaacgtagatgcgattttgagggaaagtcctttgtatctggtgacaaacccagatgccagccgatgggcaaagtgactacgggaaactgtgaccaacctcaataccacgttcgctgaagccgcaggcggtccagagccgaacatgaacgaagaacggcccaccggggatgcggaggaagaaaatctcgatgggagacatgccaccggcaaccgctctcctccaagacgtgaccctacaccaccacgccgtgaagatggcgacctccgcgagcatctaaacggacatcggcgtaataggagggaacgcaacgagaacgagcgtcaccaccattgttctccttctcgccatgatcgcgggaacacccccaacgaggatcaagatcgacgaacccgtgatgaccgaagtgacgacaacaaccgtgatcggaaaaatcatcaccaaagacaggagagggacaatggcaactgatgagatcgaaactcccaatctgctcatccgagtcgagaccgcggacgtgaccaccgttcgagaagccgggctcctgatccgtgcgacccctcatcctcatcttcatcatcttcttcgaattggcctccaagacgacgccgcgaccatgggccacatgatgtcccaggcaacggacgcagggcattcacacccgcacttcacaatgtgaggtggcccgacaagttccgaccgggatcaattgagaaatatgatggaagtacaaacccagaagaatttttgcaagtctaccccacaattctctaagccgctggcgcagactacaacgccctggcaaactatctgccagccgcgttgaaaggttctgctcattcatggttcgtccatctcccgccgaactcaatctcttcgtgggaagatttgtggcagcagttcgtcgacaacttccaagggacatacaagcgccacacgattgaggacgacctacatactttaacccagaacccgggcgagtcattgcggggctgtattcggcgcctcaatgagtgcagaaatacgatccccgagatcaccgacgcttctgtcatttgagcattcaagtctggcgtccgagatcgatacactactcaggagttggcaacacactgaatcacatctggccgaaaactattcgagatcatcgataggtgcgctcacgcagacgacgctttgaggcgcaatgaggggaaaagcaaaatgggagatgagaagaagaagttggccgataaagatgcaccagagtcaagtaagaagagaagtcacaagagtggaaaacgcaaatcttcaggagaggtccttgccacagagcaagcaaaaccatccagacactccaacccccagggcgacgactcccgcaagccatggtgcccaatccacaagacaagcaaacacgccttggaggactactacgtcgtcaaaaaggagctcgcgagacaactagcaatcgaaagaggaaagcaagtacgagtcgttgagacggcagaagaagctgccaccaacaactctgactctgccttgccggagtacgatctgcatgtctcccacattatcgtgactacacctggcagatatcccatcgtggtcgaacccactattcggaatatcaaggtggcaagagttctcatcgacggtgggagttcggtcaacctactcttcgccagcactttagacacgatgagaataactcgaagcaagctgacgccaacagatcagcccttccacggaattaccccggaatcgtcgtctaaaccgttgggaaagatcacactacccgttacattcggacacgccaaaaatttccaaacagagcagatcacctttgatgtcgcggaattcgataccgcatacaatgccatcattgggagagctgcagtcgcgaagtttatggtggcctcgcactacgcataccaagtgctgaagatgctaggaccaaaagggacaatcaccatccaggggaacgccaagttggcagtgtagtgcgacaagcggagccttgacatgatcgagcatactcccaacctgcccgccacaacagagaacccgaacaaagtgagcaagcccaagaagacgccaaaaccagatggcaccatcaagataatcccgttgtctagcgccaaccctgacaaaaccgaacttgcgctcatcaccttcctctaagacaatgtagacgtgttcgcttggtagccgtcagacatgccgagagtacccagggaggtgattgagcacaaactgatggtgcgacctgatgccaagccagttaagcagaaactgcggagattcggacccgatcaaaaacaagccatacgagaagaactcgacaaacttctcaaagctggcttcataagagaagtcctccatccagagtggctcgcaaacccagtaatggtacgcaaagccaacgggaactagaggatgtgtgtcgacttcaccgacctcaacaaggcgtgccccaaggacaacttcccttttccttgaatagaccaattggtggactcaacggccggttacgagttgttaagtttccttgacgcttactccggctaccaccaaatcagcatggcaaaagaggacgaggagaagacagcgttcatcacgcctttcggtgtattctgttataccaagatgccctttggattgataagcgcaggcaacacataccagcgcgggatccagggagcactcggcactcagcttggacaaaacgtcgaggcatacgtggacgacatcgtcgtcaagaccaagaacatcgactcactaatcgacgacctcagggaaatgttcgacaacctccgaagataccagatgaagctcaacccagagaagtgtacgttcagagtaccgtcaggaaagctcctcggattcttggtttcaggacgaggaatcgaggcaaatcctgagaagatcaaggcgatcgagaacataaagttgcccacaaggcttaaggaaatccagcggctgacaggatgcatggcttcgctaagccgattcgtcgcaaaaatgggagaacgaggacaacccttctttgccctgctcaagaagcaagacaaattcaagtggaaccaagaagccgagaacgcatttatcgcgctcaagtgctacttgtcaaatccccctgtacttgttggtcctcaaatcaatgaagaattattcctgtacatcgctgccacgccttatttcgtgagtacagttatcatcgtagagagggaaaaaagtacaacgtcctgtgtactacgtaagtgaggccctccacgacgcaaaaactagatacccacagatccaaaaactgctctacactgtagtcatgacatcaagaaagctacgccactacttccaggctcataaggtcaccgtcgtctcctccatccctttgggcgaagtcgtcaggaataaagacatggtcggccaaatcgccaaatgggtagtcgagctgagccaattcaatgtccacttcgtgcctaaaacagccgtcaagtcacaggtcctcgctgactttgtagctgcctggactatcccagaggacagacaatccaatatgaaatgtaaatgcacatgggcatgtcacaaacagggaa

SEQ ID NO: 48017 - DNA, 2058 bp, Oryza sativa
  unsure (1)..(2058): unsure at all n locations
  Clone ID: PAT_MRT4530_50731C.1
atgctgcaggcggcgggggcggcgccggcgccggggctcctccgcgcggcgtgcctccggtcgcactcccacccgctgcagtgcaaggccctcgagctctgcttcaacgtcgccctcaaccgcctcccggcgtcggcgggggcgtcgccgctgctcggccatggccacggcgtcggcgtctactacccgccgtcgctgtcgaacgcgctcgtcgccgcgttcaagcgcgcccaggcgcaccagcggcggggctccgtcgagacgcagcagcagccggtgctcgccgtcaagatcgagctcgagcagctcgtcatctccatcctcgacgaccccagcgtcagccgcgtcatgcgcgaggccggcttctccagcacccaggtcaaggccaacgtcgagcaagccgtctcttcctccatggaagccgccaccaccaagccccaaaaccctaaccctagcagcagctcgcctccgccggcggctcatcaagaggcgaaacctagtagatgcatcgatcaggtggtggtgcgggaggaggacgtcgcggccatcctggactgcctggcgacgcggagcaagaagcgggtcatggtggtcgccgagtgcgccgccgcggccgaggcggcggcgcgggcggccgtggacaggatcaggcgcggcgaggcgaggcancacgcgcaggcgcagggggtcaccctcgccgtgtcccggttccgcggcgcgccgagggaggaggcggagcggcggctggcggagctccgtggtgcaatggcagcagcagcagtcaatcaccagtcagccaaaggcgcgaacggatcgacgtcgccgtcgccttgcctgtcacttttggacgctgctgcagcaggtggcgcctgcagctccgggcagctggcggtgatggccgccgccgtctccggcgcctactgcggcggcgattgcgccgccgcgacgaaagcactgctgccacagtcagtcgtcttcatgccgccgtcggcgacgacgaccaccaccaccatccctccatggctgcaccattgccgcgatcaggagcctgcagctcatatgaagaaatggatgtcggcgcatggcggctcgccgtcgcgcaggacggcgctgaacatctcgtccacggcggtgtcgccgtgctcctccgtctcgtcctacgagcagtacacccggttgcaccagccgtaccagccatggctcgtcgccgacgacgacgacgaagccgaagagacgaagcatccatacatcgccggcgatggcggcgctggtaggcttgtgccggcggcggccaaggtggtgatcaagtccgacgactcgagcgcctccaatggctccgtggaggtggagtggcggcggcccaggttcaaggaggggagcgccgagaacctcaaggtgctctgcggcgcgctggagaaggaggtgccgtggcaaaaggtgatcgtgccggagatcgccagcacggtgctccggtgccggtcgggcatggcggcgcccgccatggcgaggaggtcgagctcttgctcgagctccaaggagcacacgtggatgctcttcctcggcggggacgcggatggcaagtttagggaccacctcgaggcgctctacgacgccgtgcgcgacaacccgcggcgcgtcattctgatggagcgcgtcgaccgggccgacgcgcggtgccacgacggcatcagggacgccatcgagcgcggcgtggtgcggagccgcggcggcggcggcgaggaggccttcctcggcgacgccatcgtcgtcctcagctgcgagagcctcaacccaagttcgacgacgccggcgaagaaggccaagacggagtacagcgtggagaagctcgaccaggatggtgatgatcaccatggcaaggaagccgtcgcggcggcggcgtcgccgtcttgctttgatctgaacatgagcatggacgacgacgacgaggcggcggaggagcgttgcaccggcgaagaagaagaagcaggccatcatcatcatcagctgctgctcaaggcagtagacagggtgctgttcttcagatcaattggggaataa

SEQ ID NO: 48018 - DNA, 2625 bp, Oryza sativa
  Clone ID: PAT_MRT4530_50732C.1
atgctgcaggcggcgggggcggcgccggcgccggggctcctccgcgcggcgtgcctccggtcgcactcccacccgctgcagtgcaaggccctcgagctctgcttcaacgtcgccctcaaccgcctcccggcgtcggcgggggcgtcgccgctgctcggccatggccacggcgtcggcgtctactacccgccgtcgctgtcgaacgcgctcgtcgccgcgttcaagcgcgcccaggcgcaccagcggcggggctccgtcgagacgcagcagcagccggtgctcgccgtcaagatcgagctcgagcagctcgtcatctccatcctcgacgaccccagcgtcagccgcgtcatgcgcgaggccggcttctccagcacccaggtcaaggccaacgtcgagcaagccgtctcttcctccatggaagccgccaccaccaagccccaaaaccctaaccctagcagcagctcgcctccgccggcggctcatcaagaggcgaaacctagtagatgcatcgatcaggtggtggtgcgggaggaggacgtcgcggccatcctggactgcctggcgacgcggagcaagaagcgggtcatggtggtcgccgagtgcgccgccgcggccgaggcggcggcgcgggcggccgtggacaggatcaggcgcggcgaggcgaggcagcacgcgcaggcgcaggtggtcaccctcgccgtgtcccggttccgcggcgcgccgagggaggaggcggagcggcggctggcggagctccggtgcgccgtcaggggcggcggcggccgcgcggtggtgctcgtcgtggaggacctcgcgtgggcggccgagttctgggccgggaggaggccgccgccatcctcctgcggcgcaggcgccggcggctactactactgcgccgtggagcacgccgtcgccgaggtgcgcgccctggcgtgcggcggcggcggcggcggcggcggcgtttggctcgtcgggcacggcacgtaccagacgaacatccggtgccggacggggcacccctcgctggagactctctggggcctccacacgctcgccgtccccgccggcagcctcgccctcagcctcacctgcgccgacgccgacgccgccgccgacgacgacgacagtggtgcaatggcagcagcagcagtcaatcaccagtcagccaaaggcgcgaacggatcgacgtcgccgtcgccttgcctgtcacttttggacgctgctgcagcaggtggcgcctgcagctccgggcagctggcggtgatggccgccgccgtctccggcgcctactgcggcggcgattgcgccgccgcgacgaaagcactgctgccacagtcagtcgtcttcatgccgccgtcggcgacgacgaccaccaccaccatccctccatggctgcaccattgccgcgatcaggagcctgcagctcatatgaagaaatggatgtcggcgcatggcggctcgccgtcgcgcaggacggcgctgaacatctcgtccacggcggtgtcgccgtgctcctccgtctcgtcctacgagcagtacacccggttgcaccagccgtaccagccatggctcgtcgccgacgacgacgacgaagccgaagagacgaagcatccatacatcgccggcgatggcggcgctggtaggcttgtgccggcggcggccaaggtggtgatcaagtccgacgactcgagcgcctccaatggctccgtggaggtggagtggcggcggcccaggttcaaggaggtgagcgccgagaacctcaaggtgctctgcggcgcgctggagaaggaggtgccgtggcagaaggtgatcgtgccggagatcgccagcacggtgctccggtgccggtcgggcatggcggcgcccgccatggcgaggaggtcgagctcttgctcgagctccaaggagcacacgtggatgctcttcctcggcggcgacgcggatggcaagttgagggtggcgagggagctggcgagcctcgtcttcggctcgtccaagagcttcgtgtccatcggcggcgccgccaacgcgtcgccgccgccgtcgtcatcgtcgtcgtctccggcgcggtcgtcgggctccaccgagcagccgcaccggagcaagcggccatgggcggagacgacgacgacgacgacgagcgggcgggaccaggaccacctcgaggcgctctacgacgccgtgcgcgacaacccgcggcgcgtcattctgatggagcgcgtcgaccgggccgacgcgcggtgccacgacggcatcagggacgccatcgagcgcggcgtggtgcggagccgcggcggcggcggcgaggaggccttcctcggcgacgccatcgtcgtcctcagctgcgagagcctcaacccaagttcgacgacgccggcgaagaaggccaagacggagtacagcgtggagaagctcgaccaggatggtgatgatcaccatggcaaggaagccgtcgcggcggcggcgtcgccgtcttgctttgatctgaacatgagcatggacgacgacgacgaggcggcggaggagcgttgcaccggcgaagaagaagaagcaggccatcatcatcatcagctgctgctcaaggcagtagacagggtgctgttcttcagatcaattggggaataa

SEQ ID NO: 48019 - DNA, 152 bp, Oryza sativa
  Clone ID: PAT_MRT4530_50733C.1
tttaaccgatgatgctgcggccacggggcttcatcaatcctttatcttgcaaaatgtccctgacttgcactgcgccactccacatgtcttgatacgcatacagccgaccagcacgcccaagcatgtctacaacacagacatggtgttctggg

SEQ ID NO: 48020 - DNA, 233 bp, Oryza sativa
  Clone ID: PAT_MRT4530_50734C.1
gcctcgccatccgcccgatctcgccgcccactgttgggctgcctcctcccccggactatccctctaagccggcaaactcctccccttcccctccccctcccaccccctcccaccccaagatcttaactcatagggtgtcgctggcgctggagaagaagaggaggtcaccggagttggaggagaaggcctggagcatgaatctcaaagctcatccggtggcccaaaatctgtaa

SEQ ID NO: 48021 - DNA, 569 bp, Oryza sativa
  Clone ID: PAT_MRT4530_50735C.1
ggctgcaggaattcggcacgagggccgaatctccgtcgctgttgctctaccgtcgccgatatccccttctctgccgcgcgcagccgtcgtcggatcttccaccaccgccgcgccaccgtcgccgccaccggatcctcggcgccgacagccgccaatccctccatctcgcgagcagagcaggggaggggaggggcgccgtggtcttgctgcatctcgatctggatgaggcgcgttctcttgtttcgttttgttcgttccccccaaaagtccaagttcgatcggtcactgctagggttaaataagattcaattcaacacgaaacacgtgcaaaattattctgaagcacaagcccttacactcccttcacatgtggttcttgtagtttaaaatgaacaaaatgattcatggaataaaatgaacaaatggcaacgatcgccatctctgaatcaatgtgtgttcttcggaactaggttcaactactgctcacacctccactgaagacaatctcatatccaaggattcatccaaggttatcttctttaacaaggattgacatctttggattgcat

SEQ ID NO: 48022 - DNA, 453 bp, Oryza sativa
  Clone ID: PAT_MRT4530_50736C.1
ttcgtgaccacggtttgggaaacgccggcacagctaaagcaacgcttcatgggctggctgatcctgcaccaaaagaccctaatagaagaaaacttgttaattaggcattggcctgtgattggattttctccctttgcagagaagcttttgaggatgtagaccacctgtaccgtgactgcgcatacacaagacaagtctggaatacactcactatctttctagatccaccactgtccgtggctgcacaagcccaaaatattatagattgggtgattcaaataacaaacagcgccacaaaggcacaatcccgccagaggacgggggcactactcacaacctggtggcatatctagttgcaacgaaatagtagaatttttcagggagaattcaaggaagctgacaataaacttaatcatagaagacctagaacaaagcgtacttgcgtttacgctt

SEQ ID NO: 48023 - DNA, 620 bp, Oryza sativa
  Clone ID: PAT_MRT4530_50737C.1
ccacgcgtccgggaaaccggaggcgacgagagggatggcttcccgctgcggcgcgcggccgtcctccgccgtgccgtctccttcgcagcgccgtctcccgccgtccgccgcgccgcccggctcccgatcgcgccgcgccgccccttctcgcagccgtctgcagcgtcaggtgatcagcctcccaagtctgcactcgacaagttgaatccattatttgaggaggtcatgagaaaaggagtttgttcgatggatcaatatatgacactttgttcgatggatcaatatatgacactggaaatcgtcaaaagcatccaacatgctcgtatagagttcaatcgaaaggaaaatgactgaccaggatgggaaggctggaagcctggaacgcaagagattatgacagtgtagtagtctacatctgtgaattaaattactgagacactagcttttgaatcatgctgtagtatgttactagttaagttcatttctcactatcaaccgtgtccagtataaacttaactgccaatgctgctcgatggaggtctttataacatatgatatgtcacttctgctggacgaactatgtatgaaatagatggtagagctaacaaaaaaaaaaaaaa

SEQ ID NO: 48024 - DNA, 441 bp, Oryza sativa
  Clone ID: PAT_MRT4530_50738C.1
atgccggagagtgagatcggggagggcgagcccgccaccgtgttcgcccgccgccgccctccccttctcccgtgctgcatcgtcggccggggcgacagccgggccgctgatgccagaggagctacgatcacggcgctggcggggtgcctgacgtacatcacgccggggagccccaaggcgagaccggccaaggactgctgtgccggcgtgaagagcacgctgggtagcccggccgccgtcgcctgcctctgcggcgcgctcggcctggacttcggcatcaagatcaactacacccgtgtcgccgccctccctgccgcctgcggcggcaacttctccgccctgagcaagtgcaacagtcagtacaaccaactcactccgatttgtttcttcgtctctgtttttcttcaaaaattttttcgctttgttcttctttttgggtga

SEQ ID NO: 48025 - DNA, 1385 bp, Oryza sativa
  Clone ID: PAT_MRT4530_50739C.1
atgggagccgtcacctcgacggtcgcggcccgcttcgccttcttcccgccgagcccgccgtcgtacggcgccgaggccccgcctccccccgccgcggcgggcgcgggggtgggggtggagaaggatggagggggaggaggggtggtggtggagctgacggatgtgccgaggagggggaacgtggaggcgaggcggctgcggacgaagcgggggacggaggtggtggcgatgtacgtgcggcaggccggggcgcggctcacgctgctctactcgcacggcaacgcggccgacctgggccagatgttcgagctcttcgtcgagctcagcgcccacctcaacgtcaacctcatggggattaggattcgcaggctctatgactattctggttatgggcaatcttctgggaagcccagtgagcacaacacttacgctgatatagaagccgtttacagatgtcttgtagaaacctatggagcctccgaggagaatatcattctttatggacaatcagtgggtagtggtcctactttggatttagcctcccgtttgcctcatttgagggcagttgttctgcatagcccaattttatctggcttaagagtgatgtatcctgtaaaacatacatactggtttgacatatacaagaatattgacaaaattccattagtcagatgccctgtgttagtgattcatggtacagctgatgaagttgtcgactgttcccatgggagggcattgtgggagctttccatagtaaagtatgagcctctatgggtcaaaggaggaaaccactgtaatttggaactgtacccagagtacattaagcatctaaagaagtttgttgggggccattgaaaaatcgccacccctatatgatgaatctccagagagctcaggtccatcagataatactcaaacaaaccctgaaggcacagaggaatctaggaaaagcacagactgcagggagaaaacaaggccaagcatagatcacagacaaagcacagatcgccgggacaaatcaaggggcagcacagataggagggataaaaacagaaagagtgtggaccaaccacgggctagtgtcgatcagcctgatcggccaaggaaaagcgttgaccgctttggtggggtgatgaagtccgtcagatatatcgactgtttcagagtaacaactgcatctgggagctgaagaaaaatatatataccaaaaaggttagcgttggggttctctgtatgtagtccatttgtataacttaattcattcgggtgattggtttggtcgttggaggcgtgtctcactacaatgggggggacttgtattgtttttcttgatttttttccaatatgaaataattatttgtccataagcatcttctttttctttt

SEQ ID NO: 48026 - DNA, 6247 bp, Oryza sativa
  Clone ID: PAT_MRT4530_5073C.1
tacatagaatttacgtagttggtcaatgttccacaaatttgctaattcgcggccgtcgccgtctgcgattttgaatgcacctggccgcaagacttgtgtgattgtgtagggtccttcccattttggtgagagtttgtttcgtcctgcttggctttgaactcgtcggaggacatagtcgccgatcgaaagtatgcgtgctcggatgcgcttctcgtgataacggcagagggcttgttgataactagctgctcggacggcaactcgctcacgatgctcctcgagaaggtttacatcgatgtctcgctgttcctcctggttctcgtcgaaatgcttctgtactcgtgtactttgatgtcgtaactcgctagggagcatggcctcagagccatacacgaggaagaagggtgtttccttgttggatgttgtcggtgtggtgcgtacgacccatagtagggtttttatcccttgtagtactatgccgtttgccctttcgacttgtccattgctttgagggtgagagaccgaggcgaaacatattttgactcccaaaccgatgcagtaatcctggaagtcggcgctgatgaattgagagccgttgtcagttatgatgcggtgcggtagtccgtatctgcagaatatccctcttcgaacttaatggcgttgtcggccttgatttccccagtgggtagtgcttcgatccatttggtgaatttgtcgattgccacaaataggaatctatagccaccctgtcctcgtgggaatggcccaagtatatctagcccccagcacaagaacggccaagtcagagggattgtctggagcgcttgtgcaggtagctttgtgtgcttgcatatcgcatgcatctttaagggcggttggccagaaaaacccttgtcgaaaggccttgccgactaatgtccgactggcggcatgtgacccgcatatgccttcatgtatgtcgaggaggagttgtctgccgtcgtcggtagagacgtatttgagaagtatcccgtttggcgcttttttgtataaatcgttaccgaccatacagtagatctttgctttacgggttattttctcggtctctgtatcgtcctcgggcaattcctcgctgctgatgaatttgattaatggggtgcgccagtcgtctgtggtttcgatgtcagcaacggcgcgttctgcctcggtgtccttcgagctaatgtcgggggtgctcgggccagattcaccgttaacttctttcaccgatggcttcatcaggacgtcgagaaaggtgccggtgtcgagcggttctcgtctggatgcgcatcatgctaggtcgtctggctcgacgttgtccttgcggtagacgtgtcggacctcgatcccgtcgaacctcttctctagcttcctgacctctgcaagatacttggataactcggggttggagcatttgtagtcattgtgcacctggtttgcgactagctcagagtcccctttgacgattagtcgcttggccccaagtgcggctgcagctcgtatcccagcgagtagtccttcgtattctgctttattattggttgccctgaagttgaggtggattgcgtgcttgaattgatcttcggagggtgatgtcaagataaatcctgcccccgctccttggctgttgagtgcgccatcgaacgccattatccatgtctcattgtcgccttggttgtctgacttgttatctggcatggtccaatcggccatgaagtcggtgagtacatgagatttgatggctgttcgcggcacaaagtggatatcaaattggcttagctcgactacccatttcgcgatgcggccgacaacgtctttgtttctcacaacttcgccaagggggaaggaggggacaactgtgactctgtgggcttgaaagtagtggcgtagcttccttgatgtcatgatgactgcgtagagcagtttttgaatctgtgggtatcttgtctttgcatcatggagagcttcgctgacgtaataaactggtcgctgtactttctctctctcgactacaatgacagtgctaacggaatatggcgtggcggcaatataaaggaataattcttcattaggttggggagcaacgagtacaggtgggtttgataggtagcgcttgagtgcaataaattcctcttcggcttcctgtgtccatacaaatttgtcttgtttcttcaacaaagagaagaaaggctgtcctcgttctccgatcctagcgacgaatctgcttaatgctgccatgcatccggttagcttttgtacctccttaagtcttgtgggcgacttcatgttctcgattgctttgatcttctcgggatttgcctctattcctctgccagaaacaaggaatccgagtagcttgcccgacggtactccgaatgtgcacttctctggattgagcatgaggcgatatcgtcggaggttgtcaaacgtttcccgcaggtcgtcaattaatgagtcgcttgtcttggtcttgacaatgatgtcgtcaacgtaagcctcgacattgttgccaagctggttgctaagtgcgccctggaccgtgcgctggaaagtattcccggcggttatcagtccgaaaggcatcttaacgtagcaaaataccccgaacggtgtgatgaacgctgtcttctcctcgtccttttttgccatgctgatttggtggtagccaaagtaagcattgaggaagcttaatagctcgcaaccggctgttgaatccaccaactgatcaattcgagggagaggaaagtgatccttggggcacgccttgttgaggtctgtgaagtcgacacacattctccattttccgttggccttccgcaccatgattgggttggctagccactctggatgaagtacttctctgatgaagccagctttgagaagtttgtcgagttcttctcgtatggcttattttcagtctggtgcaaatctccgcagtctttactttactggcttggcatcgtgtcgcaccatgagtttgtgctcaatcacctccctggggacccccggcatgtcggacgggcgccaagcaaacacgtcgacattatcgcggaggaaggtgatgagcgcgagttcagtcttgtcggggttagcctgttgagcggaatgatcttgatggcgccgtccggcttcggcgtcttgtttggcttgctcactttcttgggtggctcagacgtggcgggtggggtgggcgtttgctcgaccatgtcgaggctccgcctgtcgcactgcaccgccagctttgcattcccctgaatagtgattgttcccttcggtcccggcatcttgagcacttgatatgcatagtgggatgcggccatgaacttcgcaagtgcagttctcccgatgatggcgttgtaagctgtatcgaattcagcgacatcgaaagtgatctgctctgttcggaagttgttggcttggtcgaaagtcacgggcaacgtaatcttgcccagaggtctggacgatgattggggagtaattccatggaagggttgatcggttggtgtcaactcactttgtggaattcccattgcatccagagtgctggcgaagaggagattgatcgagctgccaccgtcgatgagaactcgcgctaccttgacgttccgaatagtgggttcgaccacaatcggatatcgtcgttgtggagccgctgaagatgtgtgagacgtggaggtcggagcctgggtacgcaggatccgattcgtgaggaggtgtctcctcgttcttctcgacaacgcgtactcgcttgcttttttgaaacgccatgtgcttctcgagcgactttttgaaaacaaggcaatcctccagagaatgtctgtccgttttgtgtatggggcaccatgatttctttgtatcgctgccttgtgggtctgggcgcttgggagggttcgcgtattctgctgcgaggacttccgcttaagctttccttttcccgtttttgcgatttttcttcttattcgactcagatgcgtctgcggctggtttcttctctcccccagtcttcggcttgtcgttcttgcgtcttagcgcgtcatccacatgggcgcaccgctcaacgatctcgaataatcttcgggtagttgtgatgcgtcttgtcaccaactcctgggtagtgtagcgatctctgacaccggacttgacttgaaggcgcgagttacagaagcgtcggtaatttcgggaattgtgtttctgcactcgttgaagcgccgaacgtattccctcaatgattcccccgagttctgtgttaacgcgtgtaagtcgtcttcgatcgcgtggcgcttgtatgttccttggaaattggcgacgaactgttgccacaggtctgcccacgaagagattgagtaggggggaagatgcatcagccatgtacgtacagaacccttcaacgcagttggtaaatagttcgccaacgcgttgtcatctgctctggcagcataaaacactatcgagtagacttgaaggaattcttctgggtcggtgctcccatcatacttttcaatggccccgggtcggaatctctcaggccatcggacatcacgttgggaacgaccgaaagccctacacccagcactaggggcggtgggttgtcggcggtcgcatgaccttcgtggatgtctgtctgacgatgaagaggacgcggatgatgacgatgacgatgggtcgcttggctccggcgtacgattacgaggatgacgacctggatcccgggaatcttgtcgttgtctctcgctattatctcggcgccgatctccttcgtcgtcgtcgttgcgacgacggccatgaccagtattgtttggcccccgccgttcgcgatcgttgcattctgggtcctcgtttgggcggtttcctcgatcatggcgccgtgaagaaacatgacgccgagagcgatttgcgtcgtcccgtgtgcgccgtgcttctcggcggttgttaatttgatctcgaagatcgctagtgccacgaggtggaggggtagcctgtcgaggcaattccctccgctccggatcttcaccattggcgtcgccggttggtggctgatcttggtgtgctgcggtagcggcctcttcgaacgcattgctgaggttggtcaccgactcccgtaatcgttctgtccaacgctcgaggtcgtcgttcagaacaggatcgtaaggagtttccctcagtatagcttgaatagccctgatgtgctgggccggagtagtcgattgattcgccgcttctgcgttggcttgtgctgatgtgccaacgtcatcgataactaatacttcccatggcgcacttgttgttgatgacccgtagtcttcgaggagatgtaagaccgatggttcgtgaggatcgagatcgattaccccaacgaatcgatctgaggctggagtcgctccctgttccttgccgttatccctagcggggacgtatgacttaggagacagggttttcatggcgccgaggaggactttgcagctcgagagatcgtgattctttgtcttgtggataggacaatagacatcccgagttggagaaatacactgaattccacgttccttgtaggcgcgaatttcagcacggacgttgatgaatacccagcaatcttgaagggtatgtttcttggttttgtggataggacaccagaagtcatctttgtcggcccgtgatttatgtcggagggacaagatttggccgcatcagaatccgtctcgagtttggatgtagtcggtaatccgttctccgtttcaacgggtggatttttcgacatggagccgtcttggttcgtagccactacgttctcgttttcagtcattggaggaccggttgagatcggcgtcatggtgtaaaccgggaagacgatttcgccgacatgagtccataccagcattgttgaagttgagagtgcttggctggagctggtgttgatgttgttgtcgacgaagcttgatggcatagtagtagaaccttgagtaccaagtccccctacctggcgcgccactgtcgacgggtgatacccgtagaccggatatagagggtattggggtacgctggtacaaggatttcgtaggctgtgtgggttatgttggcactgagattcgatgatctatgccctccctggggggtcccttttatatcgcaggtctggtgctctccgagtgggactcgaacataccagacctagcacgatacgtaggtgacccagggggcagggatcatcatgaacatttagttcattcgccagccg

SEQ ID NO: 48027 - DNA, 2425 bp, Oryza sativa
  Clone ID: PAT_MRT4530_50740C.1
gaatagcaggcaaacagaatatctggaaaagaacagagaagctaagaacaatttcacaggaaatgagtaacagttagaaatggctacaaaatcaaaatgttacagctggagtttatttcaacggcactaagatggcccagagcagtgatctacaacacatcatgctgtattagacaggcatttgaagcaggatgaaaatgcctgctcatcatgtgcagacaggtaatgctactaagttcatctaggaaacattggacacgtttaagcgtaactttaacgccttcagctcaagaagatataagcgggattggtctcacagcaccctgtatacgacggaatgcagtcttgatcctttctctcagtgtagcattttcacattcaacaccaccactcctcccatccaagtgtgctacttgtccatccacagatataacaagtttcccttcctctgcaactttgacatcaccaaaaagtgacaccataagagcataaactaccttctgggccaccctttccgtctcttcctgtgtcttcactgcttcttcaactgggacaactttgggaccttcacggcctatgttcaagaccatggcgaccacagaatcagacaccatatcactgataggatcagacgaccactgcaatgtaacatagctttctgattccaggcgaatggtcactctctcatgcacaatcaatgttggaacatcagactcctctgttgatgactccacgctctcatatatttgcttcagtctgtactttatgacttcaaaagaaccagaatatgggacggcaatcctttgggtaatgttagctgtagatagctgcgtgtacacacggagatcctcaggagccataatttgatatgtgaatcccttctttacaagcaagccattaactgattctccagcttccggtaccttttcagccaacctgccaattgtcttggccattttctcagaactgaaatacatctccactgattggcaattcttggggttaacaacttttatatttgtcccatcaaactgagaaataagcttctgcttaagtcttgacatctcatttgcttccccgtgtacaagaacaatgttgggtggctggagctcatccaagaaggtgcttgtctgagggaaatcagcatgagcagaaaaggaaatatagtggacctgcatatgaagaggagcagtgagcccattcgccagtgtcacttctcttggctcgttaataatggtctttgcaagggtgccttccacaacataacctggaataacacatgaattcttcttatctgtgcaccatttgtcaaagagctgcctggagaggccactctggagaccacctgggcttgccataaccactgatggacccacatcatgaaagttatctatgctattcaaagactcaatatgcttgaaatggaagggattagattgtgcaaactggttcctaatcctttcattcatggagttgatgtatgtctggtagacagccatgcatttcttggcaagaggggaggcataatagattggaatcttatggagctctgggtggttggcccaatactcatccaggataagtagcagctcttgagctcttccaagagcaaaggctgggataagaacgcgaccaccctgcgagacggtcgtgtgtattacatcagtgaagcgcttctctcgtacatggcggggttggtgctgctgcacgccataagttgactcgataatgcaaatatcaggggagaactggggaagttcagcagctttcaggtggcgatcttcctcacgggagtagtcaccagtgtaaagaacgcgaaccccagcaatgtccaccatgaacattgcagcgccaagtacatggccagcagtatagcaccagaagcgtatgccattaacttccaatgtctggtggaagtctatgacctcaattttatccatggaacgaagaatgtcttgctcgtcaaacagcatatcctccacagaaactttgctgactttgacataatcggaaaggagcagcctgtagatggcctttgtggcatgggtcatgaacacgcgccccttgaatgtcgtcttctccaagaagtagggaagagaggcagcatggtccaagtgaaagtgggtgattaggaggacatcaatggtggagggatcgatctcatcgaagtaggggagcgccgccatgccggagtaagccgggtggatgccgcaatcgaagaggacggtgcggcccttgaatgacatgtagacgcaggagcggccgacctcgttgccggcgcccagcggagtgatgatgagctggtctccctcccgcccgccggaggcctgccgcttccccggcggccccccggcggtcggtgcggcggcggcggcgacggacgacgccatttccctgcagcccgggatccactagtttagacgcc

SEQ ID NO: 48028 - DNA, 585 bp, Oryza sativa
  Clone ID: PAT_MRT4530_50742C.1
tcccgtcgcgtctcgcgacctcttcccccgcctcccccaagcatgccccttcgacccccggccaccagggtgtccgcgtgcgatgggcatcccgttcggggacatccccccgtggtggggatccggcgtggcggcgtggggcggcgaggcgcggcgtccggtgatcgatcgcgacgcggcgaggcaacgagagagactacccgtggaaaaaacggtggaaaaattcatcccgggtcggacttatttttatttattttttgttctgatcgagacgttgactaacccggtaatgggttggtcaaacgtctcgtcggctcgtcgcgttgttctgcgtgtgtacgtatatacgtacgtacatgcccggaagcttcctctcgcagctatacgtatgtacatacaacccacgtacgtatagtatcaatcataagtggctgtactcggattggtggtgtatatgtgactgaactgtgggaccagggggttgcaggggttttgtaattgtaactgtataaatgattgctaccacttgattgtgagatgaattgataagagaaaccctaagtcgaaaaaaaaaaaaaaaaaaaa

SEQ ID NO: 48029 - DNA, 810 bp, Oryza sativa
  Clone ID: PAT_MRT4530_50743C.1
tttttaaaagggaaacggtcaggtgacagtgatgagcctagctagggtgtgcttggtcgtgtagcatctcatctcctgattgacctgacaggctgcgataggctcgtcagaggatgtgtgctcccagaatcgctcccgagatcttctcctccccccaatcagctgtcgactgatgttggccgtacgcaccatcacaccgcacacgcatcgatcgctgttgatgtttatcagattgctgttcaccggtaagctactccttgcgagagccctgaccttggtatcaaaatgagaggatgtgatgcgagatccaggcagatagaggggattgaggaatatcttgatataaagctcatggacctcttgaaaaaagcttttaattccatcctcactacgtgaatcatgaagcaacatgaatctagcatgtgtcatcaagttaaagaaaacaatattgttgtacaggtaaaaataaacagacacaacaaggtcgttgaatctgtcgaccgacttcaggaacattgcatttgtggaccatgctaggtcctgaacaacatctaaagcagcatgcagaatgaactggtgctgataagccagatcttcttttttcggtgcagatccgacttctgcctcatagattgggatgtcgttcttactaacaatcgcgaagcacgccgtgcttgccatttccaccaacacttggactagtttctctccaacgtgggagggggcgattcacggcgttggaaagttcgccggatccgcccgcggccgccttcgtgctcggatctcgggtgagagatcccaggctcgtgc

SEQ ID NO: 48030 - DNA, 230 bp, Oryza sativa
  Clone ID: PAT_MRT4530_50744C.1
tcgaccacacgtaccatgcatgaggagcagggtctggtacagaaggaacatctgttgtctgcttcgactgctccagtgaccttaactggtgtcgcatcgtcggagacgctggaactgatcaaggaacaatcctctgtaaaggctgtccttgttgctgactacatctggattatcgacaaaactgaatgcattctccatttggtttatcaacaagaaagtccggcttttaa

SEQ ID NO: 48031 - DNA, 273 bp, Oryza sativa
  unsure (1)..(273): unsure at all n locations
  Clone ID: PAT_MRT4530_50745C.1
cacatccatctcgtaccctttgtataaatatatntggccgtttctaaatagggtgcattcacatatacctcacccaacaacatatagtcgtagcacataccactcttacatcaagtcatagagagatcaggtgaaacaaaaacaaaatcttatcacggccggttaaatcaaaagacaaggcacatgctctaatcacacgaaaaattgttataaacatcaaccactcactaaaaaacaattaaacaaagctatttcttacaatcactgcttaaa

SEQ ID NO: 48032 - DNA, 148 bp, Oryza sativa
  unsure (1)..(148): unsure at all n locations
  Clone ID: PAT_MRT4530_50746C.1
gagagcaaagtnacttnattngtgtctncctnaancgngaaagcatcanaagaatntttatacaaaaaactntntaccaatnttttggcaacagaaaatacagtgggggttatgcccagtnttcctgaaaacagtgangggcaaaaat

SEQ ID NO: 48033 - DNA, 438 bp, Oryza sativa
  Clone ID: PAT_MRT4530_50747C.1
atgctgaggaagaggaggttacggatcatcgtcggcatcgacaaggaagaacccaacattaggataatgggtgatgctccggtgcactctacttgcagtattctactacaagtagaattaatctcgaccgtttatttaaaagggcagtgtcggaggaatcagccattagttttccactgtgtcggagaatggcgagctgctcgggatcggatgccacggccggccgaggtaggtctccacactgctgccggcgggggcaccgcggaggaggtcggtgtcagcgtagatgctgcagtcctggaacgagaagcctgtggcgcgggactgggcggtgatggtgttctgctggccgcggagggggaagcgtgcgacgatgtcgcagtgctggaagacggcggtggcgtcgccgaagatgagttagatattgataaattatga

SEQ ID NO: 48034 - DNA, 224 bp, Oryza sativa
  Clone ID: PAT_MRT4530_50748C.1
ggacaaatgcgggcaactgcgacttgctgaccaagacccacgtgcgtgaagataaggtaccaactatggcgtcggtcatagttgaaccgagagtagagccaccttcgaggaggtcgccaaccggcgaggagaacggcggctggcaagtcggcaccagctgctcactgcaccagacttggcaaagtgtgcaggcaaagtgaagtcacggaagcataccgacaact

SEQ ID NO: 48035 - DNA, 361 bp, Oryza sativa
  Clone ID: PAT_MRT4530_50749C.1
ggttcgaacttaattttcatctaaagtagaatccaacaccactatgcggtccaatttctgctaggtgtgccaacggcaacacgttttacaggcaaatctgcaaggttactgcatctgttcctttgttgggttctcattagagatgaacagagaaattttgagcttactgaactatatgttcatgattcatcgtcgacaaaggcatagaaacagaatggagaagaattgaagaaatcgtgggtaacagtaacacctctctatggctctatctatagactaatcccttattgcttcacttgatatttaacaacacagtactagaatttaacagaagttttcaggtcgaaatgcttaatcatca

SEQ ID NO: 48036 - DNA, 4046 bp, Oryza sativa
  Clone ID: PAT_MRT4530_5074C.1
cgtcggacatgcccggggtccccagggaggtgatcgagcaccgtcttgccgtacgaccagatgcgtgacccgtccggcaaaaagtgtggcgtcaagccccggagcgacatgccttcatcagggaggaagtggcacggctcctggaggctgatttcatccgcaaggtgatccatccggagtggctggcgaacccggtggtcgtcctgaaggccaacggcaagctgcggatgtgcatcgactacacagacctcaacaaggcatgccctaaagatcccttccctctaccacacatagatcagatagtcgactccactgcggggtgcgaccttttgtgttttctagatgcatactctgggtaccaccagattcgcatggctagggaagatgaggaaaaaactgccttcattactcctgtgggcaccttttgttatacaactatgccttttgggttgaaaaatgcatgccctacttttcagcgcatgactcgtattactttgagtaatcagatagggcgcaatgtagaggcgtatgttgatgacctggtggtaaagatgcgccaccaggacacgttgctgcaggacctggccgaaactttcaatagtctcaggtccacacgcgtaaggctgaaccccgataagtgtgtgttcggtgtgccggcgggcaaacttctcggttttctagtctcttcccgaggcgtagaagcaaatcccgagaaaatgcgcgcgatagagaggatgcgccccccagcaagcttagtgatgtgtagtgcgtcactggatgcatggccgccctgagtcgattcatatcaaggctgggtgagtgggcgctgcacctattcaagctcctcaagcgctctgggccgtttgtatggacggaggaagctgagcaagctctcaatgagctgaaagcttacctcacttccccctatcttggtggccccggggccagaggaaccattactactctacttggccgcgaccccctatgtggtgagtgccgccctagtagttgagcgcgaggaaagcgaacgagaggcccctttggctcgcgatggcccctcgtcccccgaaggcctagtgcccaaagcacccagcccccgggaggaccccgaggcccccgagggaagaggggaggctttggtaagtggccctgaggcctacgatcccgaagtgacccgggatccccccggggctcccgagcaggggcgccccgggtcatctgcccctgacaacacgaaccggccctgccgaaaggtgcagcggcccgtccacttcgagatgcgaaaacccggtacccataggcccagaaaatgctttatgctgttttaatggcctcaaggaagttgcgccactatttccaggcgcatcgggtttccgtagtgatatcgtatcctctcggccaaattttgcacaaccgagagggcactggacgggttgtaaaatgggccatcgagctagctgagttcgatctgtacttcgaaccacggcacgcgatcaaaagtcaagtcctggctgacttcatcgtggagtggacccagtggatgaacctgtttcgtccaatgtccctctcccccgggagaggaagaggacccaaacgctgacattcgtggcgggcactggattatgcattttgacggctccctcaaccttcaaggtgcaggtgccggactcacgctgacgtcgccaagcggagacgtcctcaaatacgtcgtctgattcaatttccgagccacgaacaatatggcagaatatgaaggactcctcgcgggattgagggcggcagccggaatgggcatccaccgtctcctggtcctaggtgactcccagctggtcgtaaatcaagtatccaaagagtaccagtgcaccgacccacaaatggatgcatatgtccgcgaagtgcggcgcatggaacgccacttcgacggactcaagctccggcacgtgccccaacgcgacaacacagtcgctgacgagttgtcgcgtgttgcgtcggcacgagccccactccccctggggactttcgaggaaagactcgcgcaaccatcggcgcgaccgaaccccttgagggaccccaacgacacgccttccgtcccgacccccggcgacccgcacccctcagggcccgagggggtcgaccccgacccccctcgttaggtcgtgtggatgaccgacatccgggcatatctcgacggcaatactctccctgagcatcgcgcagaagttgagaagttcgcgcgcatctctaagtggtacgtcctcgtagaagggaccctctaccggcgtgccgccaacgggatactcttgaagtgtatttctcgggagcaggcatcgagctcatagccgacacccattagggtgagtgcggggcccattcggcctcacgatctttggtcggaaaagccttccagcaaggcttttattggccaactgcattacaagatgcccaggaatgggtccggcggtgcaagacatgccagttccatgccaaacagacccaccagccgacccaagccttgcaggtcatcccactctcttggccttttgcggtctgggggctagacatccttggatcattcaaggcggctcgaggcgggtatcagcacttgtacgtcgccatcgacaagttcaccaagtggcccgaagcttacccggtcgtcaaaatcgacaagcattctgccctcaagttcatcaggggcatcacgtctcgattcggagtgcccaaccgcatcattacagacaacggcacctagttcaccagtgagctgtttgccgattactgcgacgacatgggcatcaaattgtgctttgcctcgcccgcccaccctaagagtaacggccaagtcgagcgagccaacgccaaaatcctcaaaggcctcaagaccaagacgtacaacgtcctaaagaagcacggggattcatggctcgaggagttgcccgccgtgttgtgggcaaatcagactactccaagccacgccacaggggaaactctctctcctctcccccgtggcccaatcggcctcctccccgcgcgcgtgccgctgacgggcgggcccgcccgccaccctcgctgacgggtggggcccacctgtcatcccctacctcgcgccgcacccgccgcctcgcccgtgccctagcgccgccgccgccgcggattccgccgcatcccgccgcccccgcgcgcaataaagagggggaaatcactccccgtgattccctccctctttccccccacttttccctctctctctccctcggattcgtttggtaacactcccgcaaacttcgccggcgcatcaatggcggccggatcttccgcggccgattccccctcatccggccgttctctccccctcccaacactatataagcgctccccgtgcctccctccaccgtttccgccactcgccgctctctctctccgccggaatcgagctcgcgccgtcgctctctctctccgccgtcaccgccgagctccggtccgccgccgtcgtcgccccggaccttctcccgcctcggcgtcgcctccttcggctccgccgcgtcctcgccgacctcgtccacccctccgtttcgcccgccgaccgccggaacgccgccgtcctcgtcgacccgagccgcgccgccgccttcctccgctccggtcgccgttcccgtcgtcgccgtcgacccggggtgagccgtggaccgccgtttcgtttcccccttccctcccctctctcggccgccgctccgccgtgcctatggccgccgccggcgaccataggggcgcgggcgcgccgcctcccgtcggctgtgccggcgtggccgccttcgggcgcgccccgcggctgccatgtggggcccggccgtcagccgcccgcgccctcgggtgcggctgacgcgtgggacccacggcgccggccggcgtaagccgcgtgcacccggtccaccgtggaccgtgaggctgccgcgtgggccccactcccgtggacccggtccgcgcgcccctcccctcggccttgttcaccctaggaaaacaaaaccccaactagtgggtactctattcat

SEQ ID NO: 48037 - DNA, 466 bp, Oryza sativa
  Clone ID: PAT_MRT4530_50750C.1
cgatctctccctccctccctccgctcccaatcatggctaccgccaccgccgcctcccgcctcgcggtggccggagctgaacccgctcgcgcccggcgccaccgcccgacgacggtggcagtctgcgggggcgcgaggccgaggtcgcgccccgcggccgtcgttgccgccgccggcgccgccgatacctctccggccaccggcggcgtcgcgccggttccgccaagccccaggggctcgattataaagcgtcatacactatcagttcttgttggagatgaaagtgggatgattaatcgaattgctggagtttttgctagaagaggatacaacattgagtcattggcaggtgggctgaacaaggacaaggcattatttacaatagtagtatctggaactgagaaaatactgaaacaggttgtagagcaactaaacaaacttgctaatgttatacaggttgacgatct

SEQ ID NO: 48038 - DNA, 1893 bp, Oryza sativa
  Clone ID: PAT_MRT4530_50751C.1
atggggaggtggcagatctgcggttgcgtgacctccatcttggatctcggtgagctagggggactgttcttggaagtggttcttgggagcatcctgataatgtgggttggttcgattggagatgctgaagagtggtgggtttctgttgggtttaatgccgcagctggtttattaaacatgtctatgcaaaattctgaaagttcatctgccaatatttctagtcatgagctgccttcacaaacacgtaagagagcaaaagtgtgggaacattttgagcaggagcttgtcatgatagatggtcttccaaaagcacaatgcaaatattgtggcttaatgttgtcagcgactagaaaatcaggaactagccatctcataaaccatatttgcgaatcttgtccactagttgatggtgaagttagaaataggtttatatcaacagttaggaaacaacccgtggaaaattttgtgtttgatcctaaaaagactaaagagttgatgataaaatatttcatccatgctgagataccattccataaaattgaggatccctacttggatgattggatggcatccatgcagccaacttttaaacttgtgggtcgtcaatcaatccgcgacaagatttacaactattacaataggctgaaacaagaattgcatgctgaattagagaatcttgattcgcgtgtatgcctaacatcggacatgtggacctcaaatcaaaacctaggatacatggttgtcacagcccactatgttgatgctgaattcaaaatgaaaaagaaaattataagtttgaagcctgtgaagtatccacacactagctttgcaattgaagaagccatgatgaggtgtttgactgagtggggcttgagtagcaaactgttcaccttaactttagacaatgctagtaacaacaccgctgcttgtcaagaattagtgaaaactctcaaggatgagttggttttggaaggcaaacattttcatgtgaggtgttgtgcacacatcctcaatttgttggttcaagatgggatgagggtgattcgtgcagctatagataagatccgtgagatcctaaagtacattgagcattcaccctcacgcattcaagcgtttaattcaattgcttctagtaaaagtcttcctccaaaatctggtttcactcttgatgtaccaacccgttggaactcgaccttcaagatgattagagaaatattgccttacaaggctatcctcaatagctatgcctctgaaaattgtgaacttctaccaactgacgaagaatggttgcatgctgaatcaatttgtgaatttcttaaggcttttgaagaggctactagagatccaagaaggaaaagagactatttggatttcttttatgagaaggtgtctccccatggttctaatgttgaaagtaaagtggactctattatagaggagatgaaatcatactttcatgtatatgaaggaattgcaagaagaaggggtgtatcctacatgtcacagtctagtgagagagttagtgttgtaggctcacctgttttgggaaaaagaaagctagagcatgaattcatcctcttcaagtcaaaccggaaggttgcacgtactcagaagtcagagattgatacatatttagaagaagtatgtgaggatgatagtgaggattttgatgttttggcatggtggaagaaaaattccaaaaagtttcctgtgttggcaattatggctcgagactttcttgcaattccacttagcaccgtgccctcagagtccgctttcagcagtggaggaaggattcttggagacacaagaagctcattgacaccagagatgctcgaggcacttgtttgtgcaaaagattggctacatagagccaaaaaacaaggggattaa

SEQ ID NO: 48039 - DNA, 3114 bp, Oryza sativa
  Clone ID: PAT_MRT4530_50752C.1
atggcgtggtcgaggattgcgaggggctcgcagctcacgcagccgctctcgaggattctcgccgagggcaacgcggccgccaccccggcggcgtacgcgctgcgcaatgcggcggcgctgggccagcgcgcctcgtcggcgtcggcgtcgtcgtcgttccacagcctcgcgttggcggggcttgctgacaagtacgcggccggcgctgccgggcggctccagccgagcagggggatcagcacgacgtcacctgcgctgcgccccgcggcggaggcggcggcgagggtggtggagtgctcggacgccgccgacgaggcggcggcggcggcggcggtgccggacctcgggcccacgcggccgggggagaagccgcgcgtggtggtgctcgggacggggtgggcggcgtgcaggttcctcaaggacgtggacacgcgcgcctacgacgtggtgtgcatctcgccgcggaaccacatggtgttcacgccgctgctggcgtcgacgtgcgtcggcacgctggagttccggtccgtcgtggagcccgtcagccgcatccagtcggcgctcgccacccgcccgggctcctacttcttcctcgcctcctgcaccggcatcgacacggggcggcacgaggtgcactgcacggcggcggacggcgacgggctccccgccaacccgtacaacttcaaggtgtcgtacgacaagctggtgatcgccagcggctccgagccgctcaccttcggcatcaagggcgtcgccgagaacgccatcttcctccgcgaggtcagccacgcgcaggagatccgccgcaagctgctcaccaacctcatgctctccgagaatccaggcttgtcggaggaagagaagaagcgcctcctgcactgcgtcgtcgtcggcgggggtccgaccggggtggagttcagcggcgagctcagcgacttcatcacccgcgacgtgcgggagaggtacgctcacgtcaaggactacgtcaaggtcaccctcatcgaggccaacgagatcctctcctccttcgacgtcgggctgcgccagtacgccacggaccacctctccaagtacggcgtgaacctggtgcgcggcgtggtgaaggaggtgaagccgagggagatcgagctgagcgacgggagccgcgtgccgtacggcgtcctggtgtggtcgacgggcgtggggccgtcggagttcgtgagatcgctgccgctccccaagtcccccggcgggaggatcggcgtcgacgagtggctccgcgtgccgtcggtggaggacgtgttcgcgctgggcgactgcgccgggttcctggaagggacggggcgggccgtgctgccggcgctggcgcaggtggcggagcgggaggggaggtacctggcgcgggtgatgtcgaggatcgcggcgcaggatggcggcagggcggggcgcgcggtggggagcgcggagctcggggagccgttcgtgtacaagcacatcgggagcatggcgtcggtggggaggtacaaggcgctggtggacctgagggagaacaaggacgccaggggggtgtccatggccgggttcgtcagctggctcatgtggcggtcggcgtacctgacgagggtggggaggtggcagatctgcggttgcgtgacctccatcttggatctcggtgagctggggggactgttcttggaagtggttcctgggagcatcctgataatgtgggttggttcgattggagatgctgaagagtggtgggtttctgttgggtttaatgccgcagctggtttattaaacatgtctatgcaaaattctgaaagttcatctgccaatagttctagtcatgagctgccttcacaaacacgtaagagagcaaaagtgtgggaacattttgagcaggagcttgtcatgatagatggtcttccaaaagcacaatgcaaatattgtggcttaatgttgtcagcgactagaaaatcaggaactagccatctcataaaccatatttgcgaatcttgtccactagttgatggtgaagttagaaataggtttatatcaacagttaggaaacaacccgtggaaaattttgtgtttgatcctaaaaagactgaagagttgatgataaaatatttcatccatgctgagataccattccataaaattgaggatccctacttggatgattggatggcatccatgcagccaacttttaaacttgtgggtcgtcaatcaatccgcgacaagatttacaactattacaataggctgaaacaagaattgcatgctgaattagagaatcttgattcgcgtgtatgcctaacatcggacatgtggacctcaaatcaaaacctaggatacatggttgtcacagcccactatgttgatgctgaattcaaaatgaaaaagaaaattataagtttgaagcctgtgaagtatccacacactagctttgcaattgaagaagccatgatgagcgatcttttaaaacgattggctgctcctatgcacaccaagtttgcaaaatattgggatgaaaaattggcaaacaacttcaatttggcacttgtcattaccactgtgttagatccaagaaggaaaagagactatttggatttcttttatgagaaggtgtctccccatggttctaatgttgaaagtaaagtggactctattatagaggagatgaaatcatactttcatgtatatgaaggaattgcaagaagaaggggtgtatcctacatgtcacagtctagtgagagagttagtgttgtaggctcacctgttttgggaaaaagaaagctagagcatgaattcaccctcttcaagtcaaaccggaaggttgcacgtactcagaagtcagagattgatacatatttagaagaagtatgtgaggatgatagtgaggattttgatgttttggcatggtggaagaaaaattccaaaaagtttcctgtgttggcaattatggctcgagactttcttgcaattccacttagcaccgtgccctcagagtccgctttcagcagtggaggaaggattcttggagacacaagaagctcattgacaccagagatgctcgaggcacttgtttgtgcaaaagattggctacatagagccaaaaaacaaggggattaa

SEQ ID NO: 48040 - DNA, 2328 bp, Oryza sativa
  Clone ID: PAT_MRT4530_50753C.1
atggagcgctttgctcagcatcagaggcgttgtgttggtggcagcggccctaacccctggcagggcatgacggcggtcggcggagatgctgcctgcgtctggcagcagcggccctaccagtacggggaggttctacaagctgaccccgaggaactggaagttgggggtgactatttccctgttggggccggaacacccgggcctgcgggggtgggttggatttttggacccatggggaggtggcagatctgcggttgcgtgacctccatcttggatctcggtgagctggggggactgttcttggaagtggttcttgggagcatcctgataatgtgggttggttcgattggagatgctgaagagtggtgggtttctgttgggtttaatgccgcagctggtttattaaacatgtctatgcaaaattctgaaagttcatctgccaatagttctagtcatgagctgccttcacaaacacgtaagagagcaaaagtgtgggaacattttgagcaggagcttgtcatgatagatggtcttccaaaagcacaatgcaaatattgtggcttaatgttgtcagcgactagaaaatcaggaactagccatctcataaaccatatttgcgaatcttgtccactagttgatggtgaagttagaaataggtttatatcaacagttaggaaacaacccgtggaaaattttgtgtttgatcctaaaaagactgaagagttgatgataaaatatttcatccatgctgagataccattccataaaattgaggatccctacttggatgattggatggcatccatgcagccaacttttaaacttgtgggtcgtcaatcaatccgcgacaagatttacaactattacaataggctgaaacaagaattgcatgctgaattagagaatcttgattcgcgtgtatgcctaacatcggacatgtggacctcaaatcaaaacctaggatacatggttgtcacagcccactatgttgatgctgaattcaaaatgaaaaagaaaattataagtttgaagcctgtgaagtatccacacactagctttgcaattgaagaagccatgatgaggtgtttgactgagtggggcttgagtagcaaactgttcaccttaactttagacaatgctagtaacaacaccgctgcttgtcaagaattagtgaaaactctcaaggatgagttggttttggaaggcaaacattttcatgtgaggtgttgtgcacacatcctcaatttgttggttcaagatgggatgagggtgattcgtgcagcaatagataagatccgtgagatcctaaagtacattgagcattcaccctcacgcattcaagcgtttaattcaattgcttctagtaaaagtcttcctccaaaatctggtttcactcttgatgtaccaacccgttggaactcgaccttcaagatgattagagaaatattgccttacaaggctatcctcaatagctatgcctctgaaaattgtgaacttctaccaactgatgaagaatggttgcatgctgaatcaatttgtgaatttcttaaggcttttgaagaggctactagaggtgtatcagctcataggacaccaactgcacacacattcttgccccatgttctttgtatccgtcatgctttgagtgatcctgattggcaaaccagcgatcttttaaaacgattggctgctcctatgcacaccaagtttgcaaaatattgggatgaaaaattggcaaacaacttcaatttggcacttgtcattaccactgtgttagatccaagaaggaaaagagactatttggatttcttttatgagaaggtgtctccccatggttctaatgttgaaagtaaagtggactctattatagaggagatgaaatcatactttcatgtatatgaaggaattgcaagaagaaggggtgtatcctacatgtcacagtctagtgagagagttagtgttgtaggctcacctgttttgggaaaaagaaagctagagcatgaattcaccctcttcaagtcaaaccggaaggttgcacgtactcagaagtcagagattgatacatatttagaagaagtatgtgaggatgatagtgaggattttgatgttttggcatggtggaagaaaaattccaaaaagtttcctgtgttggcaattatggctcgagactttcttgcaattccacttagcaccgtgccctcagagtccgctttcagcagtggaggaaggattcttggagacacaagaagctcattgacaccagagatgctcgaggcacttgtttgtgcaaaagattggctacatagagccaaaaaacaaggggattaa

SEQ ID NO: 48041 - DNA, 232 bp, Oryza sativa
  unsure (1)..(232): unsure at all n locations
  Clone ID: PAT_MRT4530_50754C.1
cagatgaagaagaaacaaatctgtgacatcaagaaagaaaaagctctgtatctatacatcatactcagctcactcaagtaactagaccgnacgacccggtcccgaccgcacatgcgcgcgggcgaacgaagctcggtcgccacgatacgaccgggcgggctacgggtaggggtacggtcccagacacacagtccaccgctccgcgcggggcctatccacgcgggcgcgggta

SEQ ID NO: 48042 - DNA, 607 bp, Oryza sativa
  Clone ID: PAT_MRT4530_50755C.1
ccggccgggaccaccgtgcacgccactgacgccatggccggacggggcctctccgccgccagatggggattgctctgccgccgaagggtccgcagcgaggccgcgcccactcgtggatcggcggcgcaaggcggtgccataatggcgtttccttcctcgatccgatgccgctgttgcttccactgtgagccgccaccatacacgcgtgcttgtgcggcgacccggcgatgcggagagggaagaaggggccgcttcctcgcggcggccacggcgcgctagatcaagggaggcagctcttgcggattgatcactgaaggtgggagagatagtcagttctgccattgttaccgagacagtgaacaaaatcatatctggcatgattgacaattatgagcaaaaattaagtgcagacgagctgatggagaggctggagatggcacaaatcaagttggagcttgcacttgagacatccagtaagtggcagatcacgagtgagccgttgctgcgttggcagaagaagctgaagcgtgctactgaagagtgtgatgacacactacgcaagtgcaggcagcatgtccagaaaaaaaaggagaaaaaacccgcggcc

SEQ ID NO: 48043 - DNA, 505 bp, Oryza sativa
  Clone ID: PAT_MRT4530_50756C.1
atggagcgaaaacgaaccggcgcgggtatggtaatgaaaatttaacggaatacaaaaacccctcaaactgataaatctttctttcttgtccaacaatgactagcatctactcatgagtataaatatgtacacccgggggtattgtaaactatcttacagatcaatataactactcccggtgcatcgccaccctctttaccgatgtttttatttatcatccggtggaacttggcacctgacgcggggctgcagcggctttcgatctccagcgaaggggtaagtcctacgttccgctggcctaggcaattgtaccggttacattggtgttgttcaaggctgcatcgctttgatctcttggattgctctgattcggttgatatatttgcctacctaatttatcatatatcttagttaatctagtttggtagctcgatttacttatatcggctgagattcgctttagggtttatgccagtatcgactaaattgctttgccatattagat

SEQ ID NO: 48044 - DNA, 330 bp, Oryza sativa
  unsure (1)..(330): unsure at all n locations
  Clone ID: PAT_MRT4530_50757C.1
cggacgcgaggaccgaatttattntcgtttttctcaccccgccacgcctgacaccgccgtaacgaaccacgcgccatgaaagcccccagagagcgcgccatggcggggcagcggcggaggccgaagaggacgccggcggaggaggcagtcgacgacaaggtacgacgggcggcgactggggggacgacggaagaagcgcagcctgaaccggaggaggggcgggggccagcggggacggtgctggaccaggcgtgcccgaaggggcagcagaagaagggggactggccgacgcacgagcagaacgggagcaagggtacggcggacggacaa

SEQ ID NO: 48045 - DNA, 2410 bp, Oryza sativa
  unsure (1)..(2410): unsure at all n locations
  Clone ID: PAT_MRT4530_50758C.1
ctcccgctctcccgcacccgccccccgcccgagtccccacctcaccgacccccaccacacctcgccatcctcctcccttgtcgcgcacacttccccactcgcctccgcctcgcccccccatggcgatcgccggcggcacgggctgccgccgcggcctcctcctcccgcccctcctcttcgcggcggccctcctgctctccgccgcctcccccgcccgcgccttctacctccccggcgtcgccccgcgcgacttccagaaggatgatgagcttcaagttaaagtcaacaagctttcgtctacgaagacacaacttccatatgactactattttctagactactgcaaacctgaggcaattaagaatagtgctgagaacttaggggaagtccttcgtggggatcgcattgaaaactctgtctataatttcaagatgaggagggatgagacctgcaaggttgtttgtcgatcaaagctttctccagaagctgcaaagaatttcaaagaaaagattgacgatgagtatcgagtgaacatgattttggataatctcccagttgtggtgcctagacaaacaagggaaggaagccaaacaccaagctttgagcatggttaccgagttggttataagctcaaggatgacaagtattatatcaacaatcacttaagttttaaagtcttgtatcatgaagacccaaactctcctgatgctcgtattgttggcttccatgtgattcctagcagcattaagcatgaatacagtgcttgggatgacaagaaccctacagtgcaaacttgcaatgctaacaataagataactcctggtagccacacgcctcaagacgtggttcctgaagcatatgttgtattctcttatgatgttacctttgaggctagtgagatcatatgggcatctcgttgggatgtctatcttctttcaagtgatagccagatccattggttctcaatcattaactcactgatgattgtccttttcctttctggcatggtagccatgatcatgatgagaactctttacaaggatattgcaaactataatcagcttgacaaccaggatgaggcccaggaagaaactggctggaagttagtgcatggtgatgtcttcaggccacctgtccactcaggcctcctttgtgtttatgttggaactggtgtgcagttctttggaatgacactggtaaccatgatgtttgcgctacttggattcttgtcccctgcaaaccgtggtggactaatgactgctatggtccttctgtgggtgttcatgggtgtattggcaggatacacctcatctcgcctatataagatgttcaaaggcactgaatggaagaaaatcaccctcaagactgcctttatgtttcctggtataatctttgcactctttttcttcctaaatgccctgatctggggtgagaaatcatcaggtgcagttccctttggaacaatgtttgctctgttcctcctttggtttggcatctctgtgccgctagtctttgttggaagtttcttgggcttcaagcagccagccattgaggacccagtgaagacaaacaagattcccaggcaaattcctgagcaggcatggtacctgcagccagctttctcaatacttgctggtggcatattgccatttggcgctgtcttcatcgagctcttcttcattctgacatcaatctggctgaaccagttctactacatcttcggcttcctcttcatagtcttcatcatcctcatcgttacttgtgctgagatcacaattgtgctctgctacttccaactatgcagcgaggactatcactggtggtggagagcatacctgactgctggctcttcagcactgtatctttttgcttatgccatcttctacttcttcaacaagctggagatcacgaagcttgtttcaggcattctctactttggttacatgctgatcatctcgtatgctttcttcgtgctgactggtaccattggcttctatgcttgcttctggttcgtgaggaagatatatgcttctgtgaagatcgactgatgagacagctcgaaacatcatctgctacaaatgtgatacaatggtgtctcccaattaacatatataaatggaagtgggatgtgcgaccggattggatggtttttggtagaacatgtagtctggtaggaggtaagaattgcctgatgttcaagagagttcttgatactccctgtagcgtgacatgaattttgtaactctgaagatgtttgagtgcttcttgtaatattccatgtctctttatcttacggcttcacatatttctttttccggggtctcgcgccatatcacattcgaacatacgtactttatcatcggtttgctatccactagctggagattnccttgtaaaaaaaaaaaaaaaa

SEQ ID NO: 48046 - DNA, 2724 bp, Oryza sativa
  Clone ID: PAT_MRT4530_50759C.1
atgaagccctcggagtgtcctccttggattgatcctggcaatgctgttagagttgttgttaaatgtgcttcatatgtagcaaacttagagtatggattgctatcaatgtcagagcaagagcatgattggtgggttgataaatgcaaaggttatagtttagataaattctgtgatgatatgactagcaaggtaatatgggggcctagccaagaaattgtagtgtggggattagactttgatagtgggactgaatggaaggtaaccaacaatgaacagtttgagaagtggtttcagtctgggtggaaagagaaagtggtatatcttggggtagaagtggttactaaaaagggatacaagcctgctgaaagctatgtagatcgagttgagtcaacaactcaagttgtcactagtgttttaagtgtagatcttggggttccatcaattgctgaaggtagtgtgataagtgcaaaaccaactggtcagtcaattgctagatgtggtgtgataaattcagattcaattgatatttgctctccagttcaaatgaccaatgaagaagatactggtgacacttgtaaccatgcaccaaatgtagaagactcagctgctcttgtggactggagtaagttggcaatcattttggatggcttagatggtgatgctcatgcattgttggatgaggatgaactatttgatgctatgggtttcaaaaaaacagatgagagagcagcagcaacagcaatacaagaagaagctgcactccctgttattccaattgagattcaacaagatatgatagatgcagccattgtagttagtgatgaggtacctgctgacccagaacttgtttgggatagggatgatccaccaatggaagtagggacaaagtatccatcaatgaatgagttcagaatggcagtgaaacagcatgcaattgttagtgagtttgagcttgagactgaaaaatctgatccagatagatttcgaggaaagtgttctgcaaatggttgcccatggaaaatcagagcaaagacacaggctgataaaagtgtcaggatccaaataaatgaggaggatcatcattgtgcttcaagaagcagagttcttgggaagatggcatctcaagcttgggtggctgaaagggctattccatttttgaagaagaagaaagacatgggtgcaaaggaacttcaaggtaagctacaggagacatacaagaccaccataggctatcagacaacgtggtatggtttgcagagggctaaagataagttatttggaaagtttgatgattcatttgattggttgtataggttcaaggctgagatagaaatgagatcccctggtagtgtagttgagattgacatagttagagttggagataagagacccaaagataattgggtttggttcatggagcaattaggtaattcaatagggccagtagagaatttagttgtgcatactgatgcttgcaaaggcctagaaactgctgtaaaaaaagttttcccatgggctgaacaaagagagtgctttaggcacttgatggagaatatgaagaaattgtttcatgggaacatatatgggaaaaagatgtggcctgcagctaggacatacatgcctcagaagcatcaaatgtggatggatgaagtgtttgaatatagctcagatgtcaagccatggcttgacgaacatcacaacctactgtgggctagaagcaagttttcatgtcagagtaagtgtgaatatatcaacaataacttggcagagtcatggaatgcttggatcaaaggtttgaaggacttgcctattgatgctcttgctgatgcaattagggagaaaaccttgattctttttgagaagaggaggaggatctctacagccctcaatggagtgattcttcctgttgtgattcaccagttgaatgcagcctcaaaggggttaggccatctaaaggtcactaagggtgatccttaccaagctgaggttacagagatacataatgatgaggagctaacaaggcatgtggtgtaccttgacaagtgcacttgcacctgcagggaatggcaagttactgggaaaccttgccaacatgcattggcagtcatcacaaccgtgaggcaaccaaatatggagaaatatgttgataaggctttctctgtgctcagatttcaggcagcatatgcatcaaccatccctaacattacagacaagaagcaatggcctcaagttgagaaagaattcaagcttcttgctcctgtgtccaagaaaagaaaagtgggtaggcaaaggaagaataggatcccatctgctcttgagaagggcaaggggaaggctacaaggcaaattaagtgtccagaatgtggtgtctttggacacaggaagggaagtgctagatgtgaactaactggcaccaaaaagaggaagaggaacaagaaaacaacaacaaaggtgggaaggaagaaatcaaagggtgttagtgatgaacaagtaactacaccaagaacaagagcagttacagctagagaaggagctgcagaaacacaagtgcagccatcacaaacaagcagccctggaccagtcactaggaggaggttggcattggagcttgaccaaagctctcaagtagctccagctatagtggagccacccaagaagcttacacccagaaaaaagctcgcaagcaagaagaaaagtgcaacaccacctaaacttttggattga

SEQ ID NO: 48047 - DNA, 5926 bp, Oryza sativa
  Clone ID: PAT_MRT4530_5075C.1
ctaagaatttgctaattcgcgaccgtcgccgtctgcgattttgaatgcccctgaccgcaagacttgtgtgatcgtgtaaggtccttcccattttggtgagagtttgtttcgccctgcttgggtttgaactcgtcggaggacatagtcgccgatcgaaagtatgcgtgctcggatgcgcttctcatgataacggcggagggactgttgataactggctgctcggacgacaactcgctcacgatgcttctcgagaagatttacatcgttgtctcggtgttcctcctggttctcgtcggaatacttctgtactcgtgtactctgatgtcgtagctcgccggggagcatggcctcggagccgtacacgaggaagaagggtgtttccttattggacgttgtcggtgtggtgcgtacggcccatagtactgatgggagttcttcaacccactttttgtcttgtgacatgagcctgtcgtagacgctggttttcatcccttgtagtactatgtcgtttgctctttcgacttgtccattgctttgagggtgagagaccgaggcgaaacatattttgactcccaacccgatgcagtaatcttggaagtcagcgctgatgaattgggagccgttgtcggttatgatgcggtgcggtagtccgtatctgcagaatatccctgtgatgaatttgatggcgttgtcggccttgatttcccccatgggcactgcttctatccatttggtgaatttgtcgatcgccacaaataggaatctgtagccaccctgtcctcgtgggaatggcccaagtatatctagcccccagcacgagaacggccaagtcagagggatagtctggagcgcttgcgcgggtagctttgtgtgtttactctggaattgacaggcttcacatcgctggaccatatcgcatgcatctttaagggcggttggccagaaaaagccttgtcgaaaagatttgccgaccaatgtccgactggcggcgtgtgacccatatatgccttcatgtatgtcgaggaggaggtgtctgccgtcgtcggtagagacgcatttgagaagtaccccgtttagagcttttttgtataaatcgttaccgaccatacagtagatctttgctttacgggttattttctcggcctctgtatcgtcctctggcaactcctcactgctgatgaatttgattaatgggatgtgccagtcgtctgtggtttcgatatcagcaacggcgcgttctgcctcggtgacctccgagctgatgtcgggggtgttcgggctaacttcgccgctaacttctttcaccgatggcttcgtcaagatatcgagaaaggtgctgggttcgagcggttctcgtctggacgggcatcgtgctaggtcgtctggctcgacgttgtccttgcgatagacgtgtcggacctcgatcccatcgaatctcttctctaacttcctgacttctgcgagatacttggataactcgggggttagagcatttatagtctttgtgcactggttcgcgactagctcggagtcccctttgacgattagtcgcttggccccaagtgcggctacagctcgtatcccggcgagtagtccttcgtattctgcagtgttattggtcgccctgaagttgaggtggattgcgtgcttgaattgatctccggagggagacgtcaagataaatcctgcccctgctccttggctgttgagtgcgccatcgaacgccattgtccatgtttcgttgtcaccttggttgtctgatttgttgtctggcatagtccaatcggcaacgaagtcggcgagtactacccatttcgcaatgcggccgacaacgtctttgtttctcacaacttctccaagggggaaggaggatacaactgtgactctgtgagcttgaaagtagtggcgcagcttccttgatgtcatgatgactgtgtaaagcagtttttggatctgtgggtatcttgtctttgcgtcatggagagcttcgctgacgtaataaactggtcgctgtactttctctctctcgacaacaatgacagtgctaacggaatatggcgtggcggcaatatagaggaataattcttcattaagttggggagcagcaagtacaggggggtttgataggtagcgcttgagtgcaataaatgcctcttcggcttccagtgtccatataaatttgtcttgtttcttcaatagagcgaagaaaggttgtcctcgttctcccatcctagcgacgaatctgcttagtgctgccatgcatccggttagcttttgtacctccttgagtctcgtgggcgacttcatgttctcgattgctttggtcttctcaggatttgcctctattcttctgccagagacaaggaatccgagtagcttgcccgacggtactccgaacgtgcacttctcaggattgagcatgaggcgatatcgtcggaggttgttgaacgtttcccgcagatcgttaatcaatgagtcgcttgtcttggttttgacaacgatgtcgtcaacgtaagcctcgacattgttgccaagctggttgctaagtgcgccctggaccgtgcgctggaaagtattcccggcggttattagtccgaacgacatcttaacatagcaaaataccccgaacggcgtgatgaatgctgtcttctcttcgtcctcttttgccatgctgatttggtggtagccagagtaagcgtcgaggaagctcaatagctcgcaactggctgttgaatccaccaattgatctattcgagggagaggaaagtgatccttgggacacgccttgttgaggtcggtgaagtcgacacacattctccattttccgttggccttccgcaccatgactggattggctagccactctgcataaagtacttctctgatgaagccagctttgagaagtttgtcgagctcttctcgtatggcttgtttccggtctggtgcaaatctccgcattctttgctttactggcttggcatcgggtcgcaccattagtttgtgctcaatcacctccctggggacccccggcatgtcggacggtttctttggtggctcagtcgtggcgggtgggctgggcgtttgctcgactatgtcgaggctccgcttgtcgcactgcaccgccagctttgcgttccgctgaatagtgattgttcccttcggtcccggcatcttgagcacttgatatgcgtagtgagatgcagccatgaacttcgtaagtgcagttctcccgatgatggcgttgtaagttgtatcgaattcagcgacatcgaaggtgatctgctctgttcggaagttgttggcctggccgaaagtcacatgcaacgtaatcttgcccaaaggtctggatgatgattggggagtaattccatggaagggttgatcagttggtgtcaactcactttgcggaattcccattgcgtctagagtacacttcatcttgggtgcagccccccgccatgtcgaacagacttcacgttccactttcttgtattctcgcttgaaggagtacgttgtggagccgccgaaaatgtgtgagacgtggaggtcggagtctgaatacgcagaatccgattcatgaggagccgtctcttcgttcttctcgacaacgcgtactcgcttgcctttttcaaatgccatgtgcttctcgagcgattttttgaaaacaaggcaatcttctagagaatgtccgtccgtcttgtgtatggggcaccaagatttctttgtgtcgctgccttgtgggtctaggcgcttgggagggttcgcgcattctgctgcgaggacttccgcttgagctttccttttcccatttttgcgatttttcttcttgcttgactcagatgcgtctgtggctgatttcttctctcccccggtctttggcttgtcgttcttgcgtcttagcgcatcgtccatatgggcgcatcgctcaacgatctcgaataacctccgagtggttgtgatgcgtcttgtcgccaattcctgggtagtataacgatctctgacaccggatttgaaggcgcggattacagaagcgtcggtgatttcagggattgtgtttgttccttggaaattggcgacgaattgttgccacaggtctgcccacgaagagattgagtagggaggaagatgcatcagccatgaacgtgcagaacccttcaacgcagttggtaaatagtttgctagcgcgttgtcgtctgctccggcagcatagagtactgtggagtagacttgaaggaattcttctaggtcggtgctcccatcatacttttcaattgctccgggtcggaatctctcaggccatcggacatcacgtagggaacgaccgaaagccctacacccagcgttgggggcggtgggttgtcggcggtcgtgtgtccttcgtggatgtctgtctgacgatgaggaggacgcagatgatgatgatgacgatgggtcgcttggttccgacgcatgattacgaggatgacagcctggatctcgagaatcctgtcgttgtctctcgctgttgtctcggcaccgatctccattatcgtcgtcgttacggcggcggccatgaccagcattgtctggcccccgtcgttcgcgatcgttgcgatcgtggtggttgtcgtgatcctggtcctcgtttgagcggtctcctcgatttccgttatcatggcgccgtgaagagacatgacgccgagagtgatttacattgtctcgtatgcgtcgtgcttctcggcggccgttgatttgatctcggagatcgccagcgccgcgaggtggaggagtggctcgttgaggtgattccctccgttccggatcttcaccattggcgtcgccagttggcggctgatcttggtgcgctgcggtagcggcttcttcaaacgcgttactgaggttggtcaccgattcccgtagtcgttctgtccaacgctcgaggtcatcgttcagaacgggatcgtaaggagtttccctcagtatagcttgaacggccctgatgtgttgggctggagtagtcgattgattcgccgcttctgcgttggcttgcattgacgtgccaacgtcatcgatagccaatacctcccgcggcacgctcgttgtcgatgacccatagtgttgaattccacgttctttgtaggcgcgaatttcagcacggacgttgaggaaaacccaacaatcttgcagggtgtgtttcttggtgtggtggataggacaccaagaccttgtggcttcggaagtcatctttgccggctcgtggttcatgtcggaaggacaaggtttggccatatcagaatccttcccgagcttggatgtcgtcgatgatctgttttccgtttcgacgggtggatttttcgacatggagtcgccttggtttgtagccactgcgttctcgtttccggtcattggaggaccggttgagatcggcgtcgtggtgtaaaccgggaagacgatttcgccgacttgagtccataccagcattgttgaagcagggaacgcttggctgaggctggtgttgacgttgttgtcgacgaagctggatgacatagtagtagaaccttgagtaccaagtgcccctacctggcgcgccactgtcgacagatgatacccgtagaccggatatagagggtattggggtacactgatacccacgagatcgtagtcgagttgattcgactagatcacccggcgacttggctcctgtaggctccggcttcgtaggctgtggtcgttgtgttggctataagattcgatgccttaggtcctcccaggggtcccttttatatcgcagatcaggtggtctccaagtaggacttggagacatcggaccctgcatgatatagtgatgacccagtcctatacgggtaggaacctttccattagtggacttcgtgatggatttccttagcgtatatagagaacgtccgtacgcgcgcagatgtaccat

SEQ ID NO: 48048 - DNA, 456 bp, Oryza sativa
  unsure (1)..(456): unsure at all n locations
  Clone ID: PAT_MRT4530_50760C.1
aaaagaaaagtgggtagccaaagaaagaataggatcccatctgctcttgagagggcaaagggaaaggctcaaagccaaattaagtgtccagaatgtggtgtctttggcccaaggaaggaaagtgctagatgtgaactaactggcaccaaaaagaggaagaggaacaagaaancaccancaaaggtgggaaggaagaaatcaaagggtgttagtgatgaacaagtaactacaccaagaacaagagcagttacagctagagaaggagctgcagaaacacaagtgcagccatcacaaacaagcagccctggaccagtcactaggaggaggttggcattggagcttgaccaaagctctcaagtagctccagctatagtggagccacccaagaagcttacacccagaaaaaagctcgcaagcaagaagaaaagtgcaacaccacctaaacttttggattga

SEQ ID NO: 48049 - DNA, 405 bp, Oryza sativa
  Clone ID: PAT_MRT4530_50761C.1
aaattataaaaaaaaaagggacctgaaattccctccaaaacagaggccctttcataaaaaaaaaaactataacagccctaagggggaaaagccttctctagcgtaacccggaaggatagcccgacaaaaataaagaaaaaacgtgggatcttgccaaaatgggatcaaatggagttacaattatgctattaaaggaatttacccacccatatttgatgaaggaaaataaagttagttgctgtaaaaccccttggtggaaggggccctgcaaaacttattagaaaggctattccctttctccagcttggaagtttaaggattttggtcaccaaaaagctggccacaaaaaaactcacccagagcctgatctatattttctggggagatcctgaactacctatttgg

SEQ ID NO: 48050 - DNA, 597 bp, Oryza sativa
  Clone ID: PAT_MRT4530_50762C.1
atggtgggttgtgagcacatggttttgaaggtcgtgctcatgacaattaaggaccagttcgcgagccactgtttttgtgtacctcggctaattcctggacgagggttttatgcacaaataagttcggaaattactagtgaatttccgggtgtgacatccaagaaaagaaaagtgggtaggcaaagaaagaataggatgccatctgctcttgagaagggcaaggggaaggctacaaggcaaattaagtgcccagaatgtggtgtctttggacactggaagggaagtgctagatgtgaactaactggcacaaaaagaggaagaggaacaagaaaacaacaacaaaggtgggaaggaagaaatcaaagggtgttagtgatgaacaagaggttggcattggagcttgaccaaagctctcaagtgcagccatcacaaacaagcagcagccctggaccagtcacaaggaggaggttcgcattggagcttgaccaaagctctcaagtagctccagctatagtggagccacccaagaagcttacacccagaaagaagctcgcaagcaagaagaaaagtgcaacaccacctagacttttggattga

SEQ ID NO: 48051 - DNA, 390 bp, Oryza sativa
  Clone ID: PAT_MRT4530_50763C.1
cccgggaatagttaaagggaaattcccattcataacagctcccagtaaaaagatccgaaaaaaacccaaaggcaactggggctaaaaacagtaagacaatgggggctttggttaaatcaatataggccatattgaataagaatggcatatgcggatttaaggcagggttacccggaatgggtaaccttataaaattcaatagggaaaatgccaatgttaacctacacaggaggcctaattgggatcaacaaagggccttccaagaaaggacctttcaactcagggctactgaaaagggaaaagttgtaaagggcacaaatcctaatctaagacttgcccttatcatggagggcacgtttgttgggccaggggacacttttataaccctta

SEQ ID NO: 48052 - DNA, 306 bp, Oryza sativa
  Clone ID: PAT_MRT4530_50764C.1
atggactctcatacaggtgacagtgatacaacttcatcttcatcttctctcaccctcttctccatctctgtccaagactctagcaaggcggcggcctctgtccaggactccaagtatccagcggggcggtgcccggtggtcggcggtgaggagctaggcgacgaccgcgatgtcaccaaactcgattgccgcgaggaggtaggtatagggaccttcgttcccgtctcgccaccgcggctgtgctcgggagagatgggaaagaggatgtgcccatgggtgctcactgagggtgcgcagaagcagtag

SEQ ID NO: 48053 - DNA, 1779 bp, Oryza sativa
  Clone ID: PAT_MRT4530_50765C.1
atgaagccctcggagtgtcctccttggattgatcctggcaatgctgttagagttgttgttaaatgtgcttcatatgtagcaaacttagagtatggactgctatcaatgtcagagcaagagcatgattggtgggttgataaatgcaaaggttatagtttagataaattctgtgatgatatgactagcaaggtaatatggggccctagccaggaaattgtagtgtggggattagactttgatagtgggactgaatggaaggtaaccaacaatgaacagtttgagaagtggtttcagtctgggtggaaagagaaagtggtatatcttggggtagaagtggttactaaaaagggatacaaaactgctgaaagctatgtagatcgagttgagtcaacaactcaagttgtcactagtgttttaagtgtagatcttgatgttccatcaattgctgaaggtggtgtgataagtgcaaaaccaactggtcagtcaattgctagatgtggtgtgataaattcagattcaattgatatttgctctccagttcaaatgaccaatgaagaagatactggtgacacttgtaaccatgcaccaaatgtagaagactcagctgctcttgtggactggagtaagttggcaatcattttggatggcttagatggtgatgctcatgcattgttggatgaggatgaactatttgatgcaatgggtttcaaaaatacagatgagagagcagcagcaacagcaatacaagaagaagctgcactccctgttattccaattgagattcaacaagatatgatagatgcagtcattgtagttagtgatgaggtacctgctgacccagaacttgtttgggatagggatgatccaccaatggaagtagggacaaagtatccatcaatgaatgagttcagaatggcagtgaaacagcatgcaattgttagtgagtttgagcttgagactgaaaaatctgatccagatagatttcgaggaaagtgttctgcaaatggttgcccatggaaaatcagagcaaagacgcaggctgataaaagtgtcaggatccaaataaatgaggaggatcatcactgtgcttcaagaagcagggttcttgggaagatggcatctcaagcttgggtggctgaaagggctattccatttttgaagaagaagaaagacatgggtgcaaaggaacttcaaggtaagctacaggagacatacaagaccaccataggctatcagacaacgtggtatggtttgcagagggctaaagataagttatttggaaagtttgatgattcatttgattggttgtataggttcaaggctgagatagaaatgagatcccctggtagtgtagttgagattgacatagttagagttggagataaggttcactttaacagattcttttgtgctttcaaagcttgcatagatggattcttagagggctgtaggccatacattagtatagattctactgctctcaatggaatgtggaatggacacatgcctgcagccaatgcaatagatgggcataattggatgtttccattggcttttggtctttttgattcagagaccaaagataattgggtttggttcatggagcaattaggtaatgcaatagggccagtagagaatttagttgtgcatactgatgcttgcaaaggcctagaaactgctgtaaaaaaagttttcccatgggctgaacaaagagagtgctttaggcacttgatggagaatatgaataaattgtttcatgggaacatatctaccctataa

SEQ ID NO: 48054 - DNA, 503 bp, Oryza sativa
  Clone ID: PAT_MRT4530_50766C.1
acgccccgacccctccgtcctcggcgagctcgtgtacagcatccccggcgccaagaacgtcctcgagatgaagtgcgatgggttcgtgctcggtctcgccatcaaccactgcatgttcaacggcgtcggcgtcatgcagttcgtcaactcggggtgtgccgctctccgtcccgccggcgctcgaccgcgccctgctccgcgcgcgcgaccccccgcaggtcgcgttcctgcaccacgagttcacgcagatcgacgacggtgatgacggcggctcgccggcgcagaacggcgccgagccgttcctgcacaggtcgttccggttcacgtccgagtcaatcgcccacgtcaaggcgctcgtctcggtcgactgcggcggcggcgggcgcgcgcccacggcgttcgaggcgctggggatggggcatgcgtggcggagcaagctcctcttcgccgtggacgggcggccgcagttcacgtcgcctcctctaccgttgttttatctcagt

SEQ ID NO: 48055 - DNA, 1083 bp, Oryza sativa
  Clone ID: PAT_MRT4530_50767C.1
atggccgccgtcacgctcctcgcgctcggcaacggcgcgctcgacgtcacgggcgaacgatgcaggagggacggcgaacggcgcggcgatgagcgcgacagccccgacgacgaacgcggagatgaacgggcatcgacggccggcgacagacgacaaggcggcgacactggagaagggaggaggccggcggggcgacgaaggagaggagaaggtccggcggctggctcgcggccgctcgctcgcccgccaccgccgctctgctccaccgaccgcgcgcttgcctgccgccgacccgccgtcggcgcttcgctccgccggccgctcacccgctgcacgtgcgtgcccgctgccgcttcacttcactctgcgcctgacactcaccgacgccccgacccctccgtcctcggcgagctcgtgtacagcatccccggcgccaagaacgtcctcgagatgcccctcctcgcagctcaggcactttctgttgttgcgttgcatacagttggctgtgttagaatctggcagcagccgttaaactgttcacgttcgacaaaaggttcagagattgtgagagtgagagtgagagttcgtgactcaagtgcgatgggttcgtgctcggtctcgccatcaaccactgcatgttcaacggcgtcggcgtcatgcagttcgtcaactcggggtgtgccgctctccgtcccgccggcgctcgaccgcgccctgctccgcgcgcgcgaccccccgcaggtcgcgttcctgcaccacgagttcacgcagatcgacgacggtgatgacggcggctcgccggcgcagaacggcgccgagccgttcctgcacaggtcgttccggttcacgtccgagtcaatcgcccacgtcaaggcgctcgtctcggtcgacggcggcggcggcgggcgcgcgcccacggcgttcgaggcgctggggatggggcatgcgtggcggagcaagctcctcttcgccgtggacgggcggccgcagttcacgtcgcctcctccggcaaggagacgccgggcccagccccgcgctcgcgggcgctgccctccggccggcctgcccagaggagaaaagtga

SEQ ID NO: 48056 - DNA, 2328 bp, Oryza sativa
  Clone ID: PAT_MRT4530_50768C.1
atggcggcggcggctttagggctcccggcctgcggcggtgcggctccacggcggatcgagccggcggcggtggctcccagcggaggcggcagcggtgtcggcgcagctccaccgcggatcgaggtggcggcggcggcagcttcggcttcgcgttcctcttctatgcagttccttctttcggcggcggatggaggcaccggcgggcggcggctacctgcttggtggccaaccggcgaggtgctccggaggacactccaccggcagcaacggcgagggtttcggaggacacccggccacatcgccaccttcttccagctgggtttctctaactctgaggaaatgcggacacccaacgcattttttggacttggcactaacagtggtgaagatattgagatgggtgatggtgatagtgactctgaacaagttggtcctgtagatgagcatgtgaatccagtaatacaagctttaacaaggaaattcagatctgaggcttggaaagagtttgtgccgatactcattgataatgaagttggtgcaggaaaatgtaagcactgtgatacagagatccgtgcaaagcgtggagcgggaacaagttcattgaggaagcatttgacaagatgcaagaagcgaattagtgctcttaagattgtgggaaatcttgactctacacttatgtctcctaatagtgtaaggttaaagaattggagctttgatcctgaagtttctagaaaagagctcatgcgaatgattgtattacatgagttgcccttccagtttgtggagtatgatggatttagaagttttgctgctagtcttaacccctacttcaagattatttcgagaacaactataaggaatgattgcatcgctgcttttaaagagcaaaagttagcaatgaaggacatgttcaagggtgcaaattgtaggttctcattgactgcagatatgtggacttcgaaccaaacaatgggatacatgtgtgtgacatgtcatttcattgacacagattggagagtacagaagaggattataaagttctttggagtaaagacacctcatactggagtgcagatgttcaatgctatgctcagctgcattcaagattggaatatcgcagacaaaatattcagtgttactttggattatgcttcagccaatgattcaatggctaagttgttaaagtgcaatttgaaagctaagaaaactataccagcaggagggaagctacttcacaaccgatgtgcaacacatgtcatcaatctcatagccaaagatgggttgaaggttattgattctattgtttgcaacatccgtgaaagtgtgaagtacagggataattccctatctcgcaaagaaaagtttgaggagatcattgcccaagaagggatcacatgcgagttgcatcccactgtggatgtatgtactcgttggaactccacatatctaatgctcaatgcagccttccctttcatgagggcttatgcttcattggctgttcaagacaaaaattacaaatatgcaccctctcctgatcagtgggaaagatcaaccatagtctctggaattttgaaggtgctttatgatgcaactatggtggtgtctggatctttatatccaacatcaaacctttatttccatgagatgtggaaaatcaaattggtcttggacaaggaacactctaacaatgacactgaagtggcaagtatggttcaaaagatgaaggacaaatttgacaagtattggcttaagtcttacaaatatctgtgcattcctgtcatttttgacccaagattcaaattcaattttgtggaatttcggcttgggcaagcctttggtgaaaatgctaaagagaggattgacaaagttaagaagagaatgaacatgttgtttaaggagtactctgataaactcaaggatagcaatgctaacccactgcgccaagctgaacatgtgatggctatctctgaaaatgatcctatggctgattgggaatttgggaacaaatttgacattctaaattggtggaagaccaatcactcaaagtatccaactctcgcttgcatagcacaggatgtgctagcatggcctgcttcaacagttgcatctgagtccgcattcagcacaggatctagagtgatcagcgatttcagatgtagccttacaatggattcagttgaggcgcttatctgcctccaagattggtttcgagcttctgccggtcctaacataaatgtgagctcagtaaatgaaatcaactacagtgataattttgtgaacctggacctggaggattccatggatggacaggatggtggaagcttgtga

SEQ ID NO: 48057 - DNA, 605 bp, Oryza sativa
  Clone ID: PAT_MRT4530_50769C.1
ccggccggggaggccagttctatttcaagtccctgttgaaaatttccatcctcacttaaaagttggagtgcttttgcagttccatatgttgggttctggttgttgtaatattctcttctgtgactgcaatgcatcgttctttgaagtcttccttcactcctttgcatttggagcaggatggtaggcttgaattgttatacatttttgtgaactataaaagcatgccattcaatttataccagtgatagctggtatatctctgttaagataaactacgattcttgatgctgtttctccatgttccgcgtgtaaattcttgattcttctaatgatcttctccatgttctgtgcaaagtcattgccgcatctcttacaggaactaggaggataaaagttctactgcgcatcaaatacattgatcaatatttatcctcatttgttaccgtttactcatgctattgctatggcattcaagtattcaacctgaatacgaagcctgtgcatcatcaggtaactaaagagactgatcaaagtaacatgtctgagtaacatcagcagatcagcccaacaacccatgtcaggttcgttcaattgatatatcttca

SEQ ID NO: 48058 - DNA, 579 bp, Oryza sativa
  Clone ID: PAT_MRT4530_5076C.1
atgaccaagcctcagctagcttgcttacgtagaagtgcatacgtcacgtcacgtcaatcgattccgactccgaggagccaattaatgggcgccggcgccggcgactggcccgtcttcgtcgacggaggaggctcatcgtacaaaacaagctggtccggcgccgccgccgtcatcgtctgcctctgcgccgtcgccgccgtcttcctgatcatggccggcatcacgcagctctgcaaacgcgtcttccctgcggcgccgcccgcgccgccgcctcaacgccggcgcgacgacgacgacgacgatggcattgtggtcgccgtcggcatcgacgaggcgacgctgcaggcgctgccgctggtgctgtacggcgaggcgaggacggcgcagacgagctgcgccgtctgcctggagagctacggcggcggcgacgtgctccgggcgctgccggagtgcggccacctgttccaccgggactgcatcttcacgtggctccggcgccgcccgacgtgcccggtctgccgggcgccgccatcgccggcgccgcccgccgacgttcttggtctgcagctctctgtttaa

SEQ ID NO: 48059 - DNA, 2067 bp, Oryza sativa
  Clone ID: PAT_MRT4530_50770C.1
atgcggacacccaacgcattttttggacttggcactaacagtggtgaagatattgagatgggtgatgatgatagtgactctgaacaagttggtcctgtagatgagcatgtgaatccagtaatacaagctttaacaaggaaattcagatatgaggcttggaaagagtttgtgccgatactcattgataatgaagttggtgcaggaaaatgtaagcactgtgatacagagatccgtgcaaagcgtggagcgggaacaagttcattgaggaagcatttgacaagatgcaagaagcgaattagtgctcttaagattgtggggaatcttgactttacacttatgtctcctaatagtgtaaggttaaagaattggagctttgatcctgaagtttctagaaaagagctcatgcgaatgattgtattacatgagttgcccttccagtttgtggagtatgatggatttagaagttttgctgctagtcttaacccctacttcaagattatttcgagaacaactataaggaatgattgcatcgctgcttttaaagagcaaaagttagcaatgaaggacatgttcaagggtgcaaattgtaggttctcattgactgcagatatgtggacttcgaaccaaacaatgggatacatgtgtgtgacatgtcatttcattgacacagattggagagtacagaagaggattataaagttctttggagtaaagacacctcatactggagtgcagatgttcaatgctatgctcagctgcattcaagattggaatatcgcagacaagatattcagtgttactttggataatgcttcagccaatgattcaatggctaagttgttaaagtgcaatttgaaagctaagaaaactataccagcaggagggaagctacttcacaaccgatgtgtagcacatgtcatcaatctcatagccaaagatgggttgaaggttattgattctattgtttgcaacatccgtgaaagtgtgaagtacatggataattccccatctcgcaaagaaaagtttgaggagatcattgcccaagaagggatcacatgtgagttgcatcccactgtggatgtatgtactcattggaactccacatatctaatgctcaatgcagccttccctttcatgagggcttatgcttcattggttgttcaagaaaaaaattacaaatatgcaccatctcctgatcagtgggaaagagcaaccatagtctctggaattttgaaggtgctttatgatgcaactatggtggtgtctggatctttatatccaacatcaaacctttatttccatgagatgtggaaaatcaaattggtcttggacaaggaacgctctaacaatgacactgaagtggcaagtatggttaaaaagatgaaggacaaatttgacaagtattggcttaagtcttacaaatatctgtgtattcctgtcatttttgacccaagattcaaattcaagtttgtggaatttcggcttgggcaagcctttggtgaaaatgctaaagagaggattgacaaagttaagaagagaatgaacatgttgtttaaggagtactctgataaactcaaggatagcaatgctaacccactgcgccaagctgaacatgtgatgtctatctctgaaaatgatcctatggctgattgggttcaacacatctctgaacaattaagtgagcaagttgatactgaattggatatctacctcaaagagaatcctattcaggaatttgggaacaaatttgacattctaaattggtggaagaccaatcgctcaaagtatccaactctcgcttgcatagcacaggatgtggtagcatggcctgcttcaacagttgcatctgagtccgcattcagcacaagatctagagtgatcagcgatttcagatgtagccttacaatggattcagttgaggcgcttatctgcctccaagattggtttcgagcttctgccggtcctaacataaatgtgagctcagtaaatgaaatcaactacagtgataattttgtgaacctggacctggaggattccatggatggacaggatggtggaagcttgtga

SEQ ID NO: 48060 - DNA, 115 bp, Oryza sativa
  Clone ID: PAT_MRT4530_50771C.1
cgtgtagtttcagagcccgcagacccgcagtgcgaggatttcgaggatcgagctcaagatctcgagcaaggcaagtctccagacgtggctgttctgcatgagctgggtgatccgg

SEQ ID NO: 48061 - DNA, 290 bp, Oryza sativa
  unsure (1)..(290): unsure at all n locations
  Clone ID: PAT_MRT4530_50772C.1
ggactcgtcntcgttgctcaaanatccagtttctagtaatgttcagttccatttgagtnnttcttgattntncagtagntgatgcttggatgggatgttcagctcgtcagcgcccgttgatttgatctttagacttctgcttaattgccggtgtgagtaatctggtatttncgccatgctttgaactnttacagtcattttaagtttgtctacaaatatgtatgtatcaaatgtataatgccacatttctattcattcagattgccgatatacctaaaaaaaaaaaaaaa

SEQ ID NO: 48062 - DNA, 170 bp, Oryza sativa
  Clone ID: PAT_MRT4530_50773C.1
tcgtctgggagtaaaccaccaacctcttattgtgggggacaaccatcaattacatgttgcagcatcaactgaatcagcagcacagttgtgatgctggagttgcggaaaatggtgtggaggcaggctacacaaaatggccaaagcactacgctaattacggtgcaaactat

SEQ ID NO: 48063 - DNA, 174 bp, Oryza sativa
  Clone ID: PAT_MRT4530_50774C.1
atggaggtggagaacccgtcgcttaagacgctgcagtgcgtggctcaagtccgtcccctggccgaaaaggaggagacgcgtcgcccaggcagaggtcgcatggcgtcgtggggagccggctctggcggaaaggctaacggcgagcggacggaggagggcggggcgacgggctag

SEQ ID NO: 48064 - DNA, 384 bp, Oryza sativa
  Clone ID: PAT_MRT4530_50775C.1
atggcgcaactggggtccgtgtgggcggtgcatggccggaggtgctgcaggcagagatatagcagacgcactaatttggaggaccggatgctatttaagcagtgttttgctccaacgaacgctatcgacgacaaatcacgcagcaaaaacgtacgacgttgcgtggtatatactagcatgatgaatcgcccattgacctggtcttggcacgacaagccgatgctgcgacgaaagtggaaagaatcatacatgtacaaacaggacaatcacatgcatgtaaaaaagagaacaattatacttccatccatcgagctggctctggctaaagctatagttagctcgccagtttcggcagtgcggatctggcgggaggagaggcagccg

SEQ ID NO: 48065 - DNA, 630 bp, Oryza sativa
  Clone ID: PAT_MRT4530_50776C.1
ttatacttgggccaccccgccggaagccacctctcccatgccagcctccaccaccaccgcaaccgccgttgctggatccagcggccgccaccagccgcctcctcgtccacgccagtctccaccaccaccgccgccgccaccacctcggcgcgtgtgtgccagcctctgcgtcgtacccaggtcggtcgtcacctcctgagtaggccgccatgtcctccgtcggccgccgccgccacctcgccgtggttttttctctaaaaccgacaccaggagaggagccaggccaaaggccaggccaggggggcccagcccaggtccctggttcggccgaaccctagtgatcaccgttgatcccaagtttttggcatggacgctccagatgcattcctgatggcgcctatcatttgcttagtgtccttggatgagccggaggaagatctgactatatacgttcccttggattcaatacccttggaatactccagaagtattcctgtcaaactcttctcgaccaaggagcaacttctttttgagttgtctgctcctcgaggcgaattctatgagccacctccttcatcggggtccatttacataactggctatgaaattcgccccgaactaattagtatg

SEQ ID NO: 48066 - DNA, 5328 bp, Oryza sativa
  Clone ID: PAT_MRT4530_50777C.1
ggcgaggcgaggagaggaggcgacggccgcgagcgcgaggcgaggcttccgactcgagcaaggagatcccactgctccaaccagatcaggtgatgggtggggaatctacaggaaacacgacctccattccccaatgggagaagccactgttcccctcagtatccatgttactctgagctactgagctctctgctaagttggtgcctcagctgtgtatcttgcagcaagagtgttctagccttctaggctgccaagatgaagtccaatgcggttacctccaaaggcaaggccgtgttcgagctgaagcacaggctggtccaggccatcaacaagattgcagacagggacacctaccagattggattggatgagcttgagaaggccgctgacaccttgcctcctgacatggttggtcccttcttgtcttgcgtggttgacaccgatgccgagcagaagagtgcggtgaggaaggagtgcatcaaggtgattggcacattggctcggtcccatggaagcctagtggcacctcacatgacgaagatggtgaccagcattgtcaagcgcctcaaggatgctgactctgttgtgagggacgcctgtgttgatacctgtggtaccctcgcattgtgtgctagaggctatggggatggtggcgctgcattggttgcgttggtgcggcccttgtttgaatcacttggtgagcagaataggtatgttcaggctggggcagcgtcttgcttggccaaggttattgacgagagcaattacttccctggccctgttctgccgcagatgcttgttcgtgttgttaaactgctcaagaatccccatttcatggcaaagcctgcagtgattgagttgatcagaagtattattcaggctgaaggtgcttctacagagcagtctttaacatctgctctaacaagtattatggatgccctgaagagtagtgattggactacaaggaaagcagcttcaatagctctatctagtattgctctcagttctggatatctggttgcctcctttagaacttcctgccttcgctcccttgaacgttctaaatttgacaaggtcaaaccagtgcgtgatgcaattacccaagccattcagttgtggaaggttattccagggtctgatactcccgagccatcagaagctggatcatccacaaaagaaaacttctttggtgaccatcatgatggtagaagtataaatgatggtggatcacgagacacttctttcaggagagttgatcctgcatcttctgtttctgcaatcagtggcaattctattacttcatcaaagaagagatctcctctgtctatcaataaaatagccctgaataatgctgcaaatcagcaacgctcgaagttgagcgattggcatgttgagatatctgttcctaagcagaatatgataccattagttgattttgaagaaaaggtgtctggcaatggttccatgctaaagggttcaaatagaagtccatatgaaatcgtagacaatgacagcaagtatgagtatgaccccatggatgataaacaagattgctcctctatgtcagaagtagccagcaggagttgtgagacaaagcatgtcacttctgctcaggaatgcgttgaggattgtgattctgcaagagacattgagcaattccccagggctcaaaagagtaagagcatagactccactgttacagatatcacttcacatgggacacatacttgctgtttgggtgcaatgaaagaactatctcatatcaggaagcagcttcaagagatggagaggaagcaagcaaatatctttgatatgttgcaggaattcatgtctaactcagtggagaacatgtcagtattaagcatgaaagtgcataatttggagaatgctgtagacaaaactgtgtatacaattactcaaagtgaaagccgctatcaccttcctggttccaagtttattaagaaccaaagtgccacttcttcaccgagggtttctacttctacacctagatcatctgtggatgctaactataagccaccaccaattcctcatttgaaacaagagaaaaagtggatgcaagatcaaccatcaaagggcttaaacatgggtgtaaaagagggggaatttctaaagagtcatactcatgacaaaactagaaagcctggggttgtgagatcggaaagtgctctgggaagatatgttccaagctcagcaaggactcgagcatcaggggttaagggaaactttccagtttcacttaccaattcctgtgagcagcctgagctgcaaaatgcattgcgtgcttctaaagaatttgatggtaatgatgacatggcgtctgcatatgtagaagccctgaacagtggtgactgtgattatctgattgacgtaatggatagaactggacctgttcttgagaaattgtcacgtgaaacaacaagtgaacttttgagggttatagctggccagtttctgaataaaaaaatgtttgatttggcattgccttggcttcaacaggtagcggatttgagcatgatttataagccaagtcaactttttgtgtctgtgagagcacagaaggagttccttgctttattggaggaagctgcaacaagtggatctacagagccagcaatcagaattgccattgcacagcttgcatttaaactgacaaaagtctgtgaggttgcaccatgcaggaaagttttgagtagagtgtgcagaggaaatgaaactatcatggccactgcgatgtgaaatacttcccctagcaatgtaccccctagtgtatgttcaaacttcaatgtcatgctgcagtgattgagtgcacccatttcattttgttgtagccctgtaatctgtgtgacaatgtatactcggtttgggtactatgtgcaagactagatgagttctgcaaattcatctatagtttgctagttaagcttggatcttctgttgctaggaaacggctgtttttagctgtgttgtgagatttggtctcataagtagtgatcattgagcttgtgaattcatgttttgtcatcttacaaaagggaattcatgctatgtcagcaatgcctgttactgaacttgctgttacctaagtggctaggtagaaaggccttttacatgtgtattcatttactaactatctactccagtatcagacttttacatgtgctccttaaagcgataaaaacaaaacaaagggggaagaacaaatcagtacaatatacactacaagtagaatacaataacgcattcttgccgtcttctctaaaaattaaccaatttgattactcttaacctcaaagccgtttctttttgtacaatggcacgaacgacttgacgggcagttttgcttcagataaacctcaatcaaagtcggcaatgattcggtgaagtgcatcaccatcaccaatcggagatgtcgctccgctgtgagttgcttaagtatccggccatccccctgttgctgatggtgcgctgcacgcagcggaggagcgactgcaccacctccgacatggacggccggaactctggatcagcctgaacgcagagagcgatacaatcggcgaagcgggagagcgcctttggtgggtagagaccgcgtagagctggatctgccagtgatcccaacgcatcgctgtcatggagctgtggagccacatacttgaccaagcactgctctgttcttggcttggagctatcataaggctttcggccggttagtagctccagcatgatgactccgaagctgtagacatcgctcttcatcacgtaagctgatggtcttgagcactctggagcactgtacccaggtcccaagttctcacttgcgtcctcatagaagaatgaaaggccgcaatccgagaggtgagggttgagatcagcatcaagcaagacatttgaagactttatgtttttgtggagcactggaggtgaacagacctcatgtaggtactccagagcatgggctgtacaggcagctatccgaactcgggtgtcccaggtcagaggcctgctgtagtcatctgacaagtgcaggaaatcatacagggatccattcatatggtaatcatagaccagcatgtagtgcccaggctctgagcagtaaccaacaagttcagagatatttgtatggcgcagcttggcaatgccgttgacggtgtccatgaagtcactgcttcctgagaagctcaatggatcaaacttcttgacagccagtacccgtccatcagcatattttgccctgaaaacgcaaccggttgtcccctgacctagttgtctgttactagagaagttgccagtagctgcttgtaggtctgatgatgaatgattcatcaagctgatggggtctgtgcttcgcctcgaatgattcagtttgttctcaaactcattgtcactcatcgacttgcgaggaacagcaggcggtgtcttacagcccatcgatggggaatgctccagtgacttcatgttgactgctgaagaattcctacggcctgactcatccgtgtagtaatgagatgagacgggagaggaatgattcctcctcagcacagacaagagaatcagagctgcaagaagcacagctatcaccattgctccaatggcgaaaccattgattccgctatcatcccttccatttgagcttcctgccgaagactccttctccatgccaggaggagctggcccagatgaccaagagttcccaccagtctctaaattgtcaatgctcttcagtttacttgggatccacccagtgaacttgttgttcttcacattcagatcctcaagagaaagtttggccagcacatttatatgaccactgaattggttgctctccacatctagtgttttgaggttcttgaggtattgaaaactcggaggcaggttacctgagaagctattgaatgacaaatccattgttgtaagctttggcagctgagaaaacatatctgtcaactgcccgctcaattgattcttaccaagatttaactgaaccacatttggtggaagctggtatgggatttcaccatttaaattgttcttgctgacatcgctgtaaatttggttactgatttcaagctcgatagctgataacctagcgtgccgcttaatccaagccccgacaagttgctgctcacacggatcaccgccgctcgctttccaacccaacaattcagacggtttgttcatgctctcaaacatcacgttcagagcagcaacgtcaggctggtcggtcttggccaccacggaggaggccgcgacggagaggaggaggaggagagcgaggccgaccaccagtggcggccaccggcgagccat

SEQ ID NO: 48067 - DNA, 511 bp, Oryza sativa
  Clone ID: PAT_MRT4530_50778C.1
ggcggcgcgcccctgccgaagctgaagtcgcggctgctcaagctgctcatgatcaccatgatgttcatgatcagcgagaggaccttctacgtcgcgaacgaccgtgcaagattattagtgattattcatgacaccatgcgtgacgcagtcgttacctttgttgtctgaagcgacgactacgaagccagcgacgaggcgcggtggttcaagtcggtggtgaaggagacgatgttgctgatcgtcgcggcgacggagtggatcttgctaccagcgtcgtcgccatggctggacgccgtaaggatgacgcggaggttgctggagctggtcatcagcaggacgaggttcttgcagatgctgatcaacgaccagatgatgtacatgaacgccgactactacgatcacgcgctcgtgaatcgccggaccatgatgggcgtgctcctctccctgctgaccaagaaccgcgactcgttctccgtgcagctgatgcgctccctctgcatcggctccctgc

SEQ ID NO: 48068 - DNA, 360 bp, Oryza sativa
  Clone ID: PAT_MRT4530_50779C.1
atggtgggttgtgagcatatgattttgaaggttgtgctcatgacaattaaggaccggttcgcgagctactgttgtgagacattaaccgtaccaaccacaaccagcgtgggcaacgactttaccttttgtatagcatggttcattacggggtgccagactgagaagcggcgagaagtccgtgggggtcgctggggagtccatgcctctggttatagagggggtgattatgatccagggggtattgtcacagcctctattcgggtactttccagtatcgcgatacatggtaaacatgatgttgaggctgtgtcttgtgggtacagtggtacacctctggccagagtaaaactattcgaatag

SEQ ID NO: 48069 - DNA, 669 bp, Oryza sativa
  unsure (1)..(669): unsure at all n locations
  Clone ID: PAT_MRT4530_5077C.1
agaagtcaagaacccatttttatgttttgttcctgctttttccattccgttggtcgtgtagacgctgcagcttcagaagatccgcttttcgtggaggttgaagccgacgtttgggaaagcgagcaaggcaagtcacatcatctccccctctattcaaaaccctcaaaatggttntaggctgggctcggggtgcatggttttgacagtagcacctcggccatatatggaccggtcttcgggcctctgttgcaaagcactaccgtacttccacatgtctagtaggtaaggcttagtttgtggcttagtctggttataaacaaaagtacacggatggagatggacgaagtcaggggtcgatggacatctctagggcaaatgaaggctacacgagctgcggcccggtagtcgagatgtcatggcacagggctggtgtcctgctgctaggggctcagtcctgcctacctgtcctggaggttccggccgtaggtggggttgggtcggtactcttgtctatggctgggatgggttggaaactatgtcatgtcttccgtccgtatgccgtggtgctaaaatgtgaaatggttggcctgggttggcttgggacgagctgggacctagggtcgggttaccagttcggtctgaatcatcgtaggccttgggttaaggcag

SEQ ID NO: 48070 - DNA, 701 bp, Oryza sativa
  Clone ID: PAT_MRT4530_50780C.1
ttcgaatagttttactctggccagagatgtaccactgtacccacaagacacagcctcaacatcatgtctaccatgcgtcgcgataccggaaagtacccgaatagaggctgtgacaataccccctgcacaacacaactcaccacagtgcaccattcctggatcataatctgcgtagaggacgacgacgcgatctcaacgatactcaccaacgcgacgaacgacggatgacggccggcggcgagcttgtgcggcggcggcggttcggtctacggcggcgacgggtctccggcgaccagcgacagcggggagagggcggccgaggttcctcacctccgtgcgcacctaacggcggcgaggggaagcggcggcgacgacggaatcgacggcgcggcgcggctgggcgtcggccggcgacggcggcggcttgagaggatttgagccggaaaatccgagggttagttggagagataaactcgaaaacgaattcgattccgcgttgatttcttcgggataaagtccgattgttgggggaaaggatagaggaggataaaggaaatatttcccctcaactaattttaggaaaacacaagagaaaaggtcggatttggaggggaaaaaccgagcccactcggtctcagttcggctgctagaggtagaagatgaacagtgtcgagggaggcaaattagactttttaggttgg

SEQ ID NO: 48071 - DNA, 1678 bp, Oryza sativa
  Clone ID: PAT_MRT4530_50781C.1
acctcccccacctcgccgtcgccggccgccgccgcctcccacctcacctcctcttcgccctctcccctcccaccccaccaccactccggcgagccatcgcggccctccgccaaaaaccctagggcaacagcgatcgccggtgcgcgggggcggcggagtcggagtcggagtcgggggccatggccatggacggcggcgcggcggcggtgctgcgcgaggcccaccgcctgacggggcacaccgaccgcgtgtggtccctcgcgtggaacccttcccccggcgccggcgccggccccgtcctcgcctcctgcggcggcgacaaggccgtccggatctggaagcgcgccgccgacggcgcatggcagtgctcggatgtgctggaggacacgcacaaccgcacggtgaggtcgtgcgcatggtcccccgacgggaagctgctggccaccgcgagcttcgactccaccaccgcgatatgggagtactccggcggcgacttcgagtgcgtcgccaccttggagggccatgagaatgaggtgaagagcgtgtcgtggagcgcgtccgggtcgctgctcgcgacgtgcagccgggacaagtcggtgtggatatgggagatgcagccaggaaacgaatacgagtgtgtctcggtgcagcaaggccacacacaagacgtgaagatggtgcagtggcaccctatccttgatgtcctggtttctgtcagctacgacaattcaatcagatgttcaagtgtaataatggctgatttcaaattttctgtggcgaaggtctgggctgatgacggtgatgatgagtggcactgtgtacagacattaactgaagctaataactgtggtcactcgtcaacagtatgggcattatcttttaaccagaaaggtgataggatggcctcttatggaatgtggggtttccccggcttcttgtcgattgtgaaattcctgcgttccaaacaggtcacccgaaaagttactaatgtcatacagctgttattcagtgatgaccatacattgaaaatatgggacacaagtgctgatttgtctcaaccaaaaactagtgacaaccaggaatcatggcgacatctttctactctcacgggatatcataaccggaccattttttcagcccattggtcaagcgaggatattatagccagtggcgcaggtgatgatgcaatctgcttatttgctgaggacaagagtagtatggttgagggaccttcatacagattaattttaaagaaagagaaggcacatgacatggatataaactgtgtccgctggtgtcctcaggacccgaggatgttggcatcagcaagtgatgatggcacagtgaaattgtgggagctgagggggaatgcactggattgaattttgttctgtttactgtattataattatagttctaggtttgtgaacgaaatgaggcgtctcctttgggtttttgttttgcttaacaatgctctgtagttgttaatacttctatcatgaacttgcgtggtgattgtcttttaacagattttccatgcaaagctatgagcatctgttatccagccataacatgaagaaattgcttgtgtatacattatggaacaacgcaagtgtgctcatatcatttacaaataagctattgccccaaaaaaaaaaaaaaaaaaaaaaaaaaagac

SEQ ID NO: 48072 - DNA, 596 bp, Oryza sativa
  Clone ID: PAT_MRT4530_50782C.1
tcagtacgcacatcttctgaagaatagcgagccagacgattgaactcatgaagagaagaaaggaaaattttcacaaattatgttttcggaagatttgtccttaaggtttgaccatttggcttatcctacagtcgagatggctctgataccaacttgtcacgcccggaaattcactagtaatttccgaacttatttgtgcataaaatcctcgtccaggaatcagccgaggtacacaaacactgtacccacaagacacagcctcaacatcatgtctaccatgcgtcgcgatactggaaagtacccgaatagaggctgtgacaataccctctgcataacacaactcaccacagtgcaccgttcctggatcataatcaccccctcaatatctagaggcatggactccccaacgacccccacggacttctcgccacttcacagtttggcgccccgcaataaaccatgctatacagaagataaagccgttgcccacgctggcttgtggttggcacgattaatgtctcacaacagtagctcgcgaaccggtccttaattgtcatgagcacgaccttcaaaaccatatgctcacaacccaccat

SEQ ID NO: 48073 - DNA, 2346 bp, Oryza sativa
  Clone ID: PAT_MRT4530_50783C.1
tttttttttttttttttttttttttttttttttttttttttttttaagtaaacctaaagcatgcggcattgtttatttcagaacggcaacctatgcttcagtttaagagtacatgagatcactcgcagtatataggagattctaagtcccaaccaaaattaacttctatcctttttttttccttactcttatccaccgatcatcaaactaacagaacgaaaacgaacaaatctccagtctttcagtccacgtctcagcagaccacgcactctgtttctcacctgcaaaattgttcaagtaagcaattctcaagggggggctgcctgctttccttccatcagttgctagcgctcgctgggaggtagtactggtagtagcctagcacggcaagcagggcgacgagcgcggcggccactgcagcagcagggccagcccaggaccagtacgactgggctttcttcctcctcaggatcgccttcggcagcggggccttgctcttggtcacgacgtttctgctgtaccggacactctccctctgttctctcatcaccggagcagaagcaggagcggagtcgtcctctgcttgtgcctccgctgctccatcagacctgttgtccgattcagtggacgcctcggtgtcagctgccccagccctcctcctggccctcatctcctctctcttgagtttcttctctgcctccttttgtgcacgggctgctgccttcgctgcttgcttctcggccagcttcttcttcctttccagggcaagtctattcttctccatctcctcctgtctcttgatctctttcaacttagctacatcaacctctttaggctttggcttctccttgggagactcggcctcatagtcatcatcagcatccagagaggatttagccttagatggcttagctattgctttcacgcgggactcatctttgggagaaacctctgcttggggagcaggcgcttccttggcttgttttgcaggcatttttgattggataggctcttgttctacaggtggtgctgctgcctctgtttcaataaatatgggtttctcatcaggattcctcatccggccatctcggctaagctgtcgactgttgagggaggagaggatccttttctcgtagtcctctctgaaggccttgctgttgcaccattctgccacgaatttgtcaacctgtgtcttgtagagctcttgcacttgtgcaagctcactcctagaagcaagatccctagctttgctcagaagttggcggttttgatggaatgatgcgttataggcatctcgtgcatgtctcaattggaccaatgattcatgtgccttgtcctttctggcattggcagcagttaaatcttcttgaagcgaacccatctccatgtcaatagcctttagctcatcctccaggaccttaattttagacctgactgcttgtcgctccttctttactccatcaatgccctccccgatgattttaacctgatcctgtatggcgtctctttcgaccactgtatcttggatttgagctcggttagcagaagtggagatgactttcggtctggtcttttcaagctctctaatctgtttgatcaaccgcttctcctcatccaagggtatgctctcatgagatatgcggtcgttcaatctcttgatcgatttctcaagctcttcaattgaagaacatatgcctgcaccctgtgcccggatagcattgttttcatcgcggaactttcctaaacggtttctaagaggttctatcgccttcaacttctcacttacggcttcgttgtattgcttgttctcagcagccaatggcttcagctctgagataataccgaagcgctcattcttcttggcttttatagcctcaaaaatttgagaacgagcttgaatcttcttctggaagtccttttctgcctgatcaatcttcattttcagcttagggtcctcaagtaagcggatcttgacaaagaagaagctatgtgttttcctagcttcaggccagtcctcctctgcatcctttgggggtgccaaatcagcgccatttgcggctccatttgctgtagctgtgctgttatctgaaccaaaaagaaccgcctcctcacgttccttggcagttgctttactttcattctcttggaaaaggttcacttctccatcagttactttaacctctgctggtgcagcctcagttccaacaacctccattcccatgtccctggccggcgccgccgccgaggcgagtggaagcttcgccgccgccgcgggatcggagggcgtgaaaccctaggcgaggagagagagatgcggccccgcgccccgggcctgcagcccgggga

SEQ ID NO: 48074 - DNA, 567 bp, Oryza sativa
  Clone ID: PAT_MRT4530_50784C.1
atggagacggaggaggacgaccatcgcctgcacccccgcacgcgcaccatcgccgacctgctcaaccagctcgaccagatccactccacctcggcgacaagaaccaccggcggcggcggcggcgtggcgcctgcctcggacgaggcgatcgaggcgctcaaggacgtcaccggcgacatcgatcagctaccggcggagtgcgcgatctgcctccacggtggcctggacgcggcggcggcgcccgcggggtggaaggagatgccgtgcgggcaccggttccacggcgggtgcctggagaagtggctgcgcgcgcacggcacctgccccatgtgccgccaccagatgccgaccactaccgcgccgccgccgcctgcagccgagcaggaggattatctggatggtgatgaggaggaggacgccggcgacgacgacgaggtggaggctggtgtggggccgctgccgttggagttgcgagtggtggtagcgcactcgagcggcggctatggaggagtggcggcgtcggcttcgactacgaggcggctccttgcatggagcacgacaatctaa

SEQ ID NO: 48075 - DNA, 255 bp, Oryza sativa
  Clone ID: PAT_MRT4530_50785C.1
atggcggcggcggccggagaaggaggagattctggtaaattcaggtttgtactaacagtacgtctctggggtatgaaagcgcagtccgtgaaaaacgtggctcgggggttgtgcggcaggcggcgcgatgacggtggcctaggggccctcagctgcgactcaagaggtggcgttgccggtggtggcgcggcttggctgcgcggcggcagggtggcaactcgccactacgtcgctggaatggtgtggtgcagctag

SEQ ID NO: 48076 - DNA, 2829 bp, Oryza sativa
  unsure (1)..(2829): unsure at all n locations
  Clone ID: PAT_MRT4530_50786C.1
atgcatctggcatcatggcaccaggccggtgttcatcctgggaggtgggaaaatgcagagttggagattcaggaagggagccttacactgcatgccatcaccaactacttgctcacgcagaaaccgcccgacgcaggaactgcatcttgcatgttacttatcgcgactcctcccggcaggtggcggcgcggcaaaaattgccggcagcgcttttcattccataagctgctggtcgggcgcgacgaccccagcccgtcccctgtccatgaccacagcgcgacagcgctgtcaccccgcttccgaattccgatagctactgagcgcgccgtcggggaggagggagccagctgcagcagtccgtgggcagatggattgataggggaacggatgcgtggtgaccgccgttatgctttacaaaaggggaagattggaataattttaaatgcagactggtttgttccattgtcccaatccaaatccagcagtgatgctgcaagacgtgctctagacttcatgcttggatggtttatggatcctctcattagaggagactacccactaagcatgagagaattggttggaaatcgcttgccagagttcagcaaagagcaatctggaatggtcaagggtgcattcgatttcattggactcaactactacacttcaagctatgctgataatgatcctccatcgcatggccataacaacagctataatactgatgcacatgctaagattactggtagtcgaaacgggattcccatagggcctcaggagaactatggcaatcctaccatctacatcactgaaaatggtgttgatgaagtcaataataagaccatgccgctcgaggaagccctgaaggatgataccaggatcgaatactatcacaagcaccttctcgccctgctaagtgctatgagggatggagcaaacgtgaaggggtactttgcatggtctctgcttgacaactttgagtgggcagagggctacacagttcggtttgggataaactttgtggattacgatgacggaatgaagagataccccaagaactcggcccgttggttcaagaagttcctccagaaatcaaacagagatggaaacaaaaggttggtagcaagtcacagatgccacgaattagaagcagtgaaaaagatacaggtcatggcggttgcaggtgcaatggtgatgtcaggtggcgtgctccttctcctcttggctttcacctgcgccgcctacaatgacgccggcgagctgccgccgatcagccggagaagcttccccaaggggttcatctttgggacgtcctcgtcgtcatatcagtttgagggtgccgcggcgaaggacaaaatcaccgacaagagcaacggggatggtgcttgcaatagctaccatctctacaaggaagatgtgcgcattatgaaggagatgggaatggatgcatacaggttttccatctcgtggtcaagaattcttccaaatggaagtctcagcggtggagtcaacagagaaggcatcaactactacaacaatttgatcaatgaactattatcaaaagaggtccaaccatttgctaccctattccattttgatacacctcaggcactggaagataaatataaaggatttcttagccctaatatcataaatgactataaggactatgctgaaatatgcttcaaagagtttggtgaccgggtgaaacattggatcaccttcaatgagccttggaacttctgctctatgggctatgcatctggcaccatggcaccaggccggtgttcatcctgggagaagggaaaatgcagagttggagattcaggaagggagccttacactgcatgccatcaccaactacttgctcatgcagaaactgttcggctttataaagagaaatatcagttcactgaagaagctatcaggcagtcgccgttcatccgtgataataatttaaatcgaagatctgcaaagtttatggatcctctcattagaggagactacccactaagcatgagagaattggttggaaatcgcttgccagagttcagcaaagagcaatctgaaatggtcaagggtgcattcgattttattggactcaactactacgcttcaagctatgctgataatgatcctccatcatatggccataacaacagctataatactgattcccatgctaagattactggtagtcgaaacgggattcccatagggcctcaggaaaactatggcaatcctaccatctacatcactgaaaatggtgttgatgaaatcaataataagaccatgcgactcaaggaggccctgaaggatgatatcaggattgaatactatcacaagcaccttctcgccctgctaagtgctatgagggatggagcaaatgtgaaggggtacttcgcatggtctctgcttgacaactttgagtggtcagagggctacacagttcggtttgggataaactttgtggattacgataacggaatgaagagataccccaagaactcagcccgttggttcaagaagttcctccggaaatgaaacagagatggaaacaaaaggttgaaaatagttgcgcacactccctttttctcattgaacatcaaaatagtatataagctttatgagttaagtgccataaatgaaattagttcgtaaataaatctcactctcctcttcttgcatgtttgcatctactatctcttaactatatgtacatagctaagcaaaggataaataccgtatgggcatgtatgtttgtatccannagggatgctctaatgaaagatggacatnnnaagtagttcttcgcaaaaaaaaaaaaaaaaa

SEQ ID NO: 48077 - DNA, 872 bp, Oryza sativa
  unsure (1)..(872): unsure at all n locations
  Clone ID: PAT_MRT4530_50787C.1
atctaatcttaatacaattatttcctactttattactcctaatgcaattatttcctcctttcacaaactctgttacaataattactcaaaatgaatttattttgagataaatgagagaaatcaaaaataaacttattatgggatggaaacagtgtactcccactgactactgatgggtgtgttgatagtgttttgtcagggtggtcaccactctgaaaaaccattatccccaccttgtccacaagtccaaacacatatcctgatatggtattaagcaagtccctatgtacgagaggctatatgttgggcaccgtttgtgttcatcagcccatcactcttttctgtctatgtaggtcatggcggttgcaggtgcaatggtgatgtcaggtggcgtgctccttctcctcttggctttcacctgcgccgcctacaatgacgccggcgagctgccgccgatcagccggagaagcttccccaaggggttcatctttgggacgtcctcgtcgtcatatcagtttgagggtgccgcggcgaagggtggcagaggaccaagcatctgggacaccttcacacatcagtatccagacaaaatcaccgacaagagcaacggggatggtgcttgcaatagctaccatctctacaaggaagatgtgcgcattatgaaggagatgggaatggatgcatacaggttttccatctcgtggtcaagaattcttccaaatggaagtctcagcggtggagtcaacagagaaggcatcaactactacaacaatttgatcaatgaactattatcaaaagaggtccaaccatttgctaccctattccattttgatacacctcaggcactgcangataaatataaggatttctta

SEQ ID NO: 48078 - DNA, 401 bp, Oryza sativa
  Clone ID: PAT_MRT4530_50788C.1
tcgttttcggcgggggtgcccactcacctactggccgggcggaccgcaccaggaggaatatttccacccccacactactagcgccggagcccctcccttcccctacatgctccatccgtttgaacttgccctctgaatactactgcaactaccagacagactcgccaactgaaacagctgacgatgccgaggaccagagcactcacactattacggatccttccgatcgccatacgcgatcaggccaatccgtaataacggctttgctacaaagcaaatcaaacgagcgcactgtagacgcaagggttatccgacttacactaaaaatgtaagatctatttgtcagcagcattgataagataccctatgacactagtgggcatcagcaccaaacagatgag

SEQ ID NO: 48079 - DNA, 234 bp, Oryza sativa
  unsure (1)..(234): unsure at all n locations
  Clone ID: PAT_MRT4530_50789C.1
gcgctctcaaagtaggatatattattcaatcttgatgaaagagggacacaagccatcatctatagtgatggngcctnttgacttttgagtggatgcttgttacccgtgtgttgaagtttgttngaggcaccatcactatagatgatggcttgtgtccttcttaactcaagacagaacaccccctggggctgaaagggcgcttgganaacctaacttcctagggctcctgcgctt

SEQ ID NO: 48080 - DNA, 255 bp, Oryza sativa
  unsure (1)..(255): unsure at all n locations
  Clone ID: PAT_MRT4530_5078C.1
ttttttttgtttggttttgcggattgagtgattcgcttttctcttcgttggtcgcgggaggttggattggagaggaggtccatttttagggcggtggcggcgcgatcgatccgggattgggagaggcatttctagggcggggggagcggcagcgggcgagacccaccaccaacgacctcgcgaccgcgcctgcgtcgccgcgcgcgcgtgtggaggaggaggaggaggaggatggcggggagcatgcatngccgc

SEQ ID NO: 48081 - DNA, 1444 bp, Oryza sativa
  Clone ID: PAT_MRT4530_50790C.1
atggcgccgccggagttgacggatgacgtcgtggaggagatcctgctccgcctcccgccggacgatccctcgtgctccgcccgcgcctccgccgtctgcaagccctggcgccgtctcctctccgaccccgtcttcctccgccgccaccgcgcgttccaccgccgacgagcacctccgttgctgggcttcatccaccacgtctccgacgaacccgcccgccgcgtccccagcttcgcgcagttcgtcccgaccaccgcgttccgccccgccgaactggagcacaagaattgttggccactcgactgccgccacggccgcgccctcttccagtccagcaacgtcgagctcaccatctgggaccccatgaccggcgacgtgcggcggcagcgcgagccctacggcaccctctgcacgttcgccaccgccgccgtgctctgcgccgtgcccggctgcgaccaccacgactgccacggaggccccttcgtcttggtcttcgtcggcaacgacgaggacgacgacggggaggagatcgcgtcggcatcctcttactcgtccgagaccgggacatggaccgccgcttccaccgtccaccatgacgattccctcgaactcgaaagcaagcccagcgtcctcgccggagacgcggtccacttcctcacctacttcggcaaagccatcctgcgctacgacctcaccaagctggaactctcggtgatcctcccgccggtggcgtacggggacggcgacgctctcctcatgacggcggaggacggcgagctggggctcgccctcttcgacggcgaggcctccatccacctctgggcgagggtggcgggtgcagggtgggtgcggcgcaatgtgatcgacctctacgctgttctccccttctttgatcctgtacactcgctgtccctggttggcttcgcggagggcaccgacatcatcttcctccacaccattcatggcgactacaggatggagctcaagtcactgcagatcagcaagctgtgggagaaggacagatgcttcaatatcttcccctacatgagcttcttcgttccaggtcgtgataggacaaattgccatcgccagcaattgcagcagtaaactagtagcaagagaatgtgtccaaattttgctaatctgttgggttcaattaagcgtcttgttgttggtatcctaggaggtcttgtttatttacttgaagctagtgatatggaaaactctggactgaaggtgatgcatcccatctttgctgatcttggccttagttcaagttggttgttttcactttatttcatgtcaatcttgctgtcaagctgtaataatttgcaaaactagcacaatgtcttcaggatgtcgaagaatgtaagacgttctggctgtttgctaaaactgatgggatatggttggttcataagtaatactaattcagcaacattac

SEQ ID NO: 48082 - DNA, 345 bp, Oryza sativa
  Clone ID: PAT_MRT4530_50791C.1
atgcctcctccccctgatgagtgcccacccggccaccccatgtatgagagcacaatcatcatggctcatggcaaagtcggcaacagcagaagcaccaacaataataacaagcaaaggcatcaatcagctggaggccacatccacagggacagggaggggcgggccggcacgcacagtggatgccccgagcactacgttgttgtacacgccgtgctggagccatatgcccctgtaggctgggggccggcgcagaggagggtgggcggcagtggcagctcgaacaggcaggcccagcgtcctcggctgcttgtcatgttttgctgggtgccacgaaagtactcctaa

SEQ ID NO: 48083 - DNA, 537 bp, Oryza sativa
  Clone ID: PAT_MRT4530_50792C.1
gtcgttgccgtcgtgctgatgcgaacaagatcaggcagagaatagcagcgacgattcgtcttgttgaagtcgtcggcggcgaggaatcaaggagctcccaaagcgaagacgaagccggcgactcataaagttgattccatcgcactcgtcgtcaggaaactcggcgtttacccctacctggcgcgccaactgtcgaaacatgaattcggcaataataaaacggggtagcgcacgagacctaaaagtggatggatgtggagacaaaggatttagacaggttcaggccctctcaatgagaggtaataccctactcctgtttggggatttgaatccaccgggtgtagtattgatctgacgatcatttacagcagtaacacgactatggcaccaacgacgggggaaagagaaaaacggcaatacagtctcatacagaatgcaacacatttgcttccaggaaaagaatgacaagaaaatggttgaccatcgccaacgggaaggaattgtaggcagaggagctgtagcaaattaacgcctttt

SEQ ID NO: 48084 - DNA, 400 bp, Oryza sativa
  Clone ID: PAT_MRT4530_50793C.1
ataattaattcacaacaccctattttattgatcagggtcaaaacctgcacaaaaatacacacttccgggacagatctcaccttttttccaaaacttgtacatccatccacgcgggccacacgaatacctacatttatacgggacacgtacgtacatttactggaccgggtacacacacgcacatttttctggaaagacccccattgtcgaaaacctaacttggttaactgaaggcgatgcgtcgccatggaaacacgggggcgggggcgctcacttgccggggacaaaattgggggcgtaggcccaggcgttgttgttgacggggtcggccagggggtcggcgaggtttttgagggggcccttgccggtgacgatggcctggacaaaaaaacccaacatg

SEQ ID NO: 48085 - DNA, 153 bp, Oryza sativa
  Clone ID: PAT_MRT4530_50794C.1
atggcacacggcggcggcgcccacgggacagggaggaggatcggctgtgtggctgggaggggcaatgcagctggttgcggtggtgcccccgtttgccgactcgccgccccggggatccccgtgtgcagcgggctgggcgaggcaagggactag

SEQ ID NO: 48086 - DNA, 498 bp, Oryza sativa
  Clone ID: PAT_MRT4530_50795C.1
aattgtctacttctgtatttaattagtgagtttggaatagtacatacttacatacttcacatttcttccgttgaagaagcaacaaaattaaagaaatgaactatgatggccccccagtcctgaagcctcattaaaaacctccaagcattgtactagaccgcagccccaactctgttttgggttgttcaacaaaatgcaagccactcaggggcaagatctgaagatccaatatctctatcatcgagataatcagcagacaagatctaaagatccaatatctctgtcatcgagataatcagcagaatgaatgcttgccactccgaggcagacagagctaaccgaaacactgaaattccatagtcaggttcagagatcagagacatggaatctttttccccgaaatatgcaaaacgtatcgaatcataaacacatatgcttactcctcgtcgtgatgaccaccaattcgacggcgcggcgagccggtggcggtggattccc

SEQ ID NO: 48087 - DNA, 241 bp, Oryza sativa
  Clone ID: PAT_MRT4530_50796C.1
tggtgtgtaaaatattgaaataaataatagtagcaaagtcacaaggattcaagatccacacgcacattttcacatactttacacaggctctttgcatgcttgcattacatctttccagttgaagttcaaaagcatgcaaggtacattgtcttctgttccacatgctagtcttacagtgaatcgtgaaacaccttatggtattgtgcatcagttcacactttatcacatgctcaatcattca

SEQ ID NO: 48088 - DNA, 1752 bp, Oryza sativa
  Clone ID: PAT_MRT4530_50797C.1
atgacgacccccgccgccgccgccgccgccgccgcctcctcctcctccgcctcctcgcccccgaaccctccaccgccgtcgctctctctgatgccttcccgcctccacgccctcctctgcatctacctgccccatccccgccccctcgcccgcctcctccactactccgccgccggcccgccgtcgcagcagcagcagctcccgccttcttcgtcgccgccgtcgccgtcgcacgcgtcggccgagctctggatcgccaaggcgctcgcgtccgcggcattgctccgcccgcggcacctcccggggttccgccgcatcgacccttccccgctcgccgccgccgccgcgctccgtctcgcgccgtgcgcctcctcggccctcgccgtcttcaccgcgctgcattgctcgccgctctccatcacgccgtccgcgcactcctgccagcagatcatcgtggtgctgtgcaggtccggccgccaggccgacgccctccagctgtttgaccaaatgacgacccactacgggtactctcccgacgcccgttttctctcgttcctggtcagttcctgcacatgtgcaaaccttctggatgcgtccgcgacattgctatcgaaggcatcggagtttggttgccgcgtagaagcatatgcgtataacaagctcatgagctcgttgattggccgtggacgggtgcatgatgttgtggcgttgtttgaacggtggattcaggacagggtatattctccagatgtttggagctttaatgttgtcatcaagggggtttgtcgggtggggcaagtccaaaaggcgctcgagctggtcgaaaggatgaatgaatttgggtgttcaccagatactgtcacacataacatccttgtggatggtctatgcaggactaatgaggtgagtagaggtcatgaggtgttgaggaggctccagagggacggtgtttgcatgcccaatgttgtgacattcacctcggtgatctcaggttactgtaaggctgggaagttggaggatgcaatggctgtatacaatgacatggttgcatctgggataatgcccaacacggttacatacaatgtgcttataaatggatatggcaaagttggcgacttgggttctgcggtggaagtgtatcagcaaatgacgcgacttcggtgccctcctgatgttgtgacatttagttctttgattgatggttattgtcggtgtgggcaacttgatgatgcattgaggatttggagtgatatggcccagcatcggattcaaccaaatgtgtacaccttttctatcataatacactcactttgtaagcagaacagatcagatgaagcaattggtcttttgaatgaactaaacttgagacctgacattgcaccacaagcattcatatataacccagtgatagatgtactgtgcaagtgtggcaaggtggatgaagcaaacttgattcgaaagggcatggaagaaaaaggatgtcgccctgacaagtatacatatactattctaataattggttactgcatgaagagtaggatttcagaggctatcatgtttttccatgaaatggtggaggctggttgttcccctgacagtattacagttaattgttttattagttgcctattaaaggctgggatgccaaatgaggtggatcatgtaatgcgtcttgcatcagggggtgcttcatctattcaggaagtcccttctcctgtgaggcaaagactagatatttcagtagctttgtag

SEQ ID NO: 48089 - DNA, 363 bp, Oryza sativa
  Clone ID: PAT_MRT4530_50798C.1
atggagcggggcgggccctgcgacggcctctgtcgcttccggattcacctaggcacgagaggggactgcccgttgcccgctggggacggggcaaagaacgagaaggtcagttcagagtcgtcgttccgcgaagatcaagaagagttttcccgaagttcacctaaacccaatccttccctgaaggtcaaagtcagtggatcagttcaggacaacaagctaccagctgagtcggagcaccacactctgagttacgccggtcctaggtcacttgatggaattttgagggacaccggtgaggccaggtcaacagctcagcttagagaagcagcatcagggacagttgcagttcagacgaaagattga

SEQ ID NO: 48090 - DNA, 282 bp, Oryza sativa
  Clone ID: PAT_MRT4530_50799C.1
tctgttatagggccgcgcgggcggctatcacggcgggttgacgtggcctatggttgtcgcgcctcatgggtcacgagctatgcctgctgtgctgcctcaccttccacagacgcgtaggatcatctatgctgacctggactgttcttgcgcgccaagaaacccaaaccaccgccgtgtgttgacgccacgaagaaatggccggcctccaccgacgtccgggccgggccggcggctgatagcgggtacttacgaagcgtcttctccgcgttggcaaaggtacat

SEQ ID NO: 48091 - DNA, 516 bp, Oryza sativa
  unsure (1)..(516): unsure at all n locations
  Clone ID: PAT_MRT4530_5079C.1
cccacncgtccgcatcctcccatcctccctctcactctcactctnctnctccccatcctcccatctncctctncctntccctcctccttggcagcggcgaggcatgacggcggcggcagangcgcggcgggccgnctccnntncntncctttacatccngngccggtngaggggaggcatggggacngtagcggcngcggacggcgggcgtaggcngcggcngcggacagcgcngcngtcncanctccccttgcatccgtcacaggctgaagggaggcatnatngcgacgggcgcaggctncgncgngccnanntncctttcccccanaggcttnnctttnaagatncagcagaagggncnaatnaggaattntntangccagnggnaatanaatncagngnacgaagggggaanccntgganttaaaaacttntnccctatttnttacnctnaanncaaaggnaagnaanatggggaaggaantncnnaggttgganaaggtaaagnacggcnta

SEQ ID NO: 48092 - DNA, 213 bp, Oryza sativa
  Clone ID: PAT_MRT4530_507C.1
atgaccatattttcaattcaaaaacttgtaagcttttttaggtctgtaacgcagcagaagctatggcaaaaacttatgaacacattatgcaaaaccgacaacaagagcaacaggaataatcatggcctatcagatatgctctgcactttctatgggaaccacggtattcctttccgattgcgggatcattgttcaaactttgcaacaggatga

SEQ ID NO: 48093 - DNA, 507 bp, Oryza sativa
  Clone ID: PAT_MRT4530_50800C.1
atggagccggcgcgacagctagacggcggcggcattgccatggagatagtcgaggaagaagacgccggcgccaccaggctggggcggctcagcctcagcctcgacctgaacggtggcggcggcggcgcgttccgccccagcacgctgctcgacgagtacgagcggctggccatcgaggcccagctcgaccgggccgtcctgcgccggagctactccgagccgagcccgtcccgtctcgccgtcgtcgcgccgcaggacaagcaggaagccccgccgggcgctgccggccgacgtgccaaggaggaggagaaaccgggagcgggacgtgcgccggcgcggaggtcctggctgctggaggcgttgaagcggctgctctgctggctcggcatcggcggcgcgtggggcggagggcgccgccggggcgaggagccggccgcgccgtgcccgccggcgccgccgccgaggatgcagcttctcgactacctgactactacctccactacctga

SEQ ID NO: 48094 - DNA, 527 bp, Oryza sativa
  Clone ID: PAT_MRT4530_50801C.1
gcgtccggcgcggcggctgcttccgtgatggcgtacgcggcggatgggagagcggcgcggctgatgcgataccgttagaagcgcaagaaccggcgggtggagaagacgatccggtacgcgtcgcgcatggcctactccgagacgcgcccccgcgtcaagggccgcttcgccaagcgcgccgactaccactatcgcctcgcgccagcgtcgtatttcatgctcgtcttcatcatttactgtgtcgtgtctaccttttatagtttagatatcgatctatctttattgtctgaaattatttcttttttttatatttttctcttttttttatatttttttgtgtttttaaaatatttttttttggagggggtgtgtggtgttttctttattttttttttatttttatttatttctgttttgttaatatttttaattttttttatttttttaatatttttttattttttttatatttttttgtttttttaattttttaatatttttctatattttctatttttttttatatt

SEQ ID NO: 48095 - DNA, 422 bp, Oryza sativa
  Clone ID: PAT_MRT4530_50802C.1
ccaatgccaagccctactacctctgctaccgctacgctcacctatacttcagcctttggtgctgcatctctaggaggggggcgtgaacagatgagcatagtagtgtcttttaaagacctaaactgataaaccgaggatttgaatcaactgcaactaccattcaacactgctcttaagaaacttaaccctcttattaactgctcttaacttaacgtattccattccctccctagaacagcctcaatcaacttcatgaggtgagtccttcgcaagaagtccacccaccatccaaagctctccaaattctaggccgttacaaaataccactatttgtactatctcatcatacgtacacccaacaggtaaaaacttctgtacaacaaactgctaatacacatgtgtgatcaaatatcactaaatta

SEQ ID NO: 48096 - DNA, 850 bp, Oryza sativa
  Clone ID: PAT_MRT4530_50803C.1
gaaaaaggatctcgctgacgtcagcaaggggcagccggcgccgacacgcgggccccacacgtcagcgggtcaaggagctcggtgcaccgtggaccgggacctcaaggacggtcctccggcggtccacgggatggacggcccagatcgggccaagccgatcgggcagctgaggggagtggtggcagggcacgggcacagccagggctggcccgaccgaccacagagggcggcggcgcgcagacggccggacaaccggcggcggcggcggcgcaacgcggcgctggcacgggaggcggccggcaaagaggaaaaggaggagggaggcggctcaccgagaggcgcggcgacggagggagcggccgcggagggaggcggcggcgctccttgggtcgacgacgcggagggacgcacggcggtggatggcgagggcgaggaggcagacgaggtgcaacacacgacgacgaagccgacaaaggtgacggcaagcggcgaccgcggctatggcggtgatgattgccggccggaaacggtggtttcggtggtggcgagggagagaaaaacggtggccgagcttgggcttgtggcgacgaagccggcggtggcgacggagcagtgctgcggcggttctagcgacgggaggcggcagccggcgctcacaaaggcaatggcggctcgggttggcagtggaggtggcagcccggtggtggattgggggagtgtagcggtggacgacgtgcggcgtggagtggtgatgccgacggcatgggttgcgcggcgcggcggtggcgctagcagcgacgaggtgcggctggaggcgacgaatgggtcggcggcctcgggtgcacggtga

SEQ ID NO: 48097 - DNA, 192 bp, Oryza sativa
  Clone ID: PAT_MRT4530_50804C.1
atggagaaatatataaaagggaagacgaacgtcagagagcttgagtcaagctcggctggtttagaggttggaaccgagtccgagcctgccattgttattgtgctcgcgagcttgtcgagccgagctcgaatagcctcggcaagcctcgggctttgctccgggttctggcccgttcaatttttcatggagtaa

SEQ ID NO: 48098 - DNA, 2085 bp, Oryza sativa
  Clone ID: PAT_MRT4530_50805C.1
attttcctatgggttataatttgattagcatgaaccttatatactggattggttcagctaaatgctatatataggtttgcttagccatgcttagaaacattagctaactaaaaggggttaaatataaattaaattacataattattttatgttattatttatggttatatttaatggtagctcacgatggttaatcgtgttatgataattaattggtaattaaaatatgattaatggtgggttgtgagcacatggttttgaaggtcgtgctcatggcaattaaggaccgcggcgagaagtccgtgggggtcgctggggagtccattgcctctggttttgagaggaagattatgatacaggaacggtgcactgtgcaaggggcgccggcgccgacaggcgagccccacacgtcagcgggtcaaggagctcggtgcaccgtggaccgggaccacaaggacggtccaccgccggtccacgggatggacggcctagatcggctcaagccgatcgggcggctgaggagagtggtggctgggcacgggcacagccagggctggcccgaccgaccacagagggcggcggcgcgcagacggccggacaaccggcggcggcggcggtgcaacgcggcgctgggacgggaggcggccggcgaagaggaaaaggaggagggaggcggctcaccgagaggcgcggcgacggagggagcggccgcggagggaggcggcggcgctccttgggtcgacgacgcggagggactcacggcggtggatggcgagggcgaggaggcagacgaggtgcagcacacgacgacgaagccgacaaaggtgacggcaagcggcgaccgcggctatggcggtgatgattgccggccggagacggtgaatggatgtggtggctcgggtgtgtggtgggaaggtggtttcggtggtggcgagggagagaaaaacggtggccgagcttgggcttgtggcgacgaagccggcggtggcgacggagcagtgctgcggcggttctagcgacgggaggcggcagccggcgctcacaaaggcaatggcggctcgggttggcagtggaggtggcagcccggtggtggattgggggagtgtagcggtggacgacgtgcggcgtggagtggtgatgccgacggcatgggttgcgcggcgcggcggtggcgctagcagcgacgaggtgcggctggaggcgacgaatgggtcggcggcctcggggggcgtcgggcccgagggtgatgtgttcgccctcctctttgtctccccgagggggttgggccgcttccgcctcggccccgagggctggggcgccccgaccccttgtggattttgcgccgcgtacagccatgtttccacgtcgcgcctgcttccggcggaagtggagactaggagcttagaatctcacccagggcccccggccgaactggcaaaggggggcctgcgcggtctcccggcaccgaagaccgcattcgtcgaggccacagcccgccgccggcaccacagagctgaccacgagccgctgatcggtgcaccgccagccgggaccagctacggtgcacaagctgtcgaggccaaagcctccaccgccggccgtaggggggtgggtgggtggggaaaactaggcccgccgccggacgccatcgtaacctccgccaccgtggcctccgccgctagccttcgccaccgctacctctgctgccagtcaccaccgcgtcttccgtgcgcgccgacctcctgcgccggctgccgccagccgccgagtcgccatacgccgccacctccgcctcacatcgtcaccgcacgggagcggctcgctctagccagatccggcgtggaggcgtcggatccacccacgaggaagccagatccggccgcggctgcgtcggatgcgctgcctccaccccacgtcatcggactctccttcgcgcgccggcccgccttccacgcacagagacggggcgccatcgagtcttggcctcgccgccgccatcccggctggccgcacggaactctggtagcacactctggtggcggcgaggggagagagaggaggagaaagtggcggtgggggcgctag

SEQ ID NO: 48099 - DNA, 213 bp, Oryza sativa
  Clone ID: PAT_MRT4530_50806C.1
atgcggaagcgcggtgaggctgaggccagcgtggcggttgtccaagcctccaacggcaagcaacaagaggccgcgacggcgtggaggaggcatggcgtgcacttctcggcgtccaacttcatccaggcgccgctctccgcgctgcctgagtactccgagatcctctacgcgaacctactaacgaattttagcagtgaaaaagatattttataa

SEQ ID NO: 48100 - DNA, 1753 bp, Oryza sativa
  Clone ID: PAT_MRT4530_50807C.1
atctttcctttttccggcgaagatcctaaactttcccgagtttttcccgtcgttgtgcgcttgatcccgagctcccgtgcctatataaaggaccccctagtcgtcttctacctatcccctcaagtcccgtccgccgtcgtcgccggaatcgctctccccgcgctcgccttctctctccacctccggccgccgctccagcagccccgcgccgtcgctatggtcgtcgccttcggtcgccgctgccgtcgttgggttcgcgaggaggagaagaagaccggcctccacttccccgtcgccgaagacctctggaagtacctcgccgacgtgaatccaagcttcgccgccgccggccgctggtccagccgcacctcgccgtcgcctcggccgtcgccctcctgtgccgccacctctctcggctctgcaaggtcaagagcaagctcggcagccagttcccttgcgtcgaagacctcgggaaggtcgccgtcgtgatcgccaagccgtcgccgacctcgtccacccctctgttgcctccgttcgtcgccggaaaatcgtcgccgccatgtcgttcaccggtgtagtttatccctagggtcttaatccaatctaacctaatccgatgtctgtctagcgtagttgtcgtctccgtgtgttgccaccgggtggccatcgtcatctctccctctccgatcattttggttcggtgagacttctattcgtgttccggtttagccgcagccgttgttgagtcgttcgctcgttcgttcgaacgaggtgttccccgtgcttcgttcgttcgtccgtgtggagtcgtcctttagtttagagttgttcagagccgccggttccattcgccggtttcggttgatcatttggatgatccttttatgtactgtttatttggtttttattagtctttctcctcgtttttgtatgttagcttgtcgtttccgtcgtttcgaaggttcgtaagtgcgtcggaagtgttccagaagacataataaacgatgctgtaattggtaacaacttgtttagctcctggtttggaatggtatattcctggtttggagatagaactgtgcagccgggattggttgttcagaatggttgggcctcggctgattcctggacgaggatttcatacacaaattagttcgaaaattactagtgaatttctgggcgtgacaggagcgctggctgagctgtgggggaggcgcgcttgcagggtgagaggactggcgaacgctcgcgtcgagcggaggtgtgaggtaagccggagcggcgacgaagcagaggcggcgggcgcgtgtcggcaaggtggtggcgaagcagcggtggtggcggcgtgcgagtgcgagccccgtagtatgagtggagcgtacgggacacgtcgcgaagacgagccgacgagcgcgcacgacccgccgagccgcggcgacgacagtcgcgcacgcggtgaccggagcgctgacagaggaagcagcagattgggtcctgcactgggctgctcggtgtccacgagagaggcaaatgaaacaccttccactggtctgagccaagaactctcgatgtgaggcggagaggtagtctcggcttggccgtacagcgtcccgtcaacttgaagacggccgaagcgcattgcttgattgaggtgagcgttgtggtaggcagacgccgcttgaatgcgcctcgcgtctccgcgagctcctccgctgcacccggatccagccaggatcttgcagtccatgcccatcat

SEQ ID NO: 48101 - DNA, 1584 bp, Oryza sativa
  Clone ID: PAT_MRT4530_50808C.1
atggttcttgagtacatcgtgtccaaggcgagtgaagagaacttcgtgacggtggttggagggtattggctcatgccgccacccagcagcaaagtgcgcaggctggccatccaaagtggtgattccaaacgtggcagtggcacagacagcatgaacctatctcatgtccgatcactgaccatgtttggaagcctgagccagctgccatccaattcattcaagttcggaattgttcaagtgcttgatctccaaggttgcaagggtttcaaacagcatcataccaaggagctatgcaacatgcttctaatcaagtatctaagcctccgaaggactgacattaataagcttcctaaaaagattgggaagctacagtatttagagatccttgacataagggagacaaatgtgacgaagctgcctagaagtgtctgccagcttgagcgagtggctaacatacttggtggcaacaaacgaacaaggaaggcattgaagctccctgctgaagatgtcaagaaaacaatcaagtcgccttggggaaaagaagcaaaggagtccggcggcaaaaaaacactgaagaccctgcgcattctgtcaggtattgagatagtcggagaatcgactgcagaaggagacttccaccacctgactgatctaagaaagctcgccatctacaagctcaacgtcagaagaggagataaaccttttgagaatctaatatcctccatcgagtacctctgtggctactctctgcacaccctcgtaatcgaggacgtctcatcggagtttctggaatcactaggtgatctttcttcccctcccaagtttctcaagtcccttgagctgtctggcaagttggttgagctccccagatggatcacacagcttgaagaactcacaaagttgactctttcggtgacagttctgaggacagataacttgagaagtatcagccaattgaaaaaactgttctctctcaccttttccctttcaggcgcaaagcctgatccactgtcaacagccattcttgaggagaacaagaactactctgatggggaaatcttagttccagcaggaggatttgagaatctgaagctccttcgtttctctgctcctctcctgcccttgctgaactttcaggagaaggctatgccaagccttgagagacttgagctacggttcaggattttcgagggactttttggcatacaaaacctggaaatcctaaaagaggtgcatctccgggtaaattacagagcaggtgaggtcaccaagtccatcgtacaaaatgtggcaactcaagtgaagaaagaggccaccaaaagtgtggcaactgaagcgaataaagaaaatgtagcatctgcaacgaacaaagagggcactgagttcatcatagaaaatgtgacacttgaagcaaatgaagctactgccgcgatgaaagaggccaccacgtcaaccgtagaaaatgtggcaactgaagggaataaagaaaatgtgacaactgacacgaataaagaaaatgtggcaactgcagagaagaaagaggtcaaggggcccataataattgttgatcagtattacgactga

SEQ ID NO: 48102 - DNA, 522 bp, Oryza sativa
  Clone ID: PAT_MRT4530_50809C.1
ttaaaagagagaaacagtacatatgattaattcgttacattggagtgcagcaaggaggaaagaatttctttccaggattctagcctttccacccagaggttcacatcttctaggcattttgatataagccgagcggtggaggggttctgattcctgaagacgatgtcatgccgatgattccacagcccccagaaacaaagaaggtagaagagttcgtagtgtttggtcgggatccggctgggcctgtccaggttgtgaagctcctgcatagaggtgatgtgcaggtggatttccaaggagttccagaatgcaaccgcgaaggagcattgtatgcagaaatggaaggcagtttcagtcgctccattgcagaggtcgcatgttgccgattggacaacctttttcttcaacagattttgctagtcggtagtcgttcttttgagagcacccaggcgaagaattacactttcggtggagcccggttcttccagatgaaattgtgtctcgattcgacttaagagatgc

SEQ ID NO: 48103 - DNA, 1122 bp, Oryza sativa
  Clone ID: PAT_MRT4530_5080C.1
atgagtagagcgcccactagttggggttttgtttattctagggtgaacaaaccgagggggagaggtgcgaggaccgggtccacgggagtggggcccacgcggcagcctcacggtccacggtggaccgggtgcacccgggctcacaccggccggcgccgtgggccccacgcgtcagccgtacccgagggcgcgggcggctgacggccgggccccacgcggcagccgctcggcgcgcccgaaggcggccacatcggcgcggcctgcgggaggcggcgcgcccgcgcccctatggtcgccggcggcggccataggcacggtggagcggcggccgagagaggggagggaaagggggaaacgagacggcggtccacggctcaccctaggtcgacggcgacgacgaaaaaggaaggcggcggcgcggctcgggcggacggggacggcggcactccggcggtcggcgagctcgacgggggggcggacggggacggcggcggtgcggcgaagccggagaaggcgacactggggcgggagacggtcccggcgagcggagagagccggccgaaggtcgtcggcgacagaggagagagagggcgacggcgcgagctcgattccggcgaggagagggcacggcaaagggtggaaacgggcgaaggaggtgcagggagggtttaaatggggttggaagggagagagggcggccggggatggaaggaaaccggccgggaggtccggccgccatcaatggcgccggcgaaatttgcgggggcaaatccgcccgtttgaatgagggagagagaggggaaaatggggggaaagggagaggggatcacggggagtaattccctcctattgatttcacgcggggacgacgggaggcggcggaattcgcggcggcggcggcgctaggcgcgggcgaggcggcgggagcagcgggaggaaggggatgatgggtgggccccacccgtcagcgagggtggcgggcgggcccgctcgtcagcggcgcgcgcgcggggagaggccggatgggccgcgggggagaggagagaggggggggagatgggccggattcggcccaagagagggaagggggatttttagggttttctttttataaaacctttt

SEQ ID NO: 48104 - DNA, 1455 bp, Oryza sativa
  Clone ID: PAT_MRT4530_50810C.1
atggcgatcgccgtgagcgggcgctggacgcggctgcggacgctgggccgtggcgcgtcgggcgccgtggtgtcgctggcggaggacggcgcgtcgggggagctgttcgcggtcaagaccgcggccgcggcggaggcggcgatgctgaggagggagcgggggatgatgtctgggctgtcctcgccacacgtcgtgccctgcatcggcggcggcgatggccccgacgggtcatacaatctcttccttgagttcgcccccgggggatcgctcgccaacgaggttgccagggatgggggacgcctcgaggagcgcgcgatcagggtgtacgcggcggatgtcctgcgcgggctgacgtacctccacgggatgtcgctcgtacacggggatgtcaaggcggacaacatagtgatcggtgtcgacgggctcgccaagctcgccgacttcgggtgtgcgaaaaccatggattcggagcggccggtcagcggcacacctgcgttcatggcgccggaggttgcccgcggggaggagcaggggccagcggcagacgtttgggctcttggctgcacggtcatcgagatggccaccgggcgcgcgccgtggagcgacatggacgacgtcctcgccgccgtccaccggattgggtacacggacgccgtgccggaggtgccggtttggctgtccgcagaggcgaaggacttcttggccatgtgttttgcgagaaacgccggcgaccggagcaccgcggcacagctcttggagcatccgttcgtggcattcgcctgccacgaagtcaaggccgcgcagccgaagcccaggtgggtctctccgaagagcacactggacgccgcattctgggagtcggagaccgacgacgaggaggaggtcgacgagataacagagagcctctgcgataggatcaagtcattggcgtgccctgtttcggccttgccggattgggactccgacgaaggctggatcgatctgctcggcgagcagtgcgaggcttgcgattcggaagcggccagggaatcgattgatgtggcgcgtagcgcgccaagcaaagtgtccagcgcggcgacggtgccagctgctgaagtggtgcttgtcggcggcggctgctgtccaagcaatgaagcggacgctttcgatcagtcaattggtggcgatatccaagccgctgatcgttcaatcgagcgtcggaataaagtctgcgctggttcagacaatgatgtacttccatttcgattagtatgtaacggaatttgtgcaatggaattctttcagtttttcacaaatcttgctgtgctgttatgtttgattccctccgttcccactatgttttcgtcaaattgtgagctacgcccatgcctagagcaaaagctcagtccatacgcaccacgaaatatttctattcaactttattacgtaagtaaccacgcaataataaacaactaa

SEQ ID NO: 48105 - DNA, 113 bp, Oryza sativa
  Clone ID: PAT_MRT4530_50811C.1
ctccgtcaaagtccaatttgatatcactctcacttacatttataaagacaaaaactaaggagcagccctacttacaaaaagtacacccactaattacaaatgatactactttt

SEQ ID NO: 48106 - DNA, 306 bp, Oryza sativa
  Clone ID: PAT_MRT4530_50812C.1
atgcctatgctagaaacagggcaccctaagtcggggacccccacggtgattggagcaccacgagtgttcgtgtggcaagtaccaccatggctagagctcggaaggtgccaatccgacaccccgtcggccaccttcactaactcctggttgaggaaggagttacctgcagccgccatgattcaccttccaaggaaagaagcaacggaaagaattgccgaggattggggaggcaaatcgacctcaatatggaggaaattgagaaggggattgtctagtgtggagatggggactcaagttccctcataa

SEQ ID NO: 48107 - DNA, 657 bp, Oryza sativa
  Clone ID: PAT_MRT4530_50813C.1
atggtggtgctcgtggaagcatcgccgcgcggcggcgccggtgatcatccggcctcctgcgagctcgacgccggcggcgatgtcggcagcggcgggaggcagtacgcggccgtcgtcgtcgggggcaccttcgatcggctgcaccagggacaccacctcttcctcaaggcggcggcggagttcgcgagggagaggatcgtgatcggcatctgcgacggccctatgctcgccaagaaacaggccagtaggatgtatgcttacctgatacagccaatcgaaaagcgaatggaaaatgttaaggagtatatcaaggcaatgatcgcctcttaccatttccagtccatcaagcctgatcttgaagttcatgtcgagccaatcgtggacccctttggcccctccattgttgacgaagctttagaagcaatcatcgtcagcagtaaggagactttgccaggagggcttgctgtcaacaggaagagagctgagagaggcctcgcacaacttgagattgaagtggtggaactggtgccggagaagtctacagggaacaagataagctctacagcattcaggaagaaggaagccgagagggaattgcacaagcagcagcaggaggcaccacatgaacaagcagttgaacttgagtgcagaatataa

SEQ ID NO: 48108 - DNA, 392 bp, Oryza sativa
  unsure (1)..(392): unsure at all n locations
  Clone ID: PAT_MRT4530_50814C.1
gagaggcccctctcacaaaacaccacaagctttagatcatagaatggatgagaccggtgcggccgaggcgattgggatggaggcgccaccatccccgacggccatggccacctctggtagctgcgtggtggagataccgacggatataacgctcagccatgatgacggcgagcgatttcctgnggagatatcgatggtgcgaccacagcggcactcgatttatcgggtgccagagtacatcaaggacatgaccaaccgggacgcgtatcggccgcaggtggtgtcgcttgggcccttccactacngcgaacccccgttgaagcccatggaggcgcacaagcagcgcgcggtggcgcacatggtcagccggagtgggaagccacggcaggagt

SEQ ID NO: 48109 - DNA, 670 bp, Oryza sativa
  Clone ID: PAT_MRT4530_50816C.1
tcaccctcttcctttccctcggcgcgcgctgaaattgccaccgcctgggtgaattggctcttgccggtgtccgcaggcctctccttccatgttgtcctcggcgaaatcgctggctgccgaagttctcaccgcatcgtctcccccaaaatcgccgtccaccaacttaggccctgtttgggggagcttgtcccagctacagcttttctcaaaagctgcttctgctagaagctgccccaaacagtccacagcttctgagaatctgaataggttcctcagatgggtgaggaagagaaaacggctgaaccattagagataaaggcatgcctgatgttgtcaagaggtcccctgtacaaggtatctgattgacagtacaccgcatcaaacggggactacagttcccagtgtccttcacgataaattcactcgatgcagccgggggaatagctgcttgaccaccttgacgggtctcaaaaattatgactgatgtttctgccattggccgtggaatttgattaggatcaatcttggatggggttgagacctgggttccagcatggggagaatatggcattgtgggcatggtaggaggcatcccttggccaagtgtgtttggcggcatgccaggcattctcatcggtggttgcatagcaccagacccagctccctacaa

SEQ ID NO: 48110 - DNA, 250 bp, Oryza sativa
  Clone ID: PAT_MRT4530_50817C.1
cgaagatcgagcatgaaaatgctgtttgggagcccgtcaatttcgaatttcatcatccaattgatatttcgttctgattagtttgtttcatctcaattgtcgttgttgaataatcctccgtccatgcttatgagtacggctccatgtatgtttttaataaataaaaaggatggctccccataaaaaaaaaaaaaaaaaaaaaaaaaaaaaaaaaaaaaaaaaaaaaaaaaaaaaaaaaaaaaaaaaaaaa

SEQ ID NO: 48111 - DNA, 204 bp, Oryza sativa
  Clone ID: PAT_MRT4530_50818C.1
atggcttcaggctacagcaatgtgggcggaaagattggacaagccgccatcgacttctgtgcctctccggcttcttcgcgcaaaaccgcggcgacggcgagatccggtgagccggcaggccatggcgagagctttgcgcggcggatggcttcgcggatccgtcaaggatttgggaaggagacctacgggagtggcttcgtgtag

SEQ ID NO: 48112 - DNA, 807 bp, Oryza sativa
  Clone ID: PAT_MRT4530_50819C.1
atggtggtgctcgtggagtcccccggcggcggcgtgacgctgaagaggaagggcggggaggagcctgagctgttcatttgccccggcgacgtcgacggcgggctcccgctcgcttgccgcgcgaccaagatgaggcggctggtgcgcgatgacgacgcggcggcggcggacgacgtggcgatgggcgaggcgccgtcggcggcggaggtggcggcggtaggtgaaggggctatggtggtgtacgagccggtcgaatctgtgggaggcgtcggcctcctcggccagctgcggcggcggctccggccgtgggccagcctccgcgctggcgccgagtggatccgggacatgctgcgggaggcggacagccggacggtgcggcggctgttgtccggcgccgaagaagaagaagaggatggcgccggcatggcccttgtcccgtggggctccgcgccggcagcggcgggggattcgatggcggaggatactgtgggcgtctcgtcgtcgtcggaggaggaggaggaggaggacgccgagggctcagcggagccgatggaggtcgaggaagagggcgcgcatctcgccggcgccggtgccgcggccggctgcggcgaggggtacctgttccggcggtggccgcagcactgcatgccgccgccgcagcagcagctgccggcgatcgggcaggcgagcccggtgatgtggtggtgaaattgggaaatcttttcaccccgtgtactctgttgctgtactgtagaaatcagttttcaactgaaataaaaaaaaaaaaaaaaaaaaaaaaaaaaaaaa

SEQ ID NO: 48113 - DNA, 289 bp, Oryza sativa
  Clone ID: PAT_MRT4530_5081C.1
aaaacaaaaaaacatcgggggtcattatttattcataaaacacgcctccagataaagggaaccccaaattttttgggacccaaaacacacccatgaaccgccaataactggttccatacaaaagggtggggccccgttcccgggggccaggagcagaccccccctcccccatgggggatgcccaagtggcaaaacgccggggggctcgccgcccgccccttgatgtcccctttccggcagccggggaacccctcggccagggggggcccagcgtcgggagcgccccccc

SEQ ID NO: 48114 - DNA, 108 bp, Oryza sativa
  Clone ID: PAT_MRT4530_50820C.1
atgcccaatgacttcgccgcctaccagctcagaaaccaccgcacaggcaatggcagcatgtggcctccaccacaccgtatcggcacccctccgtcggccgactactag

SEQ ID NO: 48115 - DNA, 296 bp, Oryza sativa
  Clone ID: PAT_MRT4530_50821C.1
ctagatcgagagctcctctctaggtgctcgaaggatggcggcaacggccaatgaccgaggcaccagcgacaggctctgtccttggaactgagtctccctgttgcggtgcttggaggacgaggatgatggccatggagcgaggcaccaacgacgggctccatccctggatttggagctcctcgttgtggtgcttgaaggactacagctgtgaccgtggagcgaggcatcgtcgatgggccctccccattgcggtacttgaaggaggacgacgatggccatatggcggcaacgactaa

SEQ ID NO: 48116 - DNA, 248 bp, Oryza sativa
  Clone ID: PAT_MRT4530_50822C.1
tatagaggggggaggcccacgcaccctgtgttgtgtgtgttgtgtgtgtttagggacgaaccttgggatgaatctgaagtgtttgtgatgattggagtctggggatgatattgaatgaatatgtgtgtccgtcaatggaaatgtgaggaaaagcagtgccaagtacgtttattgcaagactgttgctggagtttgtctagtggccagtagtattgtaggagtgagatgtagtcagttgtacggtgtaa

SEQ ID NO: 48117 - DNA, 1766 bp, Oryza sativa
  Clone ID: PAT_MRT4530_50823C.1
tcggtagccgcgcggacggaaggggttgtgttttcgtgggccaaatggcggaggtgtgcacccctggcgccgccgaggcggagttgtggctccccgacgagttcttggacgatgatttcttcaccgtggaggagaaggcggcggttgcggccaagagcgagagcgacgaggaggacgggttggatggcctcgcgcgacgcatggccgacctcctcgccggcgagggtggaaagggaacgggttccaaggtggaggtgatggcggggtcgccgcagtcgacgctgtgcgggttggcggcttccggggaggatagccccaacggcggtgcgtcgcagttcagctcgccgccgtcgtcgccgctggagcagccgccgacggacccttgggacgttctctccgaggctgccgggcaggttgctcgcctgcgcatgaacagcatcccggtgccccagaagccccatgcgcatgccggccatggccgcttcgtcccacctgcgagaaacccgtctccgccggtgcaagcccagaagaccgccggtgccttccagttcgcgcccaacaacaacatgctcacccaacgccaggttcaagtcgctcatttccacctcctgaagcagaggcagctgttgaagcagcaacgggagcagcagctcgccgcggcagcagcggcggcgtggggaacgcaccgcgccggcgtcggcgtcggcgcgccgcttggtctgaactcctccggctggccaccgctgcagaaggcccaccagcaggcgtcgtccgcggccggcatgcgcgccgtgttcctcagccctcccggcggcaaaacggaacgcacgggcaccggcgtgttcatcccccgccaggccggcgcccccgccgagcccaagaaaaagccaagctgctccaccgtgcttctgcccgcgcgcgtcgtgcaggccctcaacctcaacgtcgacgatcttggtgcccgtccttgctttcccggcggtttcgttctcgaccacgacgctctggtcagtcggagcaatgcaatgctcaccacccagaagcgggtgcagcaccacctccacgcggccaccgcggcgccgcctacgcttgccgctgcgcgcgaggtgaatcttccccaggaatggacatactgaggcgcagatttgcttcgttcgtctgttctaatcccagtttaatggatcatattttaggaattattactgctactattattagtgctaggtaggtgttaggctagaattaggaatggcattggcagtagcatcagtgttaggtgttcttttgtatggtgatatattggttattttggaaggtgggtgatggatgcagatcaacagatgagaaatacatggcttccgtaggttgttcagggtattgacggtgatatatccaataataagtgttcttttggagaattgaatggaactccatccgtcccataatataagagattttaagttttcatttgcaaatatttgatcactcgttttattaaaaaaattttgaaattattatttattttattatctataggactttaagcataactttttgttttttatatttgcgaaaaaaaattaaataagacgagtggtcaaacgttgtaagcaaaaactctcaaaatctcttatattgtgggacggagggagtactatgctagttagctctatgccagttagctctagtcgtatgatgattggaagaaatcatcagatgtttgaaaagttgtaagaaagaaaaaataagagcttcagatttccttt

SEQ ID NO: 48118 - DNA, 327 bp, Oryza sativa
  Clone ID: PAT_MRT4530_50824C.1
acaacaaaggaacataagtaccactaaaatctttagaaaatgtttttttacatcggctggggggctcccaatggggggaaagattattaacccaagtttcaaatttggacgggaagaggaaaacacctgtctcagactaaaaaattatttgcatttaacatataaaaaagctggctaccacaccagactaagttattactaggcattaaaacaaaaaccttttgtttggtgaaatattaaaagggtggtaacaaggttcgagcaaggcacccgcaaccaattaacataaaaaagaacagggtcagactggactggtgtatttaaaac

SEQ ID NO: 48119 - DNA, 694 bp, Oryza sativa
  Clone ID: PAT_MRT4530_50825C.1
cttccgcgggcccttgcacgctctgcagtagatggaagcaccacctagaagaggtatgggccagtctaccattgtgtgcgaagacatgcctgaaccctaagccctccaggcgtccactggctcggtacatcctgaaagcattggagaacccgctgcgggtggtgcagggaggaattacagtcgaattcatcactcacgatgtacttcatctcgaagctcttggcattttgcttttcatggggactcttgcaggagctcggagctcaggccaacattggggcagtcagccaggaagcagtcagtgaagtcacaaggaagtgacgaggatgaggacgaggaggaggattcattctccttcaagagggcttcaagggagattctccctgacccggtagagttggaaaaggatgcagttctgtagaattcaccacagattagcaatacatgctactgagatttcatctcggtgtgtataattcatcctctgatgcgcatctcctgatgcctctaggtgaaaaaactgtgcatataggagttagacttgtttctctttttccttttcatttcagtgttgtgtaatctgtaactgagattttgagaataagtggagcacaagggtgcgcggtgcttgaaatgcaagcggccagaaattttcgtagacaaaaaaaaaaaaaaaaaaacctcgtgccgaatt

SEQ ID NO: 48120 - DNA, 494 bp, Oryza sativa
  Clone ID: PAT_MRT4530_50826C.1
caaacaaagacggttacaacacaatactcaggtcaattgaaatgcgagatatctcaacaggtggtagtaagtggaaaacaatgaaagaagctgaattcataggcgcaagccatgttgtaataacaggaaattatttctctgtctaagctagaaactttgagacgagctatcactggagagtttcttctaactttgaagttaatcgaaacaccagaacagccttccaaaagacgcatccaagaagagttgtatccttttcaaaggacagtgaatctacatggtaacttcaagtaccaaaggaaatttcatgcttcaaaatcagcacctttgtctactggcctcttgcatcacccatcttttccattcccctgggagagctcgcggcggccccgcgcgctggccgccgggtgcgccgtcagccgcgacggcaacgccgccgtcgtcagcggcgaccccatcatcgccgccagcggccgtgcggccgtcggggagga

SEQ ID NO: 48121 - DNA, 962 bp, Oryza sativa
  Clone ID: PAT_MRT4530_50827C.1
ccctttgtcttctctagatggccgagcacccacccaaccaccgcggagaaggcatggatgatttcgtggcagagttggcacgcatgacactggtggtgggctaccccaacacgccagagtacacgactgttccaccacttagtggcgagcttcctcaccgtgtccgcctggaggtccatggctatgtgggtacttgcctcgctaacatggtggttgaggcgtctggaggcacagcagatcacgcatgtcaggaggcagcatacctgatgatggccagagtacgggagcgccacaactacatcttccacgacacggcgtaccgcatccaccctcgtcgagccagcggcagcgatgtcagttctttccgtccgacagccggcaagaacgacaccacctttgttcacatgtgcgctgtgatgagggggatggacaggatgcactcggacctgcacaaggcgtccaaggccttgaatgatgggaagctcgtgaggatcatcgcactgaaggacgagatagcgcgcctgaagagggagaatgctcagttaaaggggctacccacgccaagaggagtccggatccgcactacgccccgcaagtcgacaacggcacccatgcgcatccagcttgcgcccaggtacccacctccgtcagcagctcccgcagctcctccagctccacccgcagctccagcagctccagctcctgttcccgtgtcagctccggcatccgctctctccttcgcgcctgcatcagccgtcaggggccccgccagtggcaatgggggttggttgccagctactcccagtggcagccgcgaccgcagcagcagcagttccagtggctcagagccgggcagcggcgagacatatctgccaggctccaggagtcgctcagagggacctggtgacgagcaggaggacgccttcgactccaccgaccgcaggagccgttccgagcattag

SEQ ID NO: 48122 - DNA, 332 bp, Oryza sativa
  Clone ID: PAT_MRT4530_50828C.1
gcgcatcggaagaaggcgctaagaaatcgaaggaactcccgcgaagtagcacgcgtcgatagggaggaagtagtcgatcgcaccggctcgaccttctcctccacgtgcgttctccttgctgtactcccacgctgatcagcaccgcaaaccagcggcacctctactgctatccacacacgggcctccaaggtccataggaccctattcggatccctatctgaagttcatgtacactcggctgtaacccaaaaactccttttcggtctacgtgtcaacaacggtccctagcagaacgtattgacccaccgggcatacataaagatcacatcggc

SEQ ID NO: 48123 - DNA, 1452 bp, Oryza sativa
  unsure (1)..(1452): unsure at all n locations
  Clone ID: PAT_MRT4530_50829C.1
acccacctgtaaaggtcaaaactgaggtttggtgcaatgcacaaatgccgcgtcatctttaaatgcaacgaaggcatcaattacaatatgacgatacgactgtagtgccctgcgttgcaataactcgaagcacaccaagcagaggccagataaggtgtgcggcggtgcgtttttcgaaggggaaatcacttatttttgttatagagcaacactgaatcaacctatttacatgatcgctgaaccttggacatcttagaagtcactttggtagtacaatctgcatgctgcggacaaggtgcagataaaacaaaattactacattgtcaggcagacactctcacactcctatcttcacacactacactggccggggtaaagacggatccaactgagattttcactgccggtggccctccgggagaggaaccactctatagaacggcacagctctttgtggtagatttccatcctcctcgtcatcatcaaacaagagtagataatcgtcagatttcctcttacgattagaggcaacagtagctctatatagtgctgttgtgctaggataaacagctaagacttgtcgaccctgcccaaaatctggggcactggaaggatcccctctctttggaaatggaataatatctgacataggcaacttgtacttcttttgggcactctcttcatcgtcacctggctcctcatcaagtacctcatattcttttgtttccttatcgaaatgtatcaccttcaccacaaaccattcatctttttcttcgtctgatttgaccttagctgcaacctgttctcctttcaggtttgtagcttggtcaagttggctcctcatagatgcagaggagaatcgtgtagtatctgtatcagacttcatcctcttctttttctgctcaccaactatcttttttcgttgtgcagctgaagttccagattgcaacaaaccatccaatagtccaaccaaagcagacgatgcactgacttcactctcacaaagttctttggcacgtgtatataaagcacgaagccgaatcaacgtagcatcaacctgtttatcaaccatctctggagaggagaggatcttcttgtgcatcttgttgatctcggtgaccacctcgtcctgctccttgcgcagctggtccagctccttggccttatccagcaggctcgcaatgtccgctcctccgccaccgccgccgccgcccgcgccacctccccctccgcctccgaccgacgacgacatccccggcgcggatttcccccacggttcggtaaaggaatcggagggtggatcgaatcgatctactactctccagttgggggatggggggacagctcgaggcgagccgaggcttttatttggtgccgtgcgccagtgcagaacagcatagtcggatgggagaatcaggaaagcattttctgctataaacacaaggttcactn

SEQ ID NO: 48124 - DNA, 430 bp, Oryza sativa
  Clone ID: PAT_MRT4530_5082C.1
aaacaacaaaccatgcaggggggccttgatttgaccccctttattcatcctcattacagaacactaagaaaataactatggataaaattaggggggaaaacgattattattacagccaagctccgattataatcccccatgcaaggcacccatgaagcataaaatccatcaaatttttcaaagggcggcggcgcaaaaaaaaaaaaagctcccctccctgaactcctccccgcccttcctcgccggcggcgcctttttttttttttccggaaacccgggggggggggggggggcgcggcgtttttcctcccttgcctggggcagggcctcctccaccaagaacctggacctgaactcctccttgaaaaacgccttttctccactttgagtttccgggcttgagcccatttttaacactttttgggggacc

SEQ ID NO: 48125 - DNA, 297 bp, Oryza sativa
  Clone ID: PAT_MRT4530_50830C.1
atggcggtggtgagggagtacatctctccacatcacggccatgcttccattgcggccaccgccggcgagttcgcatccttcacccttcatgaaacagtaacgagtgtcgagcaattgccaacgagtgtgacggcttcctcgggcctcgtcggcgacggcacgcgtgtctcctccaccttggcaacgagtgcgacagcagcttccgcaatggacatcattgcaggctacatctgcgccggcatgcccgtcatggagaagatgatggagtggcatggtttcaattttataaaattttaa

SEQ ID NO: 48126 - DNA, 129 bp, Oryza sativa
  Clone ID: PAT_MRT4530_50831C.1
atgaggttcaaatttgactccgagtcgagcgtctcccggcgcccgctctccgccgaccggcctaggccgtcctggaggctggacggcggcgcgatgcttactagtccagggttcgaggtagaagtgtag

SEQ ID NO: 48127 - DNA, 561 bp, Oryza sativa
  Clone ID: PAT_MRT4530_50832C.1
aaccatttgtttttgaacctgtcattgccatacatgacgtggggatcattttatggacgaacctaggtgatgttagaacatgacaggcagtgcatgagcttgctgcagttcggttgccaggtcactggaaggaagaggaccgagaccctgccaggggacctgatttgatccttgacaccgaacgaagaccacacttggtagatacacattgcatgggcaactcggggtactggcataccagagtttgcgctgtagtatggtccctacaagcagggactggtcgtagtgcagatttgcatgatctacctttaaaactcaatgcgattgattgcatgaggggcaaacgtacgcacattgaagatcaaaagagaggaggtacagagcacgaggacctggtaaatggtgatgatgacagccacttccaggaaacgatggataacaaaggctggaatacaaccttttgaagtgggcttataagtttattagtggcgacttattatcaaagaagaggatgagaaatttttgaccctaaagcttcagtacaggggaggcaatcaaatt

SEQ ID NO: 48128 - DNA, 381 bp, Oryza sativa
  Clone ID: PAT_MRT4530_50833C.1
atatgcattatattagcatcaaaaaacaagggggctaagcccatataggcccaacattcaaacataataaccccccttttaggcccaacaattaaacattttaacacccctttttgcacaaagggttcagcccaatttgaatccaacacaacccggcaaacattcaattcaacacaaaatttacaacacagcaaatcagcaaattaactgggtggccactcgggggaagggtttgaaccgggaaagggataggaagggcttgaactgggggtgggacagggacaagaagtgcttgaactgggggagggccggccctaatttgtttaggaaccccccaaggtatgaagtttcagccataaatcacatattttaatcaggggg

SEQ ID NO: 48129 - DNA, 262 bp, Oryza sativa
  Clone ID: PAT_MRT4530_50834C.1
aagggggcccgaggctaataaacatgaacaaaataaccggggggccgcttgatgagttacaacacaccaccagcgggtcagtttaaaaaaggcgtcccacaatagccccatatgctttaaaaaacaggggaaaaacaaaatttgcttccctaccctgtatggttcaacagcaccactttgattctggcaagggaatccccagaaatatttttctaaggggccccaacaaaaccctccctgcttaaaaaaatttggggccccc

SEQ ID NO: 48130 - DNA, 555 bp, Oryza sativa
  Clone ID: PAT_MRT4530_50835C.1
atggcagcggcgagggtgggggcgccgctccttctccatgcacgtcgcgctgcaggcgcgtcccctgtgggcgctgctccagctctcgaagatggagcaatctggggcgtcattgcagccggcgtgtcgctccacaccgactatctgccatgtgtctcccacctcaccttcgctgccagcttcgtcgacccccgcccccaccacgacgccgagtccgagatgtttggcacggtctccacggatgtccgctccacgagcggcgacggcctcgtcctcgtccgtttctacgactcccgcaaccgcctccccaccgtcaggagctgcggcggcgagccgatgcgcgagtggtcgatgaggaggcagtcgcacgaacgggaccgtgccagcacctggtcggcctccgccttcgtcgtcagccgccactacctcaaccactggccgctcaggcaagctttgcctcaaccgcccgtcgcccaggcgagcttcgcctcagtcgcccgccgcccgggagagctctgcctcagccgcccgctgcccgggcgagcttcgccttag

SEQ ID NO: 48131 - DNA, 349 bp, Oryza sativa
  Clone ID: PAT_MRT4530_50836C.1
gagaatccattgctagggtggagagtgttgatatcaggcattgcccaaagctgagagagctggagcagccgtttcagagaggctaactgaactgtcatctgctgctgcctgctgttgccacgacccaaaatgtctgtaaatgtacactgctgttaaccctgctgcaatgtaccaatggatcgtgttttagtctagacaaaacaatttgagtctgtagtctccccgtgtggtaatgtaggagtatgtatgtatgtatgttctgttattaccaagagtatatgtatgttctgtaattgacaagagctgacgatttgtaccaactgtaataaaaatcaggcaatgatgtaac

SEQ ID NO: 48132 - DNA, 564 bp, Oryza sativa
  Clone ID: PAT_MRT4530_50837C.1
atggggcagcggcggctttccgacggaggctgctcggcggtggcggcaggcttccgaggcttgcggctgtccggcggaggcgcggcggctgcccgacagaggctgcccggcggaggtggcaacggtggtggctgcggcagccgcaccctccctcttccggatacggcggctggggaggcgacggtctcccgcggccagcgatccgtccccgacgtcttcacatgcgagtcctccaccaccgccatcccggcgacgctcaaggggaaggacatgacccaagggccccgtcgccgccgcatcatcctcaacgccgtcgactcaacggaggaagagaacctcggtggctgtgaggggatgaacgacagaccagaaccctcgggcggcggcgaaagggcggacgaggacggcgacgcgacggtgaccacgatggtgaccttcccgagcgacggcgacggctggagcgacggcgaagcacggctggagcgacggcgacgacggcggctcgaggggcaagaaggcggcggcgaaggcccacggcgaccggcgatgcgaaggaaaggttag

SEQ ID NO: 48133 - DNA, 557 bp, Oryza sativa
  Clone ID: PAT_MRT4530_50838C.1
atctaatcccacccacatctggtccttatctactcgactctctcgcgctctctcactctcgcaactctctccctcccctttctctagcggcggctttccgacggaggctgctcggcggtggcggcaggcttgcggctgtccggcggaggcggtagctctcgctctcgcaactctcccctccccccctatgtcacgtctctctccctctcctctctctagcggcggctgcccgacagaggctgcccggcggaggtggcaacggtggtggctgcggcagccgcaccctccctcttccggatacggcggctggggaggcgacggtctcccgcggccagcggttgcccgacggaggcggcagaggcggcagccgcgccctcccctcccgtgggccgcggcgctccctttcgccagatccgtccccgacgtcttcacatgcgagtcctccaccaccgccatcccggcgacgctcaaggggaaggacatgacccaagggccccgtcgccgccgcatcatcctcaacgccgtcgactcaccgggttcgaggatggtctttttat

SEQ ID NO: 48134 - DNA, 303 bp, Oryza sativa
  Clone ID: PAT_MRT4530_50839C.1
ttttattgtaggtgtagcttctgcgactccctcgtcgtcaagtccaacctgctatgtccactcgccgtcgacgctgccctcgccgccgtcgatccggctcacccggacctcctcgatctccacagcagcggcagcgaggcggacctggatcgagttggcgttgtccgactcgggaagtccgccgcggcggcaagtgcggctacggcttggacatccttgggcgccgcgatggctgggcgtgacagcgcgtgggcgaggtccgagacgtcgagggagggggatgaggaccgaatggagacggtg

SEQ ID NO: 48135 - DNA, 481 bp, Oryza sativa
  Clone ID: PAT_MRT4530_5083C.1
agagctcagagaagttaagtttcctctctcatatcacacagtagggtagagaggcagctacgattcaagtctcttctcctctccttgctgtctattcacgttgccttcgcgtttctgtttgacactcatttcatccacccatgcattcacccagcaattattcattaaggatataatatgtccagcccatgggagatggggaaaaaaaaaaaaaaactataatagggagagcctatctaggtgttctagtggagggaattttgctttcatttaaatcgaatcttctgttgcaggaaattgtacataaccttgtagcctttactgaattcttgtgactaatctggcttggctctccttagacccccaccaccagtccacggatgcaccaagagagggctctcccccattgcattttatttagcaaggcctttggtgaagcctgggccttcctgttttgaggtatctgatttcttggttcatg

SEQ ID NO: 48136 - DNA, 1218 bp, Oryza sativa
  Clone ID: PAT_MRT4530_50840C.1
gcacgaggtctctctctcctgtgtttgtctaccacgttctcaacccacgcctcgcctgactccctcttacttgtctccgccgccgccgccgccgacgccgccgtctcgacggcgacacggctgcgtgccgggctgttacgtaggctgcgcctgcctgtgagtccgcaggagccgcagtgggcggccgccgcgcgccgaccgtaggtggggtttgtggacgaccatggcggcgaccgcggatccgagggcgaagccgccgacggcgcaccacctgaagccgtgggtgcccaccccgacgcctcgttcccaccgcgtgccgtccttgccggcagtctccggaggaggcggaggcggcgctaggcccgcccgcgatcggcgccgctcctcctcgtcgtcgtcccaccgacggggcggcaccaccaccgacgccggcgccgtagatgaggaggaggtggtggaggcttacgacggcgggctagaggatctacgagcgaagctcatgggccacatcaaggacgtcgccgaccgcctccaccttcctcaaccgaagccgcagcctcggtcgccggagcccgagacgcctccggcaccggcgccgctcccaccgcctccgcctcctccacctgatacatctgtggcggcggcggcggcggcggccaggccgtggaaccttagagagcggaagcgccgtccctcggcccgcggtagcacggcggcgtcgcccacgacggcgtgggcgagacgagcggacaccacacggggtggcggcgagcgaccgccgttcgcggtggcactcgcggcggaggagatcgaggaggacatgtacgccctgaccggcggccggccgcggcggcggcctcggaaacggcctcgcgtcgtccagcggcagctcgattcgctgttcccggggctgtggctgaccgagatcaccgccgacgcctacaaggtccccgacgactagcaccacaccccagcaccagctccggctggccggccggccagtcagctccacactttcttcatcacatcctcctagctttatgaattgaaaagaaaaatgtaactaggtttagtgcgtcgagttgatgataggtacctgtgctgtgcttgcaatgtcccatcttttgaactttctcctcctacgaaaaaagatctgatcgatcagggctttggtttccagctgatgtatttatgcacagtggagcgcatgtgtgcttg

SEQ ID NO: 48137 - DNA, 438 bp, Oryza sativa
  Clone ID: PAT_MRT4530_50841C.1
atgacaatgatgatgaggagggaggcgggtacagcggcgggttggcgagcatgcgcaaagagggtgaagggcggcgaccagggggagaagggcaagggatggcggccagcccttctcgccgttgcttgtggcggccgcagcaggacctgcaagcgctgggcaggccacctcgagtactcggagttggccgagtcgaggtcgccccaggtgaaggggagcgggaagggcgagaagggtagtggcggcggctggcctgcagagtggggcggcgggcggcttctaggattttggagggttcaacttgcggtggcaagggcgagatggtgtcggagagggatgagattatatgggaataatggatatgtattggagtatcgctttcatctgacatctgcattattccaatcgataacagatgttgacacagtatcagactaa

SEQ ID NO: 48138 - DNA, 414 bp, Oryza sativa
  Clone ID: PAT_MRT4530_50842C.1
atggacttattggaagtgccatacatgtgtggtgcccaaataatgaatgcttatcttggcaatttcattagtagtttggccagacaggttgggcttaagtttcagaaaacagaaagctgcttgggcttgcagcatctgggaatttttttagtgcagataaaggaaaaggccgagcggatgcgcgcggggctggaggaagcgcagcgacggcacgtccgggcgttggtggcggctgtggcgtgcgccacgatggggagggtgcgtgcggcggaggccaagctggatcgcgcacgctgccacaactcggagctggaggagaagctccgccagattagtgcggaggggcaggcgtggatgggcgtcgccaagagccatgaggccgtcgccgctggcctccgcgccacgctcgactag

SEQ ID NO: 48139 - DNA, 1306 bp, Oryza sativa
  unsure (1)..(1306): unsure at all n locations
  Clone ID: PAT_MRT4530_50843C.1
acacacgcatnagggagtcccttccgctcagctcgcccccatggcgacctcgtcgtcgccgcgcctgctctcctccttcctcggcgaccgcctcctctccgccagcgccaggccgctcctccgcggggccgctccaggaagcaggcgggccgcgtatcaggcgacgagaacgctctgcaacctggtggatatcctcttcaacagaggtcagagtgacaaaccggaagataaccctagacgcctacggcctgggaaagtatctcctcgtctaagcgttcccaaacatatacagcggccaccatatgtcaatgctcgtcaaagacctggattgcacaatggacctgaaatacatgatgagagagggatcgaatgcatgagggcttctggaaagcttgctgcacaagttttgaagtttgccgggactcttgtagagccaggcataacaactgatgagattgataaagcggtgcaccaaatgatagtagataatggagcatacccttcgccacttggttattgcggttttccaaagagtgtctgcacctcagtgaatgagtgcatctgtcatggtatacctgattctcgtcctcttgaagatggtgacattatcaacattgatgttactgtttatctcaatggttaccacggtgatacatctgctacatttctatgtggtaatgttgatgacaaagctaagaaattagttcaggtaacaagagaatgtctcgacaaggctatatcaatctgcgcccctggggtggagatcaaacgtattggtcgaactatacaggaccatgcagataaattcaagtttggtgtagttcgacagttcgtcggtcatggggttggacaagtgtttcatgctgaacctgtggtgcttcatttccgaaacaatgaatggggccgtatgacattgaaccaaacatttactatagagcccatgctaaccgtggggagcgtaaatccagttatatggtccgatgactggacagcggtgactgaagacggcagcttgtcagcacagtttgagcacacaatactgattacagaggatggcgcggagatactgacgcagtgttaagggcggacgaggattagaggcgagtaatgacagtgattctatttctataagtggctggctggagatggaatcctacatttttttggacaaatgatccaacttgaagttccaaaccctaatgtaaactcatattactaagataacctacaaaattttcgacgtaaaattggttttagaagtcaaaaaaaaaaaaaaaaaactcgagactagttctctccctcgtgc

SEQ ID NO: 48140 - DNA, 334 bp, Oryza sativa
  Clone ID: PAT_MRT4530_50844C.1
atcgaaacgagatttgtttttttgtttgttttttctattgttttttttttggggaaaccacacgaatacacggattgattaattttactggaaatatctcgggttccttacattacacaaattcattccttgttacacacatagtaggcgaaaacaccagttgttttattaatcaataacacacgggtttaatttggtaataatcagaacacacactaaccacactcttttggggggcttttatttgtgaataattaaggaaagtgacttttccgtcgcgaagacttggatgctttcatacttgacttgccggaattggaaaagatgcaggatg

SEQ ID NO: 48141 - DNA, 406 bp, Oryza sativa
  unsure (1)..(406): unsure at all n locations
  Clone ID: PAT_MRT4530_50845C.1
actctcacaccagagtggtggtggaaggaaaggaaacgcgagaaagagagagagagagaggagagagaataagaggaaacaaaacctcacccccgatctcctcctcctcccactccgatcgctccccgccccgatcgccgccgctgacgccgacgaaggcatggagcagccgcacgccgccgccgtcgcagctggtggagggggggggaggngcnnnnttngccccgacaccggcctgtaagggccgaagggcatgttgcagctgtcatgaggtggcatgggctgaattacacatggtatagtggagttcactgagcatgaggtagccatggtcccactaccctaccaggcttttgggtactttctctcccccactgggtgttactgtgctgttcctctcacttct

SEQ ID NO: 48142 - DNA, 471 bp, Oryza sativa
  Clone ID: PAT_MRT4530_50846C.1
ccgggctgcaggaattcggcacgaggatagatttgtgtttcagtataaggagtctctattgcacaaattttagccttcattacaaccaggcaaccagctatccatcttggtggcagcttgtctcaagtgtgacatattcagtagttgtttgtaaaaatcattttgtatctctgcccttttcccaaaaggtgcaagctcatgtaatacatatttgatataaccttcatgtctaactaattgttactgagattgaattgatggcgtgtagggttgtatatgatattagaggcttagagctgtttttgcaaagaatactttgttggtaaataactgtacagaccgtcttttactctattaagttgctagagaatataaggaaactgttcatgtcttaagaacatgggaataagcctctatcagagtaagtacttcagttcagtctctactgctgcaagtattgttaataattat

SEQ ID NO: 48143 - DNA, 480 bp, Oryza sativa
  Clone ID: PAT_MRT4530_50847C.1
atgggggtgcagtggacgccgccgttccgccgcgccacgatccggccgggcacgctgcagctgtgcgcggggcaccggtgcctggtgttccagctcgcgcacgccgacgccgccgtccccgccgcgctccggcggttcctggccgacgagcgcgtcgtgttcgtcggctacggcgtgcggtccgactgccgcaagctggaggaacagcacgggctggaggtggcgcgcacggtggagctgcggtcgctggccggcatggggaacacgtcgatgcagcgcatggcggaggagcacctcgggtgggacggggtgacgacgaagccgaggaaggtcgggacgagcaggtgggacgcgcgcaggctgagcaaggagcaggtgcagtacgcctgcgtcgacgcctacctctccttccgcctcgccgtccatgtcgtcgccgcgccggagccggacgcgacgtcgtctacctcttcttccgagtaa

SEQ ID NO: 48144 - DNA, 203 bp, Oryza sativa
  unsure (1)..(203): unsure at all n locations
  Clone ID: PAT_MRT4530_50848C.1
ggccgcaaatttttttttttttttttaagaaggttggagccgttatttagtactgatatcgaacagaatcaccaccaagtgtcatacttgtggtgttttattttactgtacgccgattctagattgaaatttcctgagtggacagcagcagatatgggagattttgtttttggntagacgtttttggggggggggggagaaga

SEQ ID NO: 48145 - DNA, 177 bp, Oryza sativa
  Clone ID: PAT_MRT4530_50849C.1
atgcagctagtcataggcttcttcgccaccgcgttctgcaacgtcggcttggtcatgggctcgcggctcgccagcatgccgtgggacccgaagctgtcgccgcggcaccaaagcctcccaatgttcagttgtgggagcctccatgaatctactcacatatcccacagagaaagctaa

SEQ ID NO: 48146 - DNA, 257 bp, Oryza sativa
  Clone ID: PAT_MRT4530_5084C.1
cattcatcctatcaaacattgcaagcatactggatggtcttcaagaaactggagtccaagcatgtggttgcgccggagaaggtcgtggcggcgcttaagctgatggagcaccggtaccgcgccaaggatttcacgaccagccaggacacgagcctggttgcttcaagcacctactatctcacccacgttgacttcatgtacaggagggtctacgcccgcaaaggggaaaccgtcaccgaagtgttcaatgggcattg

SEQ ID NO: 48147 - DNA, 303 bp, Oryza sativa
  Clone ID: PAT_MRT4530_50850C.1
atgcagcttaagctcactgccgctgtcgccgctctcctcgtcgtcgtcttctttgcgctcttcgtcggctcatgcgaggcgcgccgccttcgtgcccttggcagggatgcggcaagcatgaagcttcatggttctgatccaacgaaccagaagaaggatttatcaagtactagtatggatcatcacatggctagcggggacgatgcgaaggcgaaggacggagtggcaatggcatcaccagcatcaactgccactaccctgttcggcgtcgagctcatccttggagtgctggtcttgaagtag

SEQ ID NO: 48148 - DNA, 411 bp, Oryza sativa
  Clone ID: PAT_MRT4530_50851C.1
atgcagcttaagctcactgccgctgtcgccgctctcctcgtcgtcgtcttctttgcgctcttcgtcggctcatgcgaggcgcgccgccttcgtgcccttggcagggtcagctcgctaaaaccatcgtcgtcacctcctacgccgtacaaggatgcggcaagcatgaagcttcatggttctgatccaacgaaccagaagaaggatttatcaagtactagtatggatcatcacatggctagcggggacgatgcgaaggcgaaggacggagtggcaatggcatcaccaggtgcagttcagactacgattgtcgttagggtttcgaaccggctctctcatcaggagcgaagggtggacacagcgtttcatctggactacgctggccctagaacccatcccccctctcacaactga

SEQ ID NO: 48149 - DNA, 1217 bp, Oryza sativa
  Clone ID: PAT_MRT4530_50852C.1
atgggtgcgtacacggtggaggtcgctttcccgtgtgctgtgcgggcgacgcgtgccagcctccgccacccgcgcgcgccggcctcgcccaccgacacacactgcagcgccccaatgccggctacacgccatggcgtcgccacccgcttcgaccaaatccagcctgtggcgggccagatccggcgactgcagtggcggatctaccgccgccttgccgggagggcacgttgctgccactcctcgccgtcggcgctcgccgcctcccccgcgcctaaaaggatgtgccgccgtcggagaaggccccgtcgtcgccctcctcgctcaccagctggctttccggtggtgagctctggcggcggccaggggggaggcggcggcgctgggcgtttcgccccccgtgtcgcctctcgatgcgggtggcttgggtagcggtgcggcaggcacggcacgggatcggatccagatcggatgcggcgtagtagtaggtgtccatgcctatccccgagccggatcggacatcggagcccgactccgagccgatgcggcccatccaaagcccacgtgtcgccctcgttgcgaccgagacgtcgcgctgcgcgaggcctactccttgtgggccccaccggctgcgtatacgaccggaggtggggccccgccgcgttaaattccgcgcctccgcggcgcctgacctcgagtggatgaaaatgcccgttttgcccctcctgtcactacggtgccacgtctcaggacaaattaatggcgcgactccatcgatgggggtctccttcgccgctgtacgtttttctctccggcgcgcgcgcgcaactacaaagcacgcgcccaccaccaccaccacgaggcggcaggcgcagccggccggagtccggagacgtctgccgcctaccgccgctcgccactgggcccgtgcgcggcccagccggccgcctgctgcgtgggaagggaaagggagagaagagggccggggatgggaggggaaggggaggaggtggagggggaggaggagggagatcgatctgagagggaggaggggaggaggggatgaggagagggagatcgatctgagcggatgggaagggaggacggggaggagagggccggggatgggaggaggaatgggagggggaggaggagagggagatcgatctgagagggaggagagggagatcgatctgagagggaggagagggagatcgatc

SEQ ID NO: 48150 - DNA, 508 bp, Oryza sativa
  Clone ID: PAT_MRT4530_50853C.1
ataggtatacgagttacaatcgaggatgtcttactgtatcccgattcaacccgtacattattaagttatagagatatccatcaaaatgggatccccattaaaacccatatgcataattaagatgaattttttctcttaactaaaccaaatggatatggcaaacgcagcgataaaattccatctctcacatctagattgtactagacatacattaatctcattgcacaagttgcatacagagtaatttttcaaaacgtcgatgcattccacacttggcatgatcgacttaggcaccccgatattgagatgatgagaacatttattggcaactgtattattcataatttcaacacagatagatttgtcaaaacctctgattttgtatgcactgcatgtgctactacgaaacagattttgagaccctcttaattcaaaattacagccgaatcacttaaaaattccttgaacgcattgtaggaagcaagaccaccccccttataagggctaa

SEQ ID NO: 48151 - DNA, 195 bp, Oryza sativa
  Clone ID: PAT_MRT4530_50854C.1
atgggtaatgctaagaagaagcaagtagctgagagacaagccaagagcacagagcccactcacctcctgagagaggagaagacgccgcaatggcaccccacgaatgtctccagtggcacccgcccaaacccgaagtataaaaaagaagcagcgagtgtggcaaaacgcgcaacgccagcaaaggcaaagcggtga

SEQ ID NO: 48152 - DNA, 1439 bp, Oryza sativa
  unsure (1)..(1439): unsure at all n locations
  Clone ID: PAT_MRT4530_50855C.1
ancccnnnnnnnnggcagaagcccacacgccacagaccacagtaatttttcttaaaaaaaaagagtgcaatcatggagatctccaacgtaaatgcctctcgaggaaacacagggcatcttttgcttaacaaaagagtacaaagcagagtactctgcacaggcggaacagccgaacagccatgcgtttgccagctcgctcaggcccaagagactgcaacgacttaaaatttattgtaaaacaaggctcaacactgcaccaagtagcgtgcgttgcttcgttctcacaagacatcattgacaataaaatgctggaaatcgtgatatcacatacatattaaactccaaaataaagtgccacataaggcacatcaaagcgtggtaccaccttacccaccatttgattgacaagtaacccagacaaatgttgaaatttgacgagcaggtaggattgtcaatttaacttaagtcacagtttactgcatcaggaaggttgtgaaggtccagccagccagtccatgactctgtgctccatcacgcacttacaaggctcttgaggattaatgcaatgttcaccacaattcgaacagtccgtgaactccccaagctcaaattttgagttccagatgaagatgttcagccgagaagctttttggagcacagcacttgatattgccgaagtctcataaccagatatgtccaagtactcaagctcctctaggcaatcaaggaattttattattgcagcacaagacatatcagagtttggtatctcaagcttcttcagacgtggaagggagttgcaaatgattgaagccatctcttcgtcgacataaagagcaaacaccttcaactccagaaaatctggacaacactgatgtacatggctgagaacatcgtgattaataagaccctcatccactgccatgcctttaagaaattgtaatttgtcaattgccttacggaactgatcataagttatacatgtggcaggaaggctgaaatagtgcagatttggattcctctgagcgaggaagaggaggtgctcctcatcggcgaactccggtaggagcaaggcctccatccgaccggccgcccgccgcacgacgatctccagcacactgcagagagcggcttgaagagggacacgcccgcgcccggcggctgctgcttcaccgtctcccgcagcgagccggcgccgggccgaggtcaggacggcccagtcgcggaggtcaacgcggcgccacacgagcgggtcgcgcgccgaggcccgccatgcggagcaggcgcgggtggcgccgccggagaggagatcggggaggcccacccgggacatgatcatcacgagcaggtcgtgctgcaggtccgcccatggccggaccggcggcgacgacgacgccatcgacgacggacggacgggtggacagcgacagccctcgtgc

SEQ ID NO: 48153 - DNA, 948 bp, Oryza sativa
  Clone ID: PAT_MRT4530_50856C.1
atggtgcttcaggagaaacaagagcaggagaagaggaagcaagaagagctgaacagggaaagggaggagctggagatgatgcctcttgcctgcatccctctaggccatggggagatgcagtgggaatcgccttgtgaagcgatgcaccgaaggttcaaacttcaatgggcactgatggggaggtttattctgccattgacgacgatgaagcttcaagtagtaggatttgtggaaggctattcggacccagagaccattggcttcacagaacaaagaagctatatagagacgttgagacctgtggcaatgctatcggtgttgccgcaagaacacacacaggtggatcagattttgagtttcaagttcctagtagacaatgtaccaatacggctcaacgatggcatcattcttactgggtggagtggaatcacggaagctttgccggctaaatgccgcaatgacagaaagagaagacatgatttgggactcagtgccatctttgcattagaagcagaggaagatcagggacttctgtatcagcagaagcagcaagaaaacgaggagttgaggcttaatgcgttatctctacctgggacactatcagggggaggggaaggagaaggcgagtacagcttgttgtttgaatctcctgaggaatctgattgggcgaaggtttcagagccatatgtacccaagtttccaactgaggaggaaattcagaagagggaagagtggcgcaaggagcagcttaagctggtcatggagccaatcatacaaccagtgcaggaaccaaggaggggttcgaattatttcatgtgtaacccaggcagcaggagcactacaaaagcagagctcccaacggatgagccatatgcggtgttattatactactggaccttgtccgacaaatcggaatcaatagttatcagtgtgccaaccttgatgtag

SEQ ID NO: 48154 - DNA, 537 bp, Oryza sativa
  Clone ID: PAT_MRT4530_50857C.1
gagcaaagggcaagaggggaggctgcttccatttttgaatacattttttctcaaagagaaaagagatcctaaaattctaaaaggaaaaaccctctcctcctacctctgcttaaaaggggggacaaaaaccgccaaaagaggggccccttttgaaaggagaaaatctaattaaaacccctaattctccatcatcatcggatcccaaaaacatacagggataaggaaagatgggacttctttcccctctttttttttctttggcgggaactaggcataaaaaactgatctgcagccggggggcccttttttggggttaatttcttggaggagcgatctaagaagcaaaaaaaaaggaaaagggaatgatcactgaaggctactggctggctctttttctctctagtttttatgctgatggcggcgacaaagctccgttcttttgggggttgcccgcggcaatggtggcggcggcggcggcggtggcggcggtggcttttcccttgatgttaaaacccgtgccctttggaggaggaggag

SEQ ID NO: 48155 - DNA, 1287 bp, Oryza sativa
  Clone ID: PAT_MRT4530_50858C.1
ctcaataggaagctttgccggctaaatgccgcaaggatagactggcaagaacatgattttggactcagtgccatctttgcattagaagcagaggaagatcagggacttctgtatcagcagaagcagcaagaaaacgaggagttgaggcttaatgcgttatctctacctgggacactatcagggggaggggaaggagaaggcgagtacagcttgttgtttgaatctcctgaggaatctgattgggcgaaggtttcagagccatatgtacccaagtttccaactgaagaagaaattcagaagagggaagagtggcgcaaggagcagcttaagctggtcatggagccaatcatacaaccagtgcaggaaccgagaaggggtataaattatttcatgtgtgagccacgcagcaggagcactagggaagcagagctcccaatgcatgaaccatactcagtgttactatactactggaccttgtccgacaaatcagaatcagtagtcgctggtttactaagtggacaggcaactttcttttgtcttcattgcaacagcatcttgcaagtttacaccctcgagatcattgtagctgattctcttcattcctgcaaactcgacatatccggattcgtcgcgattagggacttacgtgatggacggcgcaattacattttcaacagagaaataggccaccctttcaccgtcgtatcacgacatggtgttttgcggctgccaacattgagccctcggagagccattcataccaatcctgaaatcttgctcgagttcaacctgaagataaagagaacaggtaatggcattgacagttaccgtgagctgatccaaggagtagtagagcatcctagtatatatcggcacgattggtccagagtcaatgagctgtccattctaccttgtggcaaccgctctactccaatgatgcgcctgaagctcgccaggattctgaaaggcgtcgaggccactgttgagctccagccgctcaggctgcctcccggaggcattgatttgcgctgcacagctcggtcaggccgcatagctgatgacattgagcttttcgatggcaaatacggtggcgacgacgacacttccctacagtttgtggtagcaacggagttgcatggcaacatggagatccacttggaaggagtatgcaatggcgtgagcaggagatggtgcattggttttgtgccaaagttccatgctttgttctctcaggaggtagacttacaattcgctcagcttttgctgactgttgcctggtccatgtag

SEQ ID NO: 48156 - DNA, 2673 bp, Oryza sativa
  Clone ID: PAT_MRT4530_50859C.1
atggaggcagccgacgtgcgtgcccgtgaaagcttgttcatccccatcgatctgaacgagaaatcatctcacgaaaagcaggatgaggaggagattcatcttcgtcaattggagcagctgctcgcgccgttcaatccgtgggaagcgggcgatccggagctggaggagtggcaatgtgctcgacccaagacgagacaccccacgccgccgccgccgccgccgcgtcgttgccacctgctgttcacgatgaagctctccgtcaagagagggcaggccatgtggtcgcgcaaggagacccctcgcttctccgccgagcgcgccggcggattccccctccgcttcgcccgcctcgccgccgacgggtcccctcgcctggagctggaagaggacggtggccgggtgggcgcgctctcctgtttcgagtccaggccatggccttggagcaggagggaggaggtcgtagccctcgccgccgctgattctgtgccggtgagggttgtggccgtcattaggcggtttccggtcgccggaggcgaccgcctcgccatcgtgtccaacatgaggatggcaagccttgtggtgcgcctccatgacaagctcttcgtcctgccccccgacggctcaactgtcaccattgccttctccgagcgatggttccgtgtcccctccaattggacggaggagaagttgtatgctagggtcggccatgatttcatcaacattacggccgcattggaggatctggccaggactctctaccagatgtatgaacaagaggagcaaaaaaagatggtgcttcaggagaaacaagagcaggagaagaggaagcaagaagagctgaacagggaaagggaggagctggagatgatgcctcttgcctgcatccctctaggccatggggagatgcagtgggaatcgccttgtgaagcgatgcaccgaaggttcaaactatcaatgggcactgatggggaggttcgctgcaactttgtggagcaggaatgtcctcgcgtcatgcgccggaggcttgcctgcgatggcaggtttattctgccattgacgacgatgaagcttcaagtagtaggatttgtggaaggctattcggacccagagaccattggcttcacagaacaaagaagctatatagagacgttgagacctgtggcaatgctatcggtgttgccgcaagaacacacacaggtggatcagattttgagtttcaagttcctagtagacaatgtaccaatacggctcaacgatggcatcattcttactgggtggagtggaatcacggaagctttgccggctaaatgccgcaatgacagaaagagaagacatgatttgggactcagtgcaatctttgcattagaagcagaggaagtgcagggtcttctgtatcaccaagaacagctagaaaaccaggactttaggcttaatgagttatccctatctggggaaccatcagtgggaggggaaggagaagctgagtacagcttattgtttgaatctcctggcgaatctgattgggtgaaggtttcagaaccatatgtaccaaagtttccaactgaagaagaaattaggaagagggaggagtggcgcaaggagcagcttaagctggtcatggcgccgatcatacggccagtgcaggaaccgagaaggggtataaattatttcatgtctgagccacgcagcaggagcaccagggaagcagagctcccaatgcatgaaccatactcagtgttactatactactggaccttgtccgacaaatcagaatcaaagttgaaacctaagaggaaggtgtatcctagacttgtttgtttggagtggtgtacttgttcacccagcagcatgttgcaagtttacgccctcgagatcattgtagctgattctcttcattcctgcaaactcgacatatccggtttcgttgcgattagggacttacgtgatggacggcgcaattacattttcaacagagaaatggaccaccctttcactgtcgtatcacaacatggtgttttgcagctgccaacattgagccctcggagagccattcataccaatcctaaaatcttgctcgagttcaacctgaagatgaagagaacaggtaatggcattcacagttaccatgatctgatccaaggagtagtagaacatcctagtatatatcggcgcgattggtccagagtcaatgagctgtccattgtaccttgtggcaacaactctactccaatgatgcgcctgaagctcgccgtgatttcgaaaggcgtcgaggccactgttgagctccagctgctcaggctgcctcctggaggcattgatttgcgatgcacagctcggtcaggccgtatagctgatgacattgagctttttgatggcaaatacggtggtgacgacacctccctacagtttgtggtggcaacggagctgcatggcaacatggagatccacttggaagcagtatgtaatggtgtgagccagagatggtgcattgattttgtgccaaagttccatgctttgttctctcaggaggcatcggcgaaggagaagagtgcagtctttatagtggccaaggacttgccaaaattcacctttttaacattgtcagctcggtggtgtgaagacttcagtgtgtcctatggacagaatgtagtaccttttacacttattcactga

SEQ ID NO: 48157 - DNA, 1633 bp, Oryza sativa
  Clone ID: PAT_MRT4530_5085C.1
atggcggcgggaggtggtgggggaggaggaggaggaggaggaggaggggaggggttcgaggagcgggtgaagcggctgttcgggtcgaggctgttcgacgacgtgccggggtcgtccttcccggcggcgtcgtggtcggtggcggccggggacgtggagcggcggcggtgggcgaagccgtcggaggcccgcgacgaggaggaggcgagggagggggccgacgccgccgaccgcggggacacgccctgcgcctccgcgttctacgacgacaacgggtgcctccgcgcggggacgcggcggcggcggcggagtaagcaggaggagttcgagggcgacctcgatgaagaagacgaggaggaggaggaggaggagaaggagaggggtggcggcggcggcaagcagcagcaggaggaggacgaggaggagggggttagggtttccatcggcctcgacccgactctggatcgagagattctggatgagaattttctttttgccggttacagtttgttattgtggagtgttatatctaacaagatttttatccttcaggaagaagaggacaagtatgacagagaggcatttggtagagaggatgcttttgaccgtgtatacatgaatgaaatcatggatgatggcattaacatgagcatcaacactgtggtgcctgacatccttgatgattccgttgaggagatccaccgcttctcaagggatcccagagcagatatgggtgcggcatccgcaagactcaaggagtacgatagttcagctaaaggtggcacgtgttctctagctcagccaaatgaattcccaagtggcaggatacaagcaatgaaaaccgatgatgctaacgtgaaacctatactgaagcggaaggaggagcaaggcgattcaaagccaaggaaacgtgtcaagtttgctgctgatgttaaggaccaatcggcagagctgcctgaacaggatgaagattctcccatggttcctcaatccatggatttggtcatagggaaggactcatccactccatctgagtctcctggggttcctgactatgttaagaaccctgcaaagtatacacgttacactctggacactccagaatgtaacgatgaaactaacaggagagcttttgccgacctgcatgatatattaaggagaatggaaccagagcctgaggcaccaccagttgagatacctacttcagttacgttcatcccacggaagaagacaatcgatgcaatgacagtagatgagggtcccaaatccaatgatgcaaactcatctctcattggtctggcggcaggtgcctctgatgaaactgagcaatgcgaaatggatgaagatgatcctaaagcattgttaccgccacaggtccaaaccaacacgaagatgaactcccgtcgttacagatcaagtagaactgatgatgagtaaaattgacggtacccttgtctcttcagtttaatgttgtaatacaatctaccaatttgaggttccaatgttggagtagttgctatgcaagttgaggagatatgttgatgtacttttgctttgatcttctgatctgagctaacccagttataattctactgtggtacttattgtttaattaaaaaaaaaaaaaaaaaaa

SEQ ID NO: 48158 - DNA, 2334 bp, Oryza sativa
  unsure (1)..(2334): unsure at all n locations
  Clone ID: PAT_MRT4530_50860C.1
tttcactgttgacgaaactagcttattgagggaaagtattgagtatgtgcaggggcgaaaccctagccaccgccgcccctcctcctccctcctccctgcttcgccgccactggagctcgtcgccggcaaagccgggcgacgcgctgggatggcggcggcgggcccatctccctcggctccatctcgccccggcgcgggtgtggcgacaatggcggcaggacgacgaggtcgcggcggcgggacagcgaggtcgcggcgacggcgtggtggtggagctccctgcggcgatggcggcgcggcggtggggctctgcgcggctccgtcgagggcgtcgccagatccggtcgcctcgccagatctggccggggtgacgacggcggcgtggcggcgggtctcggcgcggccggcgacggtcttggtcgacgccggcgccctcggacgtagcagctccggcgcggtttcatcggcgacgacagaaccaggttggcggcggctctccggttggcggcggctcgtccggttgtccagtggtgctctcgcggagcgcgctctggcgccggctgccgcgtggtcctggccgggctgccggcctactgcggcttttgccggcgacggggaaggcgcctccatctccctcccttctagtcctccagatccggttctccccttcttcagtagttgttcttccggtgctctttgacggtgcggcggccgctcccctcttcttaggtgctcctcccttcttaggctaggctgcttccagtcgttgccggggagctccgtggtgcggtaggggtggcgtgcggagttggtttccggcgtcctgtctcgctggtcgtcggccgcgccgttggtttcctgcagttgggttcctgcgtgtgaggtggtctctggtcgagctgcagtgtgattgactgttgaggcggagtcggagctgcttgtcttgcaagctcggcaacgatgaccctcaacagacgtcccggcaacgcgacgagggtttggaggtggagcagtttgagagagccttgggtgaaaaccttgcctagtgctatccccatatcggtacttccgcatcgcccaccattcaggctctgactcggaacaaaatatcagccctttgttcctactgcacgtctgaaccttagctgaaccggagaccaaatcgccatataacacgctggatatataacagaattggcgatagcaacaggtgaagatgtgatggatgaggctacacgggcgcgatggagggctaagcatcagctgtccatcacttgccggtgaccaagagccggtgccaagatggtactgagcaaggtagttctctccggcatggaagcacacaatggagttgccacgaatggacggtaaccagccaggcgagacgcacaggctccgcgcaccgatgaagaggacatggtcaccaatgttcgccactggcacaatcatacccatggcaagatcagcaagcctgagaaccaaaatgcgcgagagggagctgccattgtagccgaccagcatgagctcggagtccaattccactagagaaggcaggtggatctcctcgctcgaacatgtcgcgatcctccttggaggaggcaccggcggctgcgccaccgattcctccccctcacgccgccgccgtcgcggcggatcgatcaccgaggcatgaatcagcccatccaatgcattgtccaattggttctccttccatgtgctgatgacccaatcgtcgtcgccggccgccgcgaacgccacgcgcccaatcttttcgacagcgagcatcacggtaacaatcccctcatcggcgacatcgacggcggcgcagatcttgcggatatcggatcgacggtggggtcgaagtccaggtggaggagctggtgggcgagggaatcgaggcggggggaactcggcgatgtcgccggtgaaggggtgaaggaggcggatggcggtgtccccgtcgcgctgcaggaggaggaggccgtctggggagtcgaggacgcagtggtcgcggaggaacgggagggggacgcggatgagtgcggcggcggcggaggcggagaggtcgaggaagcgggcgtggccggcgagcgcgcggtggcccgggaagcggccgaagccctccgggaacatcatccaccgcgcgccggggtggaggcgagggtccagcacgccgcggccccgcggggagggcgcggcggcgcgccacggcgagcacaccgcccggaaccggacgtagtccgttgangaacccccccccccccccgcggcgatgagctccgccagctcggccggcagatacgcccagcagacgccgccgccttgctccgccat

SEQ ID NO: 48159 - DNA, 2697 bp, Oryza sativa
  Clone ID: PAT_MRT4530_50861C.1
atggaggcttgttcatcccccatctttctggaagagaaagcggctcatcaaaaggaggaagaggaggagattcatctgcgtctattggatcagctgttcgccccgttcgacatgttcgaggggggcgacccggtgctccacgagtggcagtacgctagaccaatctacggcaaggagagggacgccgcgccgccgcgccattgccatcggcttttcaggatcaagctctcctccaagagagggcaggcattgtggtcgcacagggagacccgtcgcttctgcgccgagcgagagggcgggttccccctccgcctcgcccgcctcgccgccgacgggtgttgcctagagctggaagatgacggcggccaggtgggcgccctctcctgcttccgcctcagcacatcgcagtccgggctgtcccgcaaggccgagatggtcgcggccgtcgtggcggcgggctccccgccggtgagggtggtcgccgtcatcaggcggcttcccggcgccggaggcgaccgccttgccctcactaccaacatgtggatcgcaagactcgcggtgcgcctccatgacaagctgttcgttctgccccccgacggctcaacagtcaccatcgccttctccgagcgatggttccgtatcccctccaaatggacggaggagaagctgtatgctagggtcggccatgaattcatcaacatcacggccgcattggaggatctggccaggaatctctaccagatgtatgagcaagaggagcaagaagagatgatacttcacgagaagcaagagcaggagaggaggaagcaagaagagttggacagggaaagggaggagctggagatgaagcctcttgcctacattcctctaggccatggggacataaagtgggaatcgcctgatgaagcgatgcaccgaaggttcgaactatcagtgggcaccaatggggaagttcgctgcagcttcgtggaacaagaatgtcctcgcgacatgcgctggaggcttgcctgctatgacaggttcgttctgccattgacgacgatggagcttcaagcagtgggatttgtggaaggctatttggacccaaagatggatggcttcacagaacaaagaggcaagacagtcgcattgagacctgtggcaatggtgtcgatgtcaccgcaggtggatcagatttttagtttcaagttcctagtggacaatctagcaatatggctcaacgacggcgttgttcttactgggtggagtggaatcacggtgagcatccattgcggagatgatgacaacagctgtgcattcccatccttcacctcagcagataactggacacaccaagttctagaatggaaggttgatgataacaacccaatatcatgttcatgtttgcttcttcagctcaataggaagctttgccggctaaatgccgcaaggatagactggcaagaacatgattttggactcagtgccatctttgcattagaagcagaggaagatcagggacttctgtatcagcagaagcagcaagaaaacgaggagttgaggcttaatgcgttatctctacctgggacactatcagggggaggggaaggagaaggcgagtacagcttgttgtttgaatctcctgaggaatctgattgggcgaaggtttcagagccatatgtacccaagtttccaactgaggaggaaattcagaagagggaagagtggcgcaaggagcagcttaagctggtcatggagccaatcatacaaccagtgcaggaaccaaggaggggttcgaattatttcatgtgtaacccaggcagcaggagcactacaaaagcagagctcccaacggatgagccatatgcggtgttattatactactggaccttgtccgacaaatcggaatcaaagttgcaacctaagaggaatctgcatcctagacttgtttgtttggagtggtgtacttgtgcacccagcagcatcttgcaagtttacaccctcgagatcattgtagctgattctcttcattcctgcaaactcgacatatccggattcgtcgcgattagggacttacgtgatggacggcgcaattacattttcaacagagaaataggccaccctttcaccgtcgtatcacgacatggtgttttgcggctgccaacattgagccctcggagagccattcataccaatcctgaaatcttgctcgagttcaacctgaagataaagagaacaggtaatggcattgacagttaccgtgagctgatccaaggagtagtagagcatcctagtatatatcggcacgattggtccagagtcaatgagctgtccattctaccttgtggcaaccgctctactccaatgatgcgcctgaagctcgccaggattctgaaaggcgtcgaggccactgttgagctccagccgctcaggctgcctcccggaggcattgatttgcgctgcacagctcggtcaggccgcatagctgatgacattgagcttttcgatggcaaatacggtggcgacgacgacacttccctacagtttgtggtagcaacggagttgcatggcaacatggagatccacttggaaggagtatgcaatggcgtgagcaggagatggtgcattggttttgtgccaaagttccatgctttgttctctcaggaggtagacttacaattcgctcagcttttgctgactgttgcctggtccatgtag

SEQ ID NO: 48160 - DNA, 158 bp, Oryza sativa
  Clone ID: PAT_MRT4530_50862C.1
gaccctaaattttaacactctcacatgaagggggaaaactttaaaataaaaaaacaaacgctgaaattttttcaaaccaaacccggggaccaccaacaatggtaatgcccccgggagcactatagggggaagggccaaaaccacataccgaaggcaag

SEQ ID NO: 48161 - DNA, 316 bp, Oryza sativa
  Clone ID: PAT_MRT4530_50863C.1
gcgggatgagctgtcgcggtcgcgactccggggcgataccatgcgccgaccgcaagagcgcgcccaagcattggtatggacctgaccgcccaagtacctgggcccgttctgggcagaccctcgacctgaccggagttccgggagactacgtgggacacggggggctatggcgcccggagacgttcgcaggaacaggggctggagtgatccactgcgggggcgatctgggggcctggctggtttccgggatctgtcaagaacgggtgagttcgggaggcggtggtcaaggcgccgcaatttttcgaggggggtgatc

SEQ ID NO: 48162 - DNA, 380 bp, Oryza sativa
  Clone ID: PAT_MRT4530_50864C.1
atggggcgaagagctcggtggcggcgcgcgtggattgggagtagctcggtgtcggtgacgagctccggtgatgccgccacctctaccctcaagctcggcggcgtctgcgcatcgccgcccatccacctccctccttgccgatgcattcgaccctgtgggccagcggtcgagcttggcgccacgctcgactgggagggccgggcgcgggggcttggcttcgatgttgaggccgcctctgccgccacagcggggccggcggcgccgaagcgggcgctcgtgctggtcgcggatggcacagtgctggtggaggcggtcgccactgccgatgtgctcaaccgcgccggcgcgtcgaggaggacgagcgcgctgggcggagggaa

SEQ ID NO: 48163 - DNA, 183 bp, Oryza sativa
  Clone ID: PAT_MRT4530_50865C.1
atgaatcgcaagatcgatctaggatcactacgacgctgtggtgcatgggatacgcaactaaaactaccttactactacttccgcttcaccgaggggcagagggagtatggcattgagggcttgtttagatgccggttaaaattttcgccctattacatcgaatggggccataacggcccaaag

SEQ ID NO: 48164 - DNA, 241 bp, Oryza sativa
  Clone ID: PAT_MRT4530_50866C.1
atggtgggtcctacatgggcctcacttgtcattcactcccctcgtcttcttccgacacggccggccggtggcggcggagccagggatgacctcgaggacgaggacgccggggagctgtgcctggacggggacaccgacggcgccggcggttcggcgacacggccggccggcggcggcggagccagggatgacctcgaggacgaggatgccagggagctgcgcctggacgcggacgctgacg

SEQ ID NO: 48165 - DNA, 650 bp, Oryza sativa
  Clone ID: PAT_MRT4530_50867C.1
gtttgtagccggaaggacgccgtcatcgacttctgcctgggctcccgcaccctctcctccacccctatccgcttctggaccatgcatgtggtggataattgtactgtacagttaatacaaaaaagccatggagaagatgttgtagtcagagacttggaaactccgttatctcttcagccctgcccaccagcggttattcttgttgcaagtgcaggacaggatgctgaccatattactgcgatggagctccttagtgaagtgaaatctgctggtaagctggctgcatcaatatttttgcaatttttccagataataatgcagatcccccctacacagttattgaagctgattcactgcttgagacagaagtggaaacccttgctgaagctctggaaagtgccaacaacgctgttctgtcaactattagcatgatatctatcatgatgtctgggttaaatcagacgttccggagttcgattaatgctcaaattatggaagtccatcctgatgaactaggacaactactcagaagttatggagaagccagaattggatttggtgctggttataacatccagtctgcaattaaacaagccgtcttccactgtccgtttcttcgtggtggaatcaaggtccatatgatcatctaa

SEQ ID NO: 48166 - DNA, 1251 bp, Oryza sativa
  Clone ID: PAT_MRT4530_50868C.1
gcacgatggcgccgcggtgcagcaacgccgtcttcgcggccatcaacgtcgtcacgctcctcctgggcgccgccgtcctcgccgcggggatctactacggcgccccgcaccgcggcggcggcggcgtcaccgagtgcgagcggttcctccgcgcgccggcgctcgccctcggcggcgccatcgtggccgtgtccctggcggggctcgccggcgcgtgctgccgcgcgacgccgctgctgtgggcctacctcctcctgacgggcctcctcatcctcgccgccgcctgcttcggcgtgttcgcgctcgtcgtcaccaacgccggcgccgggcgggccgtgtccgggagagggttcagggagtaccacctcggcgactactcgacgtggctccgccggagcgtggaggacggcggccactgggcgaggatcaggagctgcctcgtcgacaccggcgtgtgccggagcttgaagagcaaccagacgctcgacgaattcgtcaactccaacctctcgccgctgcagtctggatgctgcaagccaccaacagcatgcaacttcacataccagaacgagacatactggatcaagcctcctacacccagcaactactcagaccctgactgcaactcttggtcgaatgaccagtctgagctctgctacggctgccagtcctgcaaggcgggtgttcttggcaacctgaggagcagctggaagaagatcgccttcgtcaacgccgccttcgtcgccctcctcctcgtcgtctactccctcggctgctgcgcgctccggaacaaccggcggcacaagtactcgctggttgggaaatgatgagggtttttggtttttgctcagatgaaggttttgtggcgtgtgtgtttgtgttgtgttgcttgctggttggctacatgaacaactgtagtatttcaggaaaaagatttatgcttcagtaaatatgcgcttccatgttatgaatgatcgctagtttagtaaatatgtgttggttgagttcttgattgagatttgagaatctctcaggaaaatatggctggaccttttaatagttacttttgggtttggaacagtcacagaatgagccggtccagagttgaagcctctgctttgtcagcgtgtataatgcaaagtatttctgaattcagatgatttatgttctgaatctcaaattttcacagtaatttaataaaaaaaattgtacattacacattaatcagacatattgctttaatcgtgatcg

SEQ ID NO: 48167 - DNA, 226 bp, Oryza sativa
  Clone ID: PAT_MRT4530_50869C.1
ggggggttggcgcggcggcaacgcggccctcggtttcacgggtggattccgcagccaaaaaagcggtaaacggcgtgcacggccgttgggtcggtcgcctcgcctctcccacgggcgtagtactacggtagaatcgtcacggcggaacgtgacatgccgccactcatggctcgctgccggccacagttcggcgctgggagtggaggagctggatccagatgggtag

SEQ ID NO: 48168 - DNA, 1380 bp, Oryza sativa
  Clone ID: PAT_MRT4530_5086C.1
atggcgacccgccgcgcgccgccacccgccgccgccgccgccgcggatggcagcatcgaggagaacgcgatggccatcctcgacaccgccggcatcaaggacgcccgcgacctccacgacgaccgttgcgccttcctggagaccgtgcgctccgcctgccttgccgccgacagcccctctcccccttcgtggagaatgtataatgccgttttccagattcttcaagacagcagctcgctggagcttaccatggcaagtctccacctcttaatggagttggggaagcaataccctagagcatatttgaccgattctggttctggccaagctttagtggcagttaaagaggcatggtcaccatttcaccttcgcagcgatgttggttgtggtgagattgggggaaacaacaggcacttagaccacctcttcgattcttcaagattttcatcattaatcgaggatatggttgaaacagctaatgacacagatgctaataatggaattgagcatataaagaacatggtgctgcttgaatatcttgtcagcacccttgaggctgattttgtacctcgtcagattgcatataaagaaaaagatattcttaccaattcttctggttttgtaacagagtcattagactgggtaattttcagggaatctcttctacagatgcttctgggagttgaagatggcatatcttccaaagaaggttctgctaaatcagcacctgatctagaatcttccttagctatcatatcttttgaattcgaaagaaaagctcttgcatcagttcagaaacttttcactatggttatgaaccttgacttgattagaaaagaagcagacacaatgggtctgacttcaagagctgatgggtgcaggaatcctatcttggacgttattttagatgagctaacttacaacataagctatttatctccatttcttctgatctttgtggaatggaagtggaaattggagattatacttcagtacttttcaaaatattgtggcaagcctgcagttcgtactcggagatctgataattcacaacacgatttgacattggaaaatgtactgactttattttcaacggctgcaaccacaaaagccattgttaaaaagatgagttcagaagttgtccagctgctcttagcaaacgcataccaggtctgccttcatctggaatgtgattctagcaaagatagtgatacaacaaagaagattggagcgactctcctacagatatctgagagttttgtatctgcttttcataatatgagaaaaatcaacccggatatgcagctctcgccgtttgagaaagaagctctcttcactgctgcgtcaatggctagagttctaaagaacaaacaaagatag

SEQ ID NO: 48169 - DNA, 1651 bp, Oryza sativa
  Clone ID: PAT_MRT4530_50870C.1
ggggccgcctcgactcgcgcggttccgccgcctgaagctcttctcctcggggcgttctcggcggcaacgtctctttggtgatggcgaaggcgagcgtggtggtgcctgagcaggtgggcgcggcggcggcggcgcaggtggggtgcccctgtccgggcacgacgctgttcccgtacccgccgccgcgcgccgggatcgccgtgcggcgcaagtgcctgcaggcggcgcagcagctggagctcggcgccgggctgcgcggcggctgggtggagtccatgcgggcgtcgtcgcccacccacgccaaggccgccgccgccctcgccgccggcgtcgacgaggagcacgccgcctggatggcgaggcacccgtcggcgctgggcgagttcgagaaggtggtggcggcgtcgaaggggaagcagatcgtcatgttcctcgactacgacggcaccctctcccccatcgtcgacgaccccgacgccgccttcatgagcgagacgatgcggatggccgtgcgcagcgtggcgaagcacttcccgacggcgatcgtgagcgggcggtgccgcgacaaggtgttcgagttcgtgaagctcgccgagctgtactacgcggggagccacggcatggacatcaagggccccgcctcccgccacgccgccgccaagtctcctccccacaacaagggagtcctcttccagccggccagcgagttcctccccatgatcgagcaggtgcaccagcgactcgagcaggccaccagctccatcccgggcgccaaggtcgagaacaacaagttctgcgtctccgtccacttccggtgcgtcgacgagaagagttggggggcgttggcggagacggtgaggagggtggtgagggagttcccgcggctgcggctgagccaggggaggatggtgttcgaggtgcggccgaccatcaagtgggacaagggcaaggccctcgagttcctcctcgactcgctcggtttcgccgactgcagcgacgtgctgccggtctacatcggcgacgaccgcacggacgaggacgcgttcaaggttttgcggcggcgtgggcagggcgtggggatcctggtgtccaagcaccccaaggagacgagcgcctccttctccctccaggagcccgccgagctgaagaaaagctcagtgcactacccactgccggcacaacgtagcaacaggctgaaccgcatattggtcaattgggacgagcagtaaaagtggaatcgcctgtccaggacacggttgaggctgtaacaattgaatttaaccggcgaggctagctaaagaaaagcgcgtgatctgggccgtccaagcgattacatcggcagggtaacccgtaacgctgatcgatcgtggattctacaccaacacaggtgctcgaaaatggtgtccacattgcagaagcgcagagagctaattaatcaacgacggacgagagaaactgatggctgtctggccattgttgtgccataatcctgtttagttcttcacctttctcccttcttcttttttcccatttggggccccccttttggtaccaaccatgtaaattccgtactactagtaccttgtcatgcacaagaggaagatcaatgcaaataatgaagagcaactaatgcaagtatatactcatcagc

SEQ ID NO: 48170 - DNA, 139 bp, Oryza sativa
  Clone ID: PAT_MRT4530_50871C.1
atggctgtcccgttctccatgatacagtggacggtggatggtggggaccacatgaatgagccggcagctgtagcactgccgctgggagcgatggccccacctgtcagccccccgtcggctcggagcgtgggccccacct

SEQ ID NO: 48171 - DNA, 258 bp, Oryza sativa
  Clone ID: PAT_MRT4530_50872C.1
atatattctttttttataaaatttattttgagttttgaaaattttgagtacatttaatttatattattaatataatatatgatgctaatttaattatggctaccaaggcaagataaaaaacatagtccattgcaaacagtaaataatccaaagaacacacttgtgcaaccttgctttaaaaaaaaaaatggtaaatttgagctctactatacttactaccattcttgacaggactcctagacctggaccttgtccaaa

SEQ ID NO: 48172 - DNA, 783 bp, Oryza sativa
  unsure (1)..(783): unsure at all n locations
  Clone ID: PAT_MRT4530_50873C.1
atggctgcagtgttgacgctccggcccactgactgcctccgcggcggcggcggcggcgtgcagtgtgcancagcagctgccgccgctacggatcacccgacgcgtgcgtccaagctggcgcggccgccgcgccgcggtggacgggcgaacgggcggcagccgcgcgggcgtgggtcgtcgtcccactctcaccgcgccgccgcgccgcggccgtcgcagtcgcagtcgcagatgcgcgccatggagaaagtcgtgatcctgaagctcggggaccgattcgcgccggagatcggtgcggcggtggcggtggaggctcccgccgcggaccagtgcggtgcagcggcggcggcggcggaggagcacgccgagcctgttgcggcggctgggcagcgcgtcgcgccggcgaagaaggctgagcctgtagcagaagcagatcggtacatcgcgccggcggagatggcaccagtgcagtgcgtcacgccgacgaagatggaccagcctgcggtggcggcggcggcagagcagtgcatctcgccggcgaatagcgcggagcctgcggtcgctgcagagcagcgcatcgccctcgccgcggcgaagattccccggcctgtggcggtggcggtggcggcggcgggacagcgacgagccccggcgacgaagccgaaaacctcccgcgtcttgtacggggggccatcgttcgtgatcccgccggatccctccgagctgcccatccccgtgctcctgctcgagtctcgcggacgccgctcggcagcgtgcgcgtga

SEQ ID NO: 48173 - DNA, 1236 bp, Oryza sativa
  Clone ID: PAT_MRT4530_50874C.1
atgccaccggatctggaggaggcgaggcccggcccgccgcctccacgccgtcctgaccgcagcgctgccggatctggcggaggggcgagagagaaagagggagaagtggagagagtgagggggtggaagggcgcgctgccgcttgcgagggggagggtgccgacgccgccgccgctcgctggggggagggcgccgccgctgcccctacttgtgtcgcgctgcaaggcgaggtggtgtgtggagacccggcgtgggcgcgacgttgtgcgggcagcactccgaggcaaggcggcgagcggaggccccgcccagtgcggcgtcgccggcaacgagcagtgttactgcccggagtgccaccgcacgacggtggtggtggtggaccacgccaccggcgacaccatctgcaccgagtgcgcgctcgtcctggaggagcggtacatcgacgagacctccgagtggcgcacgttctccgacgccggcagcggcgaggaccgcgaccccaaccgcgtcggcggctgctccgaccccttcctctcgcacgcggagctcggcaccgtcgtcgcgccggccaagcggcaagcgaaggacaccgcctccccgcctcatgtgcgcgtcgactccaagtcgggccaagacagctcgctggccgtcgcgttccgcgccatctccgacatggcggaccgcctccagctcgtggccaccatcagagaccgggccaaggagctgttcaagaagatggaggaggcgaagctgtgcgccagggtgcggaaccgcgacgccgcgtacgcggcctgcctccacatcgcgtgccgcaacgagggcaacccgcggacgctgaaggagctcgcctcggtgatgcgcgattgccaggacaagaaggagatcgggaggatggagaggatcatcaggaggcacctcggggaggaggccgggacggccatggagatgggcgtcgtgcgcgccgccgactacatgagccgcttcggctcgcggctcgggatgggcaagccggaggtgcgggaggcgcagagggcggcgcagacgctggaggacaagctcgacgtgcggcgcaacccggagtccatcgccgctgcgatcatctacatggtggtgcagcgcgccggcgcccagacgtccgcgcgcgacgtgtccaaggcctccggcgtcgccgaggcaaccatcaaggaggcctgcaaggagctgagccagcatgaagagctgctcttctcctcttaa

SEQ ID NO: 48174 - DNA, 815 bp, Oryza sativa
  Clone ID: PAT_MRT4530_50875C.1
ctggtggcggtggtgcgcgcgtcgtacgaggccggggtcggggtgatggcgaccaaggtcgggatgatgacctacttcgacccggccaccggcaagccggtgccggtgaccgtcgtggggttccgggagggcggcaacgtggtgacgcaggtgaagacggcggccaccgacgggtacgacgccgtgcaggtggggtaccacggcgtccgcgaggagaagctcacccgcccggagctcggccacctcggcaaggccggcgcgccgccgctccgccacctgcaggagttccgcctccagtccgtcgacgggtacgaccccggccagccgctcgacttcgccgacatgttcaaggagggcgacctcgtcgacatctccggcaagtccatcggcaaggggttccaaggtggcatcaagaggcacaacttcaagcgagggctgatgacccacggctccaagagccacagagctctgggatcgatcggtgccgggacgacgccgggtcgggtgtacaaggggaagaagatgcccgggaggatgggaggaaccaagaccaagatcaggaagctcaagatcgtcaagatcgacaacgacctgaaagttgtcatgatcaagggcgccgttccagggaagcccgggaacctcctccgcatcgctcctgccaagatcgtcggcaagaacatccccaagaactagactatttttctcatgtgtttcgtcctgttctgtgagatttgtgatctgttgtttactgaattactgtaaattggagatgttctttgcccatgtccaatttacagtaattcagtaaacaacag

SEQ ID NO: 48175 - DNA, 1218 bp, Oryza sativa
  Clone ID: PAT_MRT4530_50876C.1
atggtggtcgagcaacgccccaaccaccaacgcttggggcgcattcacggcgccaaggacggtgccccgctggctccaaggatgttgcttcaagtgcttgggcctaagggtttccggccatgccgcccgccgcccgccgcccgccgcctgagcccgccgcggtcggactccacctccaccatcgtggccggcacggcggccgggtcccacctcctcaagatcgacgggtactcgctcaccaaggggacccccaatggctcgttccttatctccagccagttcaccgtcggcggccaccgctggcgcatcaggtactatcccaacgggttctcatccagctccgccgatttcatttcgcttttcctcgtgctagacgagaaggtgaaggtgcaggcgaagtcggacttccagatcagttacaccggccaggtggatgagccaccgtggttggcaaccatgaaagcggatactttcgatggtgcgggctttcggtctttcggctatgaaaagttcgtcagaaggtgtgactttgagaagctcatcagggacgactctttcaccatccgttgcgacattgttgtcatcgacgagatccgcgccgaggagtcgaccgagatcaccaccaccacagccgccgtcgtcaccgtgcccccgtctgacctgaaccagcagctcggcgacctgctggagagcgagaagggcgcggatgtggtgttcgaggtcggcggccagacgctcgcggcgcaccggtgcgtgctcgcggcgcggtcgccggtcttcaaggcggagctctatggcttgatgaaggagggtggcaccgccgccggagccgtgcacatcgaggacattgagccgcgcgtgttcaaggtgctgctccgcttcatgtacaccgactcgctcccggagatggaggaggaagacgtcatgtgccagcatctgctcgtcgcggcggaccggtacaacctcgagaggctcaagctgatctgcgaggagaagttgtgcaggcacattagcgtcggcacggtatggaacatcctgccgctggctgatcagcaccactgtgacgggctgaagaaagcgtgcttcgatttcctcggctcactggcaaacctgagtgctgtcgtcgccagtgatggcttcaagcatctttgcaggagttgcccctctcttatggaagagctggttgtcacgctggcacttccagggagtcatgcttag

SEQ ID NO: 48176 - DNA, 381 bp, Oryza sativa
  Clone ID: PAT_MRT4530_50877C.1
atggacaccgccgcccaaaacaagctcgcagagtacggcgacacggcgacagagaagctcgaaagaggctacctgacgcagctctacccctcctgctccacattcctgcctagccgcgtcggctgcagagaaggcccacaaccgctccatgatgccaccttcaccaagcgatcgattggaaagggggagaggaagccggctggagtagggggacatgaggggccacgactaacgaaagaggagctggatccagaggccgaggcaacaacgaccttgttagtgggagagctgtggcccgacccgggggatagtagccaggcggagcctagggatggttgtgttgaagaaaaggatggggtcacagaggatcttagtgtttga

SEQ ID NO: 48177 - DNA, 581 bp, Oryza sativa
  Clone ID: PAT_MRT4530_50878C.1
ccggccgggctatcgcagcaatccaatatcctcgacccttccatctcattctcctacgtgctatccctactttttacgtagctgaattacttagttacgcctgcggcaggatgaggaccaccactagcctggtgctcctacgacaatgacgaccaggccgtcaccggagtcaactcactaggcggggggtgcctgccccccagatcacgatgtccaccgacgtggatcgacaacaagcatgaggatgactacacgcactgtgaggatgtcaagctcttgagacacagacaatgcctcgagtgagggctcttgccgctgcgccgatcgcttgcaacctgtatgtgaaccacgactgcgaagaaggatcgcctacaacctcacgggcacaagactcccgatgcatgtcgctccgcactcaacaagatgctttccggtggctacgcctatcacgctccaccactgagatgaggaaggcctctggaaagccacagagaacatcggctagaataaatatcgcctattcccttgatttagctatcgcaacgtcaacaatgctgtccatgacatcgaagtcctccgtc

SEQ ID NO: 48178 - DNA, 380 bp, Oryza sativa
  Clone ID: PAT_MRT4530_50879C.1
actttgaaatggcttggattttggaatgtgaactctcaaattagaggatcaggtttaaaacttgctttcatttttatttttggttaaaaaaacttgcttcagtacattgatcgtttctaggtaggaaaggagtttgttctggtcgtggggaacgctagggggagggcggaggctccggcttgctgtaggagtttgcggcggattgatggcgtttcgagggtagccacgggcccgtctttgccgttggttacggtcaagatgctggcgaaagccttgccatgccttgggccggttcgacaacaacggcgtctgtgggcgccgtttcccttcttggaggcgttgtaatggcgttctttcatattcttacaaatttaactaga

SEQ ID NO: 48179 - DNA, 422 bp, Oryza sativa
  Clone ID: PAT_MRT4530_5087C.1
tcgtttcgaacaaaaaaaaacgttgctggaaataatggaggtgaaggtgttgagctctaggctggtcaggccgtcgtacccggcgtcggcggcggcgccggaggaggagttcgtgccgtcgtcgatgttcgacaaggtgacgtacgacatgcagatggccatcatctacgcgttccggccgccggggccctccgtggccgacatcgagaaggggctcgccgcggtgctcggcgtctaccgcctcttcgccggacaggtggtccgcggcggcggcggcgagctgcggggcgtcgtgctgaatgaccatggggccaggctggtcgaggcctgcgtggatggtagcctcgccgacatcgcaccggcgaagccgtcgtcggtggtgctgcggctgcatcccagccttgagggggagatcgaggagg

SEQ ID NO: 48180 - DNA, 690 bp, Oryza sativa
  Clone ID: PAT_MRT4530_50880C.1
ggctacacctctactcccctctcctcttctcttctcttccatagctggtgcaatttatgttcttggcagtgtgaccgctcttgcttgcttgctactgctgctgctccgatccaagaagagagaagagattgtgctagtagggtttagtttagtcattcctgttttgggtaaattggatttgaagaggacgcaatgccgaagatgtttggtttctctcgtcgacggatgaagcttggaaggttgaagggtcatttgcatgatccttttcatggctcccggagtcctgctcggacaaagcggtccagtcaccccaatttttcacgctttgtccagggagaagaccaagtgaccacatcagtgagcggccgagctgacgaccttgcttggcgctgctcatctgatacttttgatctcaatggccgcgcatttgagaactccgagaattgggcagtgttgtcaacagaaggggacaagccgattcctcgttttgatcatgcagcagccatggtaggaagcaaaatggtggtctttggtggagattctggccatcatttgctggatgatacaaagatattgagcttagacaagcttacatgggattcggtggctcccaaaatccgtggatcacaaggtggacatgctccaaagttttcgaccatgcgaaggccatagcctggttccatgggggga

SEQ ID NO: 48181 - DNA, 261 bp, Oryza sativa
  Clone ID: PAT_MRT4530_50881C.1
atggaggcatgcttagacggtgcagttgctgtggcagaggtggtgctcaggttcgggagggacaccagcagaacacaccggagttcacggcagctcccgccggagattcaagtggcagaacgcgtctttgcaagctcgcggaagcgcatccttaaccaaatctggcaccccaacctcagcggttggatctggcccaacgacatccacatggggcagggccgtagggggagagcatcaaaggatgaggaagagcggagatga

SEQ ID NO: 48182 - DNA, 408 bp, Oryza sativa
  Clone ID: PAT_MRT4530_50882C.1
atggtgctgaacacacctctagaccccttccttaacgtcatagtcattggtgccgatgtccaacgtattggtgctggcgttgttggcgccaaggatcggcaccagcgtcctcggaccggcggtgccgctcccggccgctgcctcctcgttgtcagcggcggccggggcggcgcagatccagtcgacgtgtgcgcagggccggcggcgccactcccgttcgcctcctcatcgtcgttgtcgcttgaggccaccgccggagcttcgcggggtaaagcgagggagccgccgccttcgccgtcgactgcgccgcccggccgtcgcgaggccgaccgaggtggatctccgcacccgatgccgagccgcgtggtgccacctgccacgcccaccgccatctgcgcccgctgctga

SEQ ID NO: 48183 - DNA, 195 bp, Oryza sativa
  Clone ID: PAT_MRT4530_50883C.1
aaagcaaacagaattaaactaaactgagaagagcagaatacaccgccaaatggccaatacaacccagccagcccgtctgaaggttgagctatttacaggagctccccccgggagcacaaccaagcaagcagcctggttgaccaattttttaagggaccgcctcctatgaaaaaaggtttttaacccaccccccaa

SEQ ID NO: 48184 - DNA, 294 bp, Oryza sativa
  Clone ID: PAT_MRT4530_50884C.1
atggctgattggtcgatcacacaagtgaaaccgctacctctaaagcaagtactatggcagttcgagaaccagtggatcgatccccccaactatcccctgcggaaggccacccgaatcaacaccacccaggcggcatgccgatcaaactcggcccaaatcgggaccaaaacacacacgagatcagcgcgcgagtcagcggcgggggattttacctgcgtgacggactcgacggagacgagcgaagaggcagcggcggggagcggcgggctggctatggctctctctgaagtctga

SEQ ID NO: 48185 - DNA, 339 bp, Oryza sativa
  Clone ID: PAT_MRT4530_50885C.1
cctagcgacctacggacagagcccatcgtaggtcacaaacacggagaaacaatagagtatgtggaccttgccggcacaatgagcaacgcatcatttgagagagacaaccgccgcaacgggctgaggatgcggtcgttgacccacggctgccgcgtgctgaagcgccctgagccaatgagccatgtggtgccggacttagagaaggttggcaatgaagacgttggtggcacgcgcagtcagatgcctcttgatggccatggagctctcacaactccctgcctggacatgtaccagccatcaggacggcggcagtatcagtatggtggccgatgtcgctga

SEQ ID NO: 48186 - DNA, 1560 bp, Oryza sativa
  Clone ID: PAT_MRT4530_50886C.1
atggtagctgtggcttggcaggcagaacctttgcaatggtctctgctacttctgttggggatctggctcatcggctgcttcaagctcttcggtcttctccatataatgtttccagcatatcatggagacaaccacagcatgggagcagcaacaccaacaagcccagcatgtgttgaactggtgaaccgtgcggaggtggcctggtccggctacatcctgatggccgcaccagtgttggccgtatgggctggcttcatcagtggaccagaaatctccttcctggcattcttgctcctgcttcttgggtgccgatccgcccattgttcgcactcgcggcctctgttctccgtgtcagaatcccctcctcagatccgcccatgttcttcctccgatcctctccccgttcccagttcttctccggattcatcagcctcgccgatctgccccgctgcttcttctgatcgatcgcaaatgatgccgatgcccatcgacaccgtgcaccgccgccgtggtgacctgcgtgttgaccttgacagggtggatcctcgctcttgccggtcgagtgcggggccagccacggctccccagccgcttaactggtcggcgtgctgtcccgtgcgtggggcagcccagccaatggttttcgcttggcagctgctacatgtgccgtggcctctggctccttacgctatacggtttttagtccgcctttcctgtatattcccgcttgcgcggtgacagctacaaccaaggtgcatctgcgccagccggtccaggaccaggacgtgatggcgaatgttgctgtggaggagtccaccattccggatgggggcagtcgatgccgatgcacatcgacatcgtgcaccgcctctgtggtggccagcttgttgatctcaacagggtgaatgcaggccctgaccataaccgcggggtgccagccaatggggcctctgctgccctatatggttttcaaatcgcttttcctgtatattatcattggcacggtgacaacaacaaccaaggtgcagcagcaccagcaagtgcaggagcaggacgtgatggtgaataatgctgtggaggagaacaccattccggatgggggcagtctagcctggagcggctacgccatgattgtcttatcagtgttggccttgtggtctgggttcgtcagtgaaccagtggcggtcttcctggccttcgtgcttctgttgcttggttgtggctttcttcacgtcgccatgctcgcaccgtccaagcccaagatgctctgatccacggcgatactaagaattttgggtattgtgtgttcataggtttcacagaaggatatgaaaacaaaacaaaaaaaaggttatgcgtgtatgttatgtgctccatagaacaccaatcatgaatgcatatatttataggagtatttgggaactatgtacagtaccttactgccttgtatacatagaagatagaaccttgtgtgaaatatgtgtaattaaaattcatctgggcctcctgatatatcatttattactgcaagtcatattacatttcatcaaaaaaacaaac

SEQ ID NO: 48187 - DNA, 687 bp, Oryza sativa
  Clone ID: PAT_MRT4530_50887C.1
cacataagcttctccctcgatctctcctacaagccacacatgagcaacgcagcggcctcggcccctacgagcaaccacaagccgacaacgatggtggcggcaaccccgtccgacgagcaacgacctcaggctcatcgagtagtgagagaagcaacggcctcggcccaacggcaagcagtggccttggcgagtaacgatctcggtctcattgagcagcaggagaggcgacaacctcggcaccgataagcaacggccccagtgagtagcgactttggcattgttgtgcggcaggagaggcaacggcctcggcacaggcagtggcgaccccagtgagttcaggcctcggcctcggcaggtagcaggagtggtggcgtcctcgtcctcagcctcgagcaagcaactaggtacgccgccgggcgtgccctcggcatggtggtgggtatcaatatgtgggttggcccgggcccccgcgtggtgcgcttctttccgttttgtgttagttttcgaggctttggtgcctttaggtatgcatctgggcatgctgtgggtattgatttgggtatcaatatgtgatttggacagagccgactcgaattgagcttctttctgttttgtgatataaatcgaggcttaggagacactggcaatgtgatcctattaaggttggctggaaaaaaaaaaaaaaaa

SEQ ID NO: 48188 - DNA, 465 bp, Oryza sativa
  Clone ID: PAT_MRT4530_50888C.1
atggcggccgcacggtggaccaagtccggacgcgcgcggcctggcggcaccatggacctggaccataggtggtccacgggcgagcgaagcagcgccagccagctgagaggcggcggcgcgtggccggacgaccacaggcaacgagaccgggacgagcggcgccacgggaagcggcaaaacgggagggggaggaggggtggaggaggagggagtcctcaccgagcgccaagggtggccgagcacctcctcgacctggccaaggggatggaggggttagggagagaggaggaggtgcgaggcggcggaaggtgtaagtcggaggggagaaaaatggtggagctcaccggtgaccgagggaacatgggtttcgatggggatccggcggtcgaggtgcggtgggatgcggcgaacgcggtggatgtgttggcatcgcgtgtggtggccgggaacggtggcaaatggtag

SEQ ID NO: 48189 - DNA, 688 bp, Oryza sativa
  unsure (1)..(688): unsure at all n locations
  Clone ID: PAT_MRT4530_50889C.1
ccggccgggcttctccgcctccgaatcccctcttcagatccgcccattgttcttcctccgatcctctccccgttcccagttcctctcctgattcatcagcctcgccgatctgccccgctgcttcttctgatcgatcgatcaagatgccgatgcacatcgacatcgtgcaccgcctctgtggtggccagcttgttgatctcaacagggtgaatgcaggccctgaccataaccgcggggtgccagccaatggtgcccagcagtttaactggtcagggttcagtctcatgcttggtgcagcccagataatggttttggcttggcaagtgatacatgtgccgtggcctctgctgcctcaggctatatggttttcaaatcgcttttcctgtatattatcattggcacggtgacaacaacaaccaaggtgcagcagcaccagcaagtgcaggagcaggacgtgatggtgaataatgctgtggaggagaacaccattccggatgggggcagtctagcctggagcggctacgccatgattgtcttatcagtgttggccttgtggtctgggttcgtcagtgaaccagtggcggtcttcctggccttcgtgcttctgttgcttggntgtggctttctttacgtcgccatgctcgcaccggtcaagcccaagatgctctgatccacgcggatactaaga

SEQ ID NO: 48190 - DNA, 411 bp, Oryza sativa
  Clone ID: PAT_MRT4530_5088C.1
atggagggggagccgaggacggtggcaacgggcggggatggcagaggggaagccaaggagcggtggcagcaggcgaggatgacagaggggaagccaaggacgatggcgacggtcggcggggattgggaggtaactcggagcagcggcggcgacagtagcgcggtggtggacatatgcgccaaggaggcagcgtgcagcgacgtgagcgcggatgacgtcgacgagaacccaaagcttaggtcggcctactgctgcgcatcgccgctatccggcatggagctcctgatgaacatcgctgacccatacatcaccgctggattcctcgcgccagccatcgcctcaagctggtgctgttgcgccgtgagccacgacggcgtgaaccgctgctgcttcctcttgaggcacaactga

SEQ ID NO: 48191 - DNA, 462 bp, Oryza sativa
  Clone ID: PAT_MRT4530_50890C.1
atgccgatgcacatcgacatcgtgcaccgcctctgtggtggccagcttgttgatctcaacagggtgaatgcaggccctgaccataaccgcggggtgccagccaatggtgcccagcagtttaactggtcagggttcagtctcatgcttggctatatggttttcaaatcgcttttcctgtatattatcattggcacggtgacaacaacaaccaaggtgcagcagcaccagcaagtgcaggagcaggacgtgatggtgaataatgctgtggaggagaacaccattccggatgggggcagtctagcctggagcggctacgccatgattgtcttatcagtgttggccttgtggtctgggttcgtcagtgaaccagtggcggtcttcctggccttcgtgcttctgttgcttggttgtggctttcttcacgtcgccatgctcgcaccgtccaagcccaagatgctctga

SEQ ID NO: 48192 - DNA, 755 bp, Oryza sativa
  Clone ID: PAT_MRT4530_50891C.1
actctcttccttccattccctttgcgcgcagcctcgtcgcctcgcctcgccgatccgcctctcgttccgcccgccttccgccccctcaagatggtgaaggtcgacacgtcggcatttgtgatcttgctgtattgtgcttccccaatggtagctgtggcttggcaggcagaacctttgcaatggtctctgctacttctgttggggatctggctcatcggctgcttcaagctcttcggtcttctccatataatgtttccagcatatcatggagacaaccacagcatgggagcagcaacaccaacaagcccagcatgtgttgaactggtgaaccgtgcggaggtggcctggtccggttacatcctgatggccgcaccagtgttggccgtatgggctggcttcatcagtggaccagaaatctccttcctggcattcttgctcctgcttcttgggtgccgttttgtttaccttgctatgctcgcaccgtccaagttcaagatgtccttgcaacattttcatggcccacatcaaaaaaaaaaaagaaagaagctagctaaacatcttgtatagtagtatgtcccaccaaaaaaaaaaaacatgtgtcaaactgtttgtgagttgtcagttatccccgcaatgtctgtacctgtaggctctgtagctgtactgtggtattatactagtagttatgttgggtatgtcccatataactattcaaaaagtctgtgtgtggtgtgcagggtcagagggtccatcat

SEQ ID NO: 48193 - DNA, 1449 bp, Oryza sativa
  Clone ID: PAT_MRT4530_50892C.1
atggcgcccaataattgcagcccaaatctgttcgatttagttgctagtgtttgctacgtatggatgtttggggatttctctcaaaatactgttggtagattgatgaaatcatggaaacagatgcagatctttgtgaagacactcactggcaagaccatcaccctcgaggttgagtcctctgatacaattgacaatgtgaaggccaagattcaggacaaggagggcattccacctgaccagcaacgtctcatctttgctggcaagcaactagaggatggccgcaccctcgcggattacaacatccagaaggagtccaccctccaccttgtccttcgcctcaggggaggcatgcagatctttgtgaagaccttgacaggaaagaccatcactcttgcggtcgagtcctcggacaagatcgacaatgtgaaggcgaagattcaggacaaggagggaattcccccggaccagcagcgcctcatctttgcagacaagcagctcgaggatggacgtacactggctgattacaacattcagaaggagtccaccttgcacctggtgctccgcctccgtgtggccgaaaaatcaatcctgcttattctggatatgtgttctttatttccagaaaacgtagataagtacgcgatttggccgactgatggctgcgattttgctataatactgttgctatctactgccttgcgtgccacagtgatgctgatgcacaacgtgcaccacctccgtggtggccagcttgttgatctcaacagggtgaatgcaggccctgaccataaccgcggggtgccagccaatggtgcccatcagtttaattggtcagggttcagtctcatgctgttcggtgcagccccgatgatggttttgccttggcaggtgattacttggtatctgcttctttgggattcgcccctgattactggtccatccggcatgatgctgatgcacaacgtgcaccacctccgtggtggccagcttgttgatctcaacagggtgaatgcaggccctgaccataaccgcggggtgccagccaatggtgcccatcagtttaattgccccgatgatggttttgccttggcaggtggtacatgtgccgtggcctctgctgcttcttgcgttgatgacctggttcatcggctgcctcaggctctacggttttcaaatcgcttttcctgtatattatcatcagcacggtggcaacaacagccaagggatggaatggtgaataatgcagagatggaggaggagaacgccattccggatgagggcagtctggcctggagcggctacgccctgatggtcttatcagtgttggcattgtggtctggcttggtcactgaaccggtggcggtcttcctgtccttcctgcttctgctgcttgggtgcggctttcttcacctcgccatgctcgcaccgtccaagcccaagatgttctga

SEQ ID NO: 48194 - DNA, 432 bp, Oryza sativa
  Clone ID: PAT_MRT4530_50893C.1
gctgatttcttttgttgattttttttaaattcttaattttgtgacaccagtactcctgccaaaaacaaagaatgctgtcacaataccaaacacaataccaacctgctggaacatttgacacacccacgcagcttgctgaatcatctctgaaaattttttagggaaacattgattaaagcttacacatgaacgtacacccgtccaaacacgtggtaatttcaaataaccaaggcttgggatcggccttgaggatcatgggttctcgggggaatggttcacaagtttctgggggtgttcatgctttggcacggggggatgcggcacctctggctttgggacctcctgcacggcggcccgatgccgcaccttaagcctcgaaaaatcctgcaccccaggctttggcaactcgcgcacaacggggggtggggggtc

SEQ ID NO: 48195 - DNA, 492 bp, Oryza sativa
  Clone ID: PAT_MRT4530_50894C.1
atgcagtcggtcaaaaactcgtgctttgatgccttgaagtaccataccattagcgcgttcaacttgtccattgctaattgggtgcgctacggaggcataacaaattttgatgccaaagtcttcacagaagtctttaaacgcaccaccagtgaattgagtaccattgtcagtgttaatacgattgggtaccccaaaccagtgcataatattgatgaagaaatctcgggctttttcagcagtgattgtgacgacgggtttggcttcaatccacttgcaaaacttgtccacagctacaaaaagatgagtgaaaccaccagtagcccttttgaaagggccaaccatatcaagcacccaaaccgcaaacggccaggacaatgggatagtttgcaactcctgggctggaccagccagggtacacaaacgacaattgttgacatacaggtccacgtcttacaaaaatataaaagattacaaatgcagcggaaaaagtaa

SEQ ID NO: 48196 - DNA, 517 bp, Oryza sativa
  unsure (1)..(517): unsure at all n locations
  Clone ID: PAT_MRT4530_50895C.1
cccacgcgtccgcccacgcgtccgccgtcttcctctggtgcgaggaccaggtcacggagcacagggccaagtacaaggacggcgacgagatccctccattagtggtatgcacatgaaacatttttctctttatcatagaagaagctgatgaaatctgacatgtagctttgtccactagtgcctgatagcatccattccaaacctctcatggcatgttccatcaggtggacatagcagaacatattcctctgcattatgagtacatcgcacaaaatatttcatcatgaagcatctattgctttaatcagcatgacacgcactcatggatcgttttatcacgaagggatatattaattataccgaaatgggaactgtgaatatcaagtcacaagaacggacaagtctttatctgattctaattcacatnttgtaaatgaatcgtctttgtgtgatgtagattggggtcagcgctccccaaggcagtggaaagacaactnctgtttcgcacttgattatc

SEQ ID NO: 48197 - DNA, 890 bp, Oryza sativa
  Clone ID: PAT_MRT4530_50896C.1
ctcgtctcgatccaagaagcagagaggagagggattcttgttttcttgatcatccatggcgcggctgcggcgtggtctcgaacacctggagcggcggtacgcgttctacgcggcgtaccactccaacccggcgaacgtgctcgtccacgccgtgtgcgtgtggcccatcctcctcaccgcgatgctcccgctccggtacgcgccgccgctgccgctgctccgattctactgcccgctctgccgccagtacctccccgtgcagctcggcttccccgtcgccgtcgcgctgggcgcgtactacgcgctcatggaccgccgcgcgggcgccgccgccgcggcgctctgcgtcgccgggtgggccgccgggacgctcctcgccgacgccgcggggctctggacgttccgcgacgcgtggaggccgctgctcaccgcgcaggccgtgctctggtccgccagttcttctcccacgccttcttcgagaagcggcggccggcgctggtggatggcccggtgcaggcggtggtgacggcgccgctgttcgtcttcatcgaggtgctgcataggttgttcgggtacgagccgacgccggggttctacaagcgcgtccaggcgagggtggcggcgatgcacaacgggccgccggcaccggcgccggcgccggagaagaaggaggaggaggagaaggagaacgtgagcaaggcgacgcaggaggagagcgccgagaaggattcgtaggtgttttcgagggagagtgtgacagacaggagaggcagagctcgggatgttatgaacttgtaatagcttgttcatgtatagtagtagtataataataatactaagaaaataaatgagtttaattttacaaaaaaaaaaaaaaaaaaaaaaaaaaa

SEQ ID NO: 48198 - DNA, 5796 bp, Oryza sativa
  Clone ID: PAT_MRT4530_50897C.1
atggccgagcaagcaaaggcgcacgaccactctccgagtgtgagtggcgacgacggggagccgaacccacgccgtcgagctcgtactccaccgccccctccacgccaaagtcctaaacggggggaggcgctcgagagggtcgaaagatccgcgacttcaccgatcgcgggtgatggaaaagagcggcaagatggggagcgtcgcctcctcgtctacggcgacggcaacacgccccagggtgcgctccaagctgcgggcgcgctcttacgccacccgcctgtcgtccctgacccggagtctccagcccaacgatggctggacgacgtggccaaattggtcatgacggcgcggcagcgcctagatgctggtgggcggtcctccgccaccaagacctctggtgctgctaccaccggctccgcgtcgtcaagacggagggcacgacgagcagcagccgctgttcgccgttcggctgccactccttcgtcgactccttcgacccgggaagatctgcgtggggagcaggacgcccgcgccagcatcgagcgccggcgtaatgaccgaagtgctgcccacgcaacggagggcgcttcctcgtccagagtgtcacctcgacacggacgtgggaatcagccctccgtgcccccggttggtggtgtcagctgtagagcctttgtggcgagtcttcggaatgtccgttggcccccaaggttccggcccaccatcgccgaaaaatatgatggcagcgtcaaccccgccgagtttctccaggtctatacgaccgggattgaggccgccgggggtgacgacagggtcatggcgaatttctttcccatggccctgaaggggcaggcgcggggttggctaatgaacttgccacctgcatctgtccactcttgggaggatttgtgccaacagttcaccatgaacttccaaggcacatatccgcgccccggtgaggaagcggacttgcacgccgtacagcgaagggacgatgagtcacttcgatcgtacattcagcggttctgtcaagtccgcaataccataccatgcatccctgcacacgcggtaatctacgcgttcagggggggcgtgcggcacaaccgcatgctcgaaaagatcgcctccaaagagccccagactaccgcggagctttttcagctcgcggaccgagtggctcgcaaggaggaggcctggacttggaacccctccggttccggtgtggcagcttcggccgcccccggatccgccgctcagacagggcggcgtgacaggaggaggaagaagaggtcagtccgttccgacgacgagggtcatgtcctcgccgtcgagggcgcttcgcgggccacccgaaaggggaggcctgcgagcgacaaaaagaaggaggccagtgctcccagcagggagcgccccaccggcaagtggtgcaccgtccacaatacctccctccatgaccttgcggactgtcgcgcagtcaaaagcttggctgagcggacaaggaagtgggaggaggagaggaggcaggagcgccgggaaggcaagtccccggcggttccttccggccatcggcgaagtgaggccaagcagaaggcccccgccgaggacatcgatgatggcaatgatgacctaggtttccaagagcctggggccaccattgccactgtcgatggaggagcgtgtgcgcatgtttctcgccggagcctcaaggccatgaagcgagagcttctggccgcggcccctactcatgaggcgacgcgccgggcgcggtggtcggaggttgccctcactttcgaccagaccgaccacccaccgtgcgttgcccggggagggcagattgcgatggtggtttctcccaccgtttgcaacgtgaagttggggcgtgtcctcattgatggaggagcagccctcaacatcctttcccccgcagcctttgatgccatcaaggccccggggatgatgctccggccgtcccagccaatcatcggcgtgacgccggggcacacttggccgctaggtcatatcgacctcccggtcaccttcggtggacccgccaatttccgcacggagcgggaagacgcgctcgtctctttcctgcgggcaaacgctgacgtcttcgcatggagaccggcggatatgcccggggtccccagggaggtgattgagcaccgtctcgccgtacgatcgggcgcaaggccggtccggcagaaagtgcggcgccaggccccggaacgtcaagccttcatccgcgaggaggtggcgcgacttctggaggccggattcatccgcgaggtcatccacccggagtggctggcgaacccggtggtcgttcctaaggcgaacggcaagcttcggatgtgcatcgactacaccgaccttaacaaggcatgtcctaaggatccttaccccctgcctcgcatagatcagattgtcgactccacagcggggtgcgaccttttgtgttttctagatgcatactctggttaccatcagattcgcatggctagggaggatgaggaaaaaattgcgttcattacccctataggaacttattgttatacgacaatgcccttcgggttaaagaatgcaggtcctacttttcaacgtactactcgaatttctttgggtagccaattaggacgtaatgttgaggcttatgtcgatgacttggttgtaaagacgcgcaaccaggaaacgttactttcagatttagcggaaacttttgagagcctccgctccgcccgcataaaactgaaccccgataagtgcgtgttcggtgtacctgcgggcaagcttctcgggttcctggtctctgcccgaggcattgaggccaaccccgagaagatacgagctatagagcggatgcgcccccccagcaaacttagggatgtgcagtgcgttaccggttgcatggccgccctaagtcgtttcatatcgaggctgggagagaaggcgctacccctatttaagctcctcaaacgctctgggccgtttgcttggacggaggaagctgaacatgccctcactcgattgaaggcatatctcagctctcctccggttctggtcgccccggagccaaatgagcccctgctactctacttagcggcgaccccccaagtagttagtgcagcgttggttgtggagcgcgatgaggacaatcctcattccgcgcacccccaccctgtgctgacttggcccgggagcgagcagggaggagaggcccccgagccgaacggtggcctaaggcccctgatgaccggagtcggccctctgcccgctcgtcagacggtgctgggtgcccccgaccctcaggaaggccccgaggccactgcgggaaggccgcacctatcgccctctgaccccgcggctaaccctgtaccgattcgacccgggagagagcagggaggagaggcccccgagccgaacggtggcccaaggctcccgacgaccggagatggccctctgcccgcttgtccgacgacgccaggagcccccgactcccaggacggccccgaggccactgtgggaaggccgcccctgtcatcctccgaccccgaggtcatcggcacagaagacgagtgcgccccgaggggccacttggacgaagagcgccccggggatatggcccctagcgaagaggatcggccccacagaaaagtacagcggcccgtctactttgttagtgaggccctccgggacgccaagacccgataccctcaggcccagaagatgctttacgctattctgatggcctcgaggaaactgcgccattatttccaggcgcatcgggtcactgtggttacgtcttaccccctcggtcaaatcttgcataatcgagagggtacaggacgggtggtaaaatgggcaatcgaactttctgagtttgatttgcactttgaaccacgccacgctatcaagagccaggccctcgccgattttgtggcagagtggaccccggctccagagaccgcttcagtctctgaggccagctcggacccctcgcagctgcctcacaccgcccactgggtgatgcagttcgacggctccctgtctcttcagggcgccggtgcgggggtcacgataacttctccgagcggagacgtcctcaaatacttggtccgtctcgactttcaagcgaccaataatatggcagagtacgagggactccttgccggactcagagtggcaactggactggggatccgccgcctcttggtgttaggcgactctcagctggttgttaaccaagtctgcaaggagtaccggtgctctgacccgcagatggacgcctacgtgcgccaagtacggcgcatggagcgccattttgacgggatagagcttcggcacgtgcccagacgggataatataatagccgacgaactctcacgactcgcgtcctcgcgagcccagaccccaccgggcgtctttgaagaaaggcttgcccagccgtcggcgcgacccgaccccttaggggagacggacgcgcctgatcggcccccgaggcccgtcggagcccaggcctcgggacccgaggggagcactcctagctcccttagattgattgcttggatctctgaggtccaagcatacctcacagataagactctacccgaggaccgcgaagggagtgaacgcgtccatcgcatctccaaacgctacgtgctggtagaagggaccctctatcggcgcgcggctaacggaatcctcctgaagtgcattcctcaggaacaaggcgttgagcttcttgccgatatccatgaaggggagtgcggagcccattccgcctcgcgcaccttggttggcaaggcctttcgtcaaggattctattggccgacagctctcaatgacgcggtcgacctggtccggcgatgcagagcgtgtcagttccacgccaagcaaatccatcagccggcccaggccctgcagaccataccactttcgtggccatttgctgtctgggggctcgatatcctgggaccgtttaggcgggccccgggcgggtttgagtatctgtatgtcgcgatcgacaagttcactaagtggcccgaggcttatccggtcatcaagatcgataaacactccgcacttaaattcattaagggcatcacggcccggtttggagtgcctaaccgtattattacggataacggcacccaattcactagtgaactcttcggcgactactgcgaagacatgggcatcaagctctgcttcgcctcacctgcccaccctagaagcaatggtcaagtggagcgcgccaatgcagaaatcctcaaaggccttaaaaccaagaccttcaatattctcaagaagcacggcgactcatggatcgaggagttgccagcggtgctctgggcgaaccgaaccacaccaagccgagcaaccggggaaacgcctttcttcctcgtctacggcgcagaagcggttctcccatccgagctcaccctgaagtctcctcgggccaccatgtattgcgaggctgatcaagatcagcttcgcagagatgacctcgactacttggaagaacgaaggcggcgcgcggccctccgagccgcgcgttaccaacagagcctgcggcgctaccatcagcgccacgtccgggcccgatcactctgcgtcgacgacctcgtcttacgccgcgtccaaacgcgtgctggattgagcaagctctcaccaatgtgggagggtccgtatcgagtgatcggcgtcccccggccgggctccatacggctggccacgggcgacggcactgagttgcctaacccatggaacatcgagcaccttcgtcgcttctacccctga

SEQ ID NO: 48199 - DNA, 6015 bp, Oryza sativa
  Clone ID: PAT_MRT4530_50898C.1
atggccgggcaagcaaaggcgcacgacctctctccgagtgtgagcggcgacgacggggagccaaacccacgccgtcgagctcgtactccaccgcctcctccacaccaaagtcctaagcagggagaggcgctcgagagggtcgacaaatccgcggcttcaccgatcgcgggcgatggaggagaacggcgagatggggagcgtcgcctcctcgtctatggcgacggcagcacgccccagggcgcgcttcaggctgctggcgcgctcctacgtcacccgcccgtcgtccttgacccggagtctccagcccagcgatggctggacgacgtggccaacttggtcatgacggcacaacagcgcctgggagctggtggacggtccgccaccaccaagacctccggcgccgccactaccggctccgtgtcgtcaagacgaagggcgcggcgagcggcggctgttgcacgccattcggctgccactccctcgtcggcacctccgactcgggaggatcagcatggagagccggatgcccgcctcgacatcgagcgccggcgtaatagccggcgtactccccgcgcgacggagggcgcctcttcgtccagagtgtcacctcgacatggacgtgaggaccagccctccgtgcccccggctggtggtgtcggctgtagagcctttgtggcgagtcttcggaatgtccgttggcccccaaggttccggcccaccatcaccgagaaagtcatggcgaatttctttcccatggccctgaagggacaggcgcggggttggctaatgaacctgccacccgcgtcggtccactcctgggaagatttgtgccaacagttcaccatgaactttcaaggcacatatccgcgcccaggcgaagaagcggacttgcacgcagtacagcgaggggatgatgaatcacttcgctcgtacattcagcggttttgccaagtccgcaacaccataccatgcatccctgcacacacagtaatctacgcgttcagggggggtgtgcggcacaaccgcatgctcgaaaagatcgcctccaaagagccccagactacagcagagctttttcagctcgcggaccgagtggctcgcaaggaggaggcctggacttggaacccctccggttccggagtggcagcttcggccgcccccggatccgccgctcagacagggcggcatgacaggaggaggaagaagaggtcggtccattccggcgacgagggtcatgtcctcgccgtcgagggcgctccgcgggccacccgaaaggggaggcctgcgagcgacaaaaagaaagaggccagcgttcccagcagggagcgccctaccggcaagtggtgcaccgtccacaacacctccctccatgaccttgcggactgtcgcgcagtcaaaagcttggctgagcggacaaggaagtgggaggaggagaggaggcaggagcgccgggaaggcaagtccccggcggttccttccggccgtcggcgaagtgaggccaagcaaaaggcccccgccgaggacatcgatgatggcgataatgacctaggtttccaagagcctggggctaccatagccactgtcgatggaggagcgtgtgcgcacgtttctcgccggagcctcaaggccatgaagcgagagcttctggccgctgcccctactcatgaggcgacgcgccgggcgcggtggtcggaagttgccctcacttttgaccagtccgaccacccgccgtgcgttgcccggggagggcagattgcgatggtggtttctcccaccgtttgcaacgtgaagttggggcgtgtcctcattgatggaggagcagccctcaacatcctttcccccgcagcctttgatgccatcaaggccccggggatgatgcttcggccgtcccagccaatcatcggcgtgacgccggggcacacttggccgctaggtcatatcgacctcccggtcacctttggtggacccaccaatttccgcacggagcgggtgaacttcgatgtggcggacctcagtctgccctacaacgcggtcctggggaggcccgcgttggtgaagttcatggcggctgtccactacgcctacctccagatgaagatgccgggccccgacggccccatctctgtccatggcgacctcaaagtcgcgctcgcttgtatggagcagcgtgcggaccgcctcgccgtcgtgtccaagcccgagggcggcgacgagaggcttgacacatccgcccccgccgccccgaagcagcggatagtcacgtccgatgaggtcccggtcaaggaggaagacgcgctcgtctccttcctgcgggcaaacgctgacgtcttcgcatggagaccggcggatatgcccggggtccccagggaggtgattgagcaccgtctcgccgtgcggccgggcgcaaggccggtccggcagaaagtgcggcgccaggccccggaacgtcaagccttcatccgcgaggaggtggcgcgacttctggaggccggattcatccgcgaggtcatccacccggagtggctggcgaacccggtggtcgttcccaaggcgaacggcaagcttcggatgtgcatcgactacaccgaccttaacaaggcatgtcctaaggatccttaccccttgcctcgcatagatcagattgtcgactccacagcggggtgcgaccttttgtgttttctagatgcatattctggttaccatcagattcgcatggctagggaagatgaggaaaaaactgcgttcattactcccataggaacttattgttatacaacaatgccctttgggttaaagaatgcaggtcctacttttcaacgtactactcgaatttctttgggtagccaattaggacgtaatgttgaggcttatgtcgatgacttggttgtaaaaacgcgcaaccaggaaacgttgctttcagatttagcggaaacttttgagagcctccgctccgcccgtataaaactgaaccccgataagtgtgtgtttggtgtacctgcgggtaagcttctcgggttcttggtctctgcccgaggcatcgaggccaaccccgagaagatacgagctatagagcggatgcgcccccccagtaaacttagggatgtgcaatgtgtcaccggttgcatggccgccctaagtcggttcatatcgaagctgggagagaaggcgctacccttatttaagctcctcaagcgctccgggccgtttacttggacggaggaagctgaacgcgccctcactcagttgaaagcatatctcagctctcctccggttctagtcgccccggagccaaacgagcccctgctactctacttatcggcgacccctcaagtagttagtgcagcgttggttgtggagcgcgatgagggcaatcctcattccgcgcacccccaccctgtgctgacttggcccgggagcgagcagggaggagaggcccccgagccgagcggtagcctaaggcccctggcgaccggagtcggccctctccccgctcgtcagatggtgctgggcgcccccgaccctcaggaaggccccgaggccactgcgggaaggctgcacctatcgccctcggaccccgaggctaaccctgtaccgattcgacccgggagggagcagggagaagaggcccccgagccgaacggtggcctaaggcccctgacgaccagagttggccctttgcccgcttgtccgacgacgccaggagcccccgacccccaggacggccccgaggccactgtgggaaggccgcccctgtcgtcctccgaccccgaggtcatcggcacagaagacaagtgccccccgaggggccacttggacgaggagcgccccggggatatggcccttagcgaaggggatcggccccaccgaagggtgcagcggcctgtctactttgttagcgaggccctccgggacgccaagacccgataccctcaggcccagaagatgctttacgctattctgatggcctcgaggaaactgcgccattatttccaggcgcatcgggtcaccgtggttacgtcttaccccctcggtcaaatcttgcataatcgggagggtacaggacgagtggtaaaatgggcaatcgagctttctgagttcgatctgcactttgaaccacgccacgctatcaagagccaggccctcgccgattttgtcgcagaatggaccccggctccagagaccgtctcaatccccgaggccaacacggacccctctcagctgcctcacaccgcccactgggtgatgcagttcgacggttctctgtctctccagggcgccggtgcgggggtcacgttgacctctccgaacggagacgtcctcagatacttggtccgtctcgactttcgagcgactaataatatggcagagtacgagggactccttgccggactcagagtggcagctggactggggatccgccgcctcttggtgttaggcgactcccagctggtcgttaaccaggtctgtaaggagtaccggtgctctgacccacagatggacgcttacgtacgccaagtgcggcgtatggagcgccattttgacgggatagagcttcggcatgtacccagacgggataacatggttgccgacgaactctcacggctcgcgtcctcgcgagcccagaccccaccgggcgcctttgaagaaaggcttacccagccgtcggcgcgacccgaccccttaggggagacggatgcgcctgaccggcccccgaggcccgtcggagtccaggcctcgggacccgaagggagcactccaagctcccttagattgattgcttggatctccgagatccaagcatacctcacagataagactctacctgaggaccgtgaagggagtgaacgcgtccaacgcatttccaaacgctacgtgctggtagaagggaccctctatcggcgcgcggctaacggaatcctcctgaagtgcattcctcaggaagaaggcgttgagcttcttgccgacatccatgaaggcgagtgcggagcccattccgcctcgcgcaccttggttggcaaggcctttcgtcaagggttctactggccgacagctctcaatgatgcggtcgacctggttcggcgatgcagagcgtgtcagttccacgccaagcaaatccatcagccggcccaggcactgcagaccataccactttcatggccatttgctgtctgggggctcgatatcctgggaccgtttaggcgggccccgggcgggtttgagtacctgtatgtcgcgatcgacaagttcaccaagtggcccgaggcttatccggtcatcaagatcgataagcactccgcacttaaattcattaagggcatcacggcccggtttggagtgcctaaccgtattattacggataacggcacccaattcactagtgaactcttcggcgactactgcgaagacatgggcatcaagctctgcttcgcctcacctgcccaccccagaagcaatggtcaagtggagcgcgccaatgcagaaatcctcaaaggccttaaaaccaagaccttcaacattctcaagaagcacggcgattcatggatcgaggagttgccagcggtgctctgggcgaaccgaaccacacccagccgagcaactggggaaacgcctttcttcctcgtctacggcgcagaagcggttctcccatccgagctcaccctgaggtctcctcgggccaccatgtactgcgaagctgatcaagatcagcttcgcagagatgacctcgactacttggaagagcgaaggaggcgcgcggccctccgagccgcgcgctaccagcagagcctgcggcgctaccatcagcgccacgtccgggcccgatcactctgcgtcgacgacctcgtcttacgtcgcgtccaaacgcgtgctggattgagcaagctctcaccaatgtgggagggtccgtatcgagtgatcggtgtcccccggccgggctccatacggctggccacgggcgacggcactgagctgcctaacccgtggaacatcgaacaccttcgtcgcttctacccctga

SEQ ID NO: 48200 - DNA, 358 bp, Oryza sativa
  Clone ID: PAT_MRT4530_50899C.1
aaaaatgaaagacaactttttttttttttatatcccccaaagtttcacatgtcacatatgatgatatcgggggcgatttttaacttccgaaccacttttctggtaaaactcattacaagacacccccaagggggggaatgggactgggggccccatagtccctgggggggatcccatatttagagggcccgttaaaagccaacagagcttgggcttgggccagattccgatcaaaggggagatcaccaaactgctggggttggagctgctgccctttggcctgaacaatgttaatgtcctgatggggggattggtgccccaccagcgcgagctggggccagacttggttgtttctcaa

SEQ ID NO: 48201 - DNA, 493 bp, Oryza sativa
  Clone ID: PAT_MRT4530_5089C.1
aacgttccaaaatcaaaactgatgttcgtgagagcgaggccccaaaacctcaaatacatgtaagaacataacaattgcagtgccctaggccatggcatgttcagcaaacacttcagaagggaaactgcaacatgtagtagcataaaagtcggatcacatagttactcggacagcttgcggtcgcacatcaaatttcccatagaagacaaacccaaatctcgtgtaccacaaaacacatgtattcctgactcgaaaatcgattgtgcaacggtaccctgcccattccgcccttcatctccaccgatccctcgccaggaagatcagcaagttgggagcaacgacgaagcataccatcacggagttagcaaagagcccgatgtcagcaagcacggagccaaccttctcctgtatagaccccttctcctccggcgcgagctcttgcagcagcaaaccgacgactgcgaagcagacagagaagagcgcgaacagaacg

SEQ ID NO: 48202 - DNA, 346 bp, Oryza sativa
  Clone ID: PAT_MRT4530_508C.1
atggcgaacactatggaacaagtacagcgagaggcgaaggatcgtgtgggtactctgccaagccggaggcctcttgggcgaaggacgcagggcgaagagtatatgccgaagggagacgacttcgccaaagcaagctccccccgcgagggccaaagaagccttttccggcccatcaagcctaggggccattgggccgacgatcgcctaacggcccatcaggagtccatgaacctctattacactatgtactcatttgtcgtttcgacaacagctggtgccgaccgtgtggacctccgagcgaaaccactgagagcgaatgccaccgaagaaggtcgtaaaggagaag

SEQ ID NO: 48203 - DNA, 5886 bp, Oryza sativa
  Clone ID: PAT_MRT4530_50900C.1
atggctgagcaagcgaaggcgcccaacctctctccgagtgtgagtggcgacgacggggagccgaacccacgccgtcgagctcgtactccgccgccccctccacgccaaagtcctgggcgggagaaggcacccaagagggctgaagggtccgcgacttcgacatccacaggagctgggaaagggcggcgagatggggagcgtcgcctcctcgtctatggtgacggcagcacgccccagggcgcgctccaagctgcgggcgcgctcttacgccacccgcctatcatccctgacccggagtctccagcccaacgatggctggacgacgtggccaaattggtcatgacggcgcggcagcgcctagatgctggtgggcggtcctctgccaccaaggcctctggtgctgctaccaccggctctgcgtcgtcaagacggagggcacgacgagcggcagccgctgttcgccattcggctgccactccttcctcgactccttcgacccaggaggatctgcgtggggagcaggacgcccgcaccagcatcgagcgccggcgtaatgaccgacgtgctgcccacgcaacggagggcgcttcctcgtccagagtgtcacctcgacacggacgtgggaatcagccctccgtgcccccggttggtggtgtcggctgtagagcctttgtggcgagtcttcggaatgtccgttggcccccaaggttccggcccaccatcgccgaaaaatatgatggcagcgtcaaccccgccgagtttctccaggtctacacgaccgggattgaggccgccgggggtgacgacaggcggttctgtcaagtccgcaataccataccatgcatccctgcacacgcggtaatctacgcgttcagggggggcgtgcggcacaaccgcatgctcgaaaagatcgcctccaaagagccccagactaccgcagagctttttcagctcgcggaccgagtggctcgcaaggaggaggcctggacttggaacccctccagttccggtgtggcagcttcggccgcccccggatccgccgctcagacagggcggcgtgacaggaggaggaagaagaggtcagtccgttccgacgacgagggtcatgtcctcgccgtcgagggcgcttcgcgggccacccgaaaggggaggcctgcgagcgacaagaagaaggaggccagcgctcccagcagggagcgccccaccggcaagtggtgcaccgtccacaacacttcccttcacgacctcgcggactgccgtgcagtcaaaagtttggctgagcggacgaggaagtgggaggaagagaggaggcaggagcgccgagagggcaagtccccggcggttccttccggccatcggcgaagtgaggccaagcagaaggcccccgccgaggacatcgatgatggcgatgatgacctaggtttccaagagcctggggccaccattgccactgtcgatggaggagcgtgtgctcacgtttctcgccagagcctcaaggccatgaagcgagagcttctggccgcggcccctactcatgaggcgacgcgccgggcgcggtggtcggaggttgccctcactttcgaccagaccgaccacccaccgtgcgttgcccggggagggcagattgcgatggtggtttctcccaccatttgcaacgtgaagttggggcgtgtcctcattgatggaggagcagccctcaacatcctttcccccgcagcctttgatgccatcaaggccccggggatggtgctccggccgtcccagccgattatcggtgtgacgccggggcacacttggccgctaggtcatatcgacctcccggtcaccttcggtggacccgcaaatttccgcacggagcgggtgaacttcgatgtggcggacctcagtctgccctacaacgcggtcctggggaggcccgcgttggtgaagttcatggcagcggtccactacgcctacctccagatgaagatgccgggccccgatggccccatctctgtccatggcgacctcaaagtcgcgctcgcttgcatggagcagcgcgcggaccgcctcgccgtcgtgtccaagcccgagggtggcgacgagaggcttggcacatccgcccccgccgccccgaggcagcggatagtcacgggcgatgaggtcccggtcaaggaggaagacgcgctcgtctccttcctgcgggcaaacgctgacgtattcgcatggagaccggcggatatgcccggggtccccagggaggtgattgagcaccgtctcgccgtacggccgggcgcaaggccggtccggcagaaagtacggcgccaggccccggaacgtcaagccttcatccgtgaggaggtggcgcgacttctggaggccggattcatccgcgaggtcatccatccggagtggctggcaaacccggtggtcgttcccaaggcgaacggcaagcttcggatgtgcatcgactacaccgaccttaacaaggcatgtcctaaggatccttaccccctgcctcgcatagatcagattgtcgactccaccgcggggtgcgaccttttgtgttttctagatgcatactctggttaccatcagattcgcatggctagggaggatgaagaaaaaactgcgttcattacccctgtaggaacctattgttatacttcaatgccctttgggttaaagaatgcaggtcctacttttcaacgtactactcgaatttctttgggtagccagataggacgtaatgttgaggcttatgtcgatgacttggttgtaaaaacgcgcaaccaagagactttactctcagatctagcggaaacttttgagagtctccgctccgcccgcataaaactaaaccccgataagtgcgtgttcggtgtacctgcgggcaagcttctcgggttcttggtctctgcccgaggcatcgaggccaaccccgagaagatacgagctatagagcggatgcgcccccccagtaaacttagggatgtgcaatgtgtcaccggttgcatggccgccttaagtcggttcatatcgaggctgggagagaaggcgctacccttatttaagctcctcaagcgctctgggccgtttgcctggacggaggaagttgaacgtgccctcactcagctgaaggcatacctcagctctcctccggttttagtcgccccggagccaaatgagcccctgctgctctacttagcggcgaccccccaagtagttagtgcagcgttggttgtggagcgcgatgaggacaatcctcatttcgcgcacccccaccctgtgcagacttggcccgggagcgagcagggaggagaggcccccgagccgaacggtggcctaaggcccctgacgaccggagtcggccctctgcccgctcgacagacggtgctgggtgcccccgaccctcaggaaggccccgaggtcactgcgggaaggccgcacctatcgtcctttgaccccgaggctaaccttgtgcgaactcgacccgggagaaagcagggagaagaggcccccgagccgaacggtggcctaaggcccctgacgaccggagtcggcccttcccccgcttgtccgacgacgccaggagcccccgacccccaggacggtcccgaggccactgtgggaaggccgcctctgtcatcctccgaccccgaggtcatcggcacagaagacgggtgcgccccgagaggccacttggacgaagagcgccccggggatacggcccctagcgaagaggatcggccccaccgaaaggtgcagcggcctgtctactttgttagtgaggccctccgggacgccaagacccgataccctcaggcccagaaaatgctttacgctgttctgatggcctcgaggaaactgcgccattattttcaagcgcatcgggttacggtggttacgtcataccccctcggccaaatcttgcataatcgagagggtacaggacgggtggtaaaatgggcgatcgaactttctgagttcgatttgcactttgaaccacgccacgctatcaagagccaggcccttgccgattttgtggcagagtggaccccggctccagagcctgtctcaatccctgaggtcaactcggacccctcgcagccgccacacaccggccactgggtgatgcagtttgacggctccctgtctcttcagggcgccggtgcgggggtcacgttgacctccccgaccggagacgtcttgagatacctggatcgcctcgactttcgagcgaccaataatatggcagagtacgagggactccttgccggactcagagtggcagccggactggggatccgccgcctcctggtgttaggcgactcccagctagtcgttaaccaagtctgtaaggagtaccggtgctctgacccgcagatggacgcttacgtacgccaagtgcggcgtatggagcaccattttgacgggatagagcttcggcatgtgcccagacgggataacatgattgccgacgaactctcacggctcgcgtcctcgcgagcccagaccccaccgggcgcctttgaagaaaggcttacccagccgtcggcgcgacccgaccccctaggggagacgggtgtgcctgaccggcccccgaggcccgtcggagtccaggcctcgggacccgaagggagcgctccaagctcccttagattgattgcttggatctccgagatccaagcatacctcacagataagactctacctgaggaccgcgaagggagtgaacgcgtccaacgcatttccaaacgctacgtgctggtagaagggaccctctatcggcgcgcggctaacggaatcctcctaaagtgcattcctcaggaacaaggcgttgagcttcttgccgatatccatgaaggcgagtgcggagcccattccgcctcgcgcaccttggttggcaaggcctttcgtcaaggattctattggccgactgctctcaatgacgcggtcgacctggtccggcgatgcagagcgtgtcagttccacgccaagcaaatccatcagccggcccaggccctgcagatcataccactttcatggccgttcgctgtctgggggctcgatatcctgggaccgtttaggcgggccccgggcgggtttgagtacctgtatgtcgcgatcgacaagttcactaagtggcccgaggcttatccggtcatcaagatcgataagcactccgcacttaaattcattaagggcatcacggcccggtttggagtacctaaccgtattattacggataacggcacccaattcactagtgaactcttcggcgactactgcgaagacatgggcatcaagctctgcttcgcctcacctgcccaccccagaagcaatggtcaagtggagcgcgccaatgcagaaatcctcaaaggccttaaaaccaagaccttcaatattctcaagaagcacggcgattcatggatcgaggagttgccagcggtgctctgggcgaaccgaaccacaccaagccgagcaaccggggaaacgcctttcttcctcgtctacggcgcagaagcggttctcccatccgagctcaccctgaggtctcctcgggccaccatgtactgcgaggctgatcaagatcagcttcgtagagatgacctcgactacttggaagaacgaaggcggcgtgcggccctccgagccgcacgctaccagcagagcctgcggcgctaccatcagcgccacgtccgggcccgatcactctgcgtcgacgacctcgtcctacgccgcgtccaaacgcgtgctggattgagcaagctctcaccaatgtgggagggtccgtatcgagtggtcggtgtcccccggccgggctccatacggctggccacgggcgacggcactgagctgcctaacccgtggaacatcgagcaccttcgtcgcttctacccctga

SEQ ID NO: 48204 - DNA, 5241 bp, Oryza sativa
  Clone ID: PAT_MRT4530_50901C.1
atggccgagccagcaaaggcgcacgacctctccccgagtatgagcggtgacgacggggagccaaacccacgccgtcgagctcgtactccaccgccccctccacgccaaagtcctaggcgagaaaaggcgatcgagagggctgaaggatccgcgacttcgacatccacaggaggtggaaaggggcggcgagatggggagcgtcgcctcctcgtctatggtgacggcagcacgccccagggcgcgctccaagctgcgggcgcgctcctacgtcacccgcccgtcgcccatgacccggagtctccagcccaacgctggctggacgatgtggccaaattggtcatgactgcacggcagcgcctggatgctggtgggcggtcctccgccaccaaggcctctggtgctgctaccactggctccgcgtcatcaagacgaagggcgcggcgagcggcagctgccgttcgctattcggccgccactccttcgtcgactccttcgacccgggaagatctgcgtggggggccggacgcccgcaccagcatcgagcgccggcgtaatgaccgacgtgctgcccacgcaacggagggcgcttcctcgtccagagtgtcacctcaacacggacgcgggaatcagccctccgtgcccccggttggtggtgtcggctgtagagcctttgtggcgagtctttggaatgtccgttggcccccaaggttccggcccaccatcgccgaaaaatatgacgggagcgtcaaccccgccgagtttctccaggtctacacgaccgggatcgaggccgccgggggtgacgacagggtcatggcgaatttctttcccatggccctgaaaggacaggcgcggggctggctaatgaacttgccacccgcatctgtccattcttgggaggatttgtgccaacagttcaccatgaacttccaaggcacatatccgcgcccaggtgaggaagcggacttgcaagcagtacaacgaagggatgatgagtcacttcgctcgtacattcagcggttctgtcaagtccgcaacaccataccatgcatccctgcacacgcggtgatttacgcgttcagggggggtgtgcggcacaaccgcatgctcgaaaagatcgcctccaaggagccccagactaccgcggagctttttcagctcgcggaccgagtggctcgcaaggaggaggcctggacttggaacccctccggttccggtgtggcagcttcggccgcccccggatccaccgctcagacagggcggcgtgacaggaggaggaagaagaggtcagtccattccgacgacgagggtcatgtcctcgccgtcgagggcgcttcgcgggccacccaaaaggggaggcctgcgagcgacagaaagaaaaaggccggcgctcccagcagggagcgcccagccggcaagtggtgcaccgtccacaacacttcccttcacgacctcgcggactgccgtgcagtcaaaagtttggctgagcggacgaggaagtgggaggaggagaggaggcaggagcgccgagagggcaagtccccggcggttccttccggcaatcggcgaagtgaggccaagcagaaggcccccgccgaggacatcgatgacggcgatgatgacctaggtttccaagagcccggggccaccattgccactgtcgatgggggagcgtgtgctcacgtttctcgccggagcatcaaggccatgaagcgagagcttctggccgcggcccctactcatgaggcgacgcgccgggcgcggtggtcggaggttgccctcaccttcgaccagaccgaccacccaccgtgcgttgcccggggagggcagattgcgatggtggtttctcccaccgtttgcaacgtgaagttggggcgtgtcctcattgatggaggagcagccctcaacatcctttcccccgcagccgttgatgccatcaaggccccggggatgatgctccggccgtcccagccaatcatcggtgtgacgccggggcacacttggccgctaggtcatatcgacctcccggtcacattcggtggacccgccaacttccgcacggagcgggtgaactttgatgtggcggacctcagtctgccctacagcgcggtcttggggaggcccgcgttggtaaagttcatggcggcggtccactacgcctacctccagatgaagatgccgggccccgatggccccatctctgtccatggcgacctcaaagtcgcgctcgcttgtatggagcagcgcgcggaccgcctcgccgtcgtgtccaagcccgagggtggcgacgagaggcttggcacatccgcccccgccgccccgaggcagcggatagtcacgtgcgatgaagtcccggtcaagcaggaagacgcgctcgtctctttcctgcgggcaaacgctgacgtcttcgcatggagaccggcggatatgcccggggtccccagggaggtgattgagcaccgtctcgccgtacggccgggcgcaaggccggtccggcagaaagtgcggcgccaggccccggaacgtcaagccttcatccgcgaggaggtggcgcgacttctggaggccggattcatccgcgagttcatccatccggagtggctggcgaacccggtggtcgttcccaaggcgaacggcaagcttcggatgtgcatcgactacaccgaccttaacaaggcatgtcctaaggatccttaccccctgcctcgcatagatcagattgtcgactccacagcggggtgcgaccttttgtgttttctagatgcatactctggttaccatcagattcgcatggctagggaggatgaggaaaaaactgcgttcattacccccataggaacttattgttatacgacaatgcccttcgggttaaagaatgcaggtcctacttttcaacgtactactcgaatttctttgggtagccaattaggacgtaatgttgaggcttatgtcgatgacttagttgtaaagacgcgcaaccaggaaacgttactttcagatctagcggaaacttttgagagtctccgctccgcccgcataaaactgaaccccgataagtgtgtgtttggtgtacctgcgggcaagcttctcgggttcttggtctctgcccgaggcatcgaggccaaccccgagaagatacgagctatagagcggatgcgcccccccagcaagcttagggatgtgcaatgcgtcaccggttgcatggccgccctaagtcggttcatatcgaggctgggggagaaggcgctacccctatttaagctcctcaaacgctccgggccgtttacttggacggaggaagctgaacgtgccctcactcagttgaaggcgtatcttagctctcccccagttctggtcgctccggagccaaatgaacccttgctactctacttagcggcgaccccgcaagtggttagtgcggcgttggtcgtggagcgcgatgaggacaatcctcattccgcgcacccccaccttgtgcagacttggcccgggagagagcagggaggagaggcccccgagccgaacggcggcccaaggcccccgacgaccggagttggccctctacccgcttgtcaaacggtgctaggagcccccgacccccaggaaggccccgaggccactgcgggaaggccgcacctatcgccctctgaccccgaggctaaccctgtgccgattcgacccgggagagagcagggagaagaggcccccgagccgaacggtggcctaaggcccctgacgactggagttggccctttgcccgcttgtccgacgacgccaggagcccccgacccccaggacggccccgaggccactgtgggaaggccgcccctgtcgtcctccgaccgcgaggtcgtcggcacaggagacgagtgcgccccgcgaggccgctcgggtgaagagcgccccagggatgcggcccctagcgaagaggatcggccccaccgaaaggtgcagcggcccgtctactttgttagtgaggccctccgggatgccaagacccgataccctcaggcccagaaaatgctttacgctgttctgatggcctcgaggaaactgcgccattatttccaggcgcatcgggtcactgtggttacgtcttaccccctcggtcaaatcttgcataatcgagagggtacaggacgagtggtaaaatgggcaatcgagctttctgagttcgatctgcactttgaaccacgccacgctatcaagagccaggccctcgccgattttgtggcagagtggaccccggctccagagaccgtctcaatgcccgaggccagcacgaacccctcacagctgcctcacgccgcccactgggtgatgcaattcgacggttctctgtctcttcagggcgccggtgcaggggtcacgttgacctctccgaacggagacgtcctcagatatttggtccgtctcgactttcgagcgactaacaatatggcagagtacgagggactccttgccggactcagagtggcggctggactggggatccgccgcctcttggtattaggcgactcccagctagtcgttaaccagggcatcacggcccgttttggagtgcctaaccgtattattacggataatggcacccaattcactagtgagctcttcggcgactactgcgaagacatgggcatcaagctctgcttcgcctcacctgcccaccccagaagcaatggccaagtggagcgcgccaatgcagaaatcctcaaaggccttaaaaccaagaccttcaatattctcaagaagcacggcgattcatggatcgaggagttgccagcggtgctctgggcgaaccgaaccacaccaagccgagcgaccggggaaacgcctttcttcctcgtctacggcgcagaagcggttctcccatctgagctcaccctgaggtctcctcgggccaccatgtactgcgaggctgatcaagatcagcttcgtagagatgacctcgactacttggaagagcgaaggcggcgcgcggccctccgagctgcgcgctaccagcagagcctgcggcgctaccatcagcgccacgtccgggcccgatcactctgcgtcgacgacctcgtcctacgccgcgtccaaacgcgtgctggattgagcaaactctcaccaatgtgggagggtccgtatcgagtgatcggtgtcccccggccgggctcggtacggctggccacgggcgacggcacggagctgccaaacccgtggaacattgaacaccttcgtcgcttctacccctga

SEQ ID NO: 48205 - DNA, 6006 bp, Oryza sativa
  Clone ID: PAT_MRT4530_50902C.1
atggccgagcaagcaaaggcgcacgacctctctccgagtatgagtggcgacgacggggagccgaacccacgccgtcgagctcgtactccaccgccccctccacgccaaagtcctaagcagggggaggcgctcgagagggtcgaaagatccgcgacttcaccgatcgcgggcgacggaaaagaacggcgagatggggagcgtcgcctcctcgtctacggcgacggcagcacgccccagggcgcgctccaagctgcgggcgcgctcttacgccacccgcctgtcgtccctgacccggagtctccagcccaacgatggctggacgacgtggccaaattggtcatgacggcgcggcagcgcctagatgctggtgggcggtcctccgccaccaaggcctctggtgctgctaccaccggctccgcatcgtcaagacggagggcacgacgagcggcagccgctgttcgccgttcggctgccactccttcgtcgactccttcgacccgggaagatctgcgtggggagcaggacgcccgcaccagcatcgagcgccggcgcaatgaccgaagtgctgcccacgcaacggagggcgcttcctcgtccagagtgtcacctcgacacggacgtggggatcagccctccgtgcccccggttggtggtgtcggctgtagagcctttgtggcgagtcttcggaatgtccgttggcccccaaggttccggcccaccatcgccgaaaaatatgatggcagcatcaaccccgccgagtttctccaggtctacacgaccgggattgaggccgccgggggtgatgacagggtcatggcgaatttctttcccatggccctgaaggggcaagcgcggggttggctaatgaacttgccacccgcgtctgtccactcctgggaggatttgtgccagcagttcactatgaactttcagggcacatatccgcgcccaggtgaagaagcggacttacacgcagtacagcgaagggatgatgagtcgcttcgctcgtacattcagcggttctgtcaagtccgcaacaccataccatgcatccctgcacacgcggtaatttacgcgttcagggggggcgtgcggcacaaccgcatgctcgaaaagatcgcctccaaggagccccagactaccgcagagctttttcagctcgcggaccgagtggctcgcaaggaggaggcctggacttggaacccctccggttccggtgtggcagcttcggccgcccccggatccgctgctcaaacagggcggcgtgacaggaggaggaaaaagaggtcagtccattccgacgacgagggtcatgtcctcgccgttgagggcgcttcgcgggccacccgaaaggggaggcctgcgagcgacaaaaagaaggaggccagcgctcccagcagggagcgccccaccggcaagtggtgcaccgtccacaacacctccctccatgaccttgcggactgtcgcgcagtcaaaagcttggctgagcggacaaggaagtgggaggaggagaggaggcaggagcgccgggaaggcaagtccccggcggttccttccggccatcggcgaagtgaggccaagcagaaggcccccgccgaggacatcgatgatggcgatgatgacctaggttttcaagagcctggggccaccattgctaccgtcgatggaggagcgtgtgctcacgtttctcgccggagcttcaaggctatgaagcgagagcttctggccggggcccctactcatgaggcgacgcgtcgggcgcggtggtcggaggttgccctcacctttgaccagaccgaccacccaccgtgcgttgcccggggagggcagattgcgatggtggtttcccccaccgtttgcaacgtgaagttggggcgggtcctcattgatggaggagcagccctcaacatcctttcccccgcagcctttgatgccatcaaggccccggggatgatgctccggccgtcccagccaatcatcggtgtgacgccggggcacacttggccgctaggtcatatcgacctcccggtcaccttcggtggacccgccaatttccgcacggagcgggtgaacttcgatgtggcggacctcagtctgccctacaacgcggtcctggggaggcccgcgttggtgaagttcatggcggcggtccactacgcctacctccagatgaagatgccgggccccgatggccccatctctgtccatggcgacctcaaagtcgcgctcgcttgtatggagcagcgcgcggaccgcctcgccgtcgtgtccaagcccgagggtggcgacgagaggcttggtacatccgcccccgccgccccgaggcagcggatagtcacgtgcgatgaggtcccggtcaaggaggaagacgcgctcgtctctttcctgcgggcaaacgttgacgtcttcgcatggagaccggcggatatgcccggggtccccagggaggtgattgagcaccgtctcgccgtacggctgggcgcaaggccggtccggcagaaagtgcggcgccaggccccggaacgtcaagccttcatccgcgaggaggtggcgcgacttctggaggccggattcatccgcgaggtcatccacccggagtggctggcgaacccggtggtcgttcctaaggcgaacggcaagcttcggatgtgcatcgactacaccgaccttaacaaggcatgtcctaaggatccttaccccctgcctcgcatagatcagattgtcgactccaccgcggggtgcgaccttttgtgttttttagatgcatactctggttaccatcagattcgcatggctagggaggatgaggaaaaaactgcgttcattacccccataggaacctattgttatatgacaatgcccttcgggttaaagaatgcaggtcctacttttcagcgtactactcgaatttctttgggtagccaaataggacgtaatgttgaggcttatgtcgatgacttggttgtaaagacgcgcaaccaagagactttactctcagatctagccgaaacttttgaaagtctccgctccgcccgcataaaattgaaccccgataagtgcgtattcggtgtacctgcgggcaaacttctcgggttcttgtgtgtcaccggttgcatggccgccctaagtcgtttcatatcgaggctgggagagaaggcgctacccctatttaagctcctcaaacgctctgggccgtttgcttggacggaggaagctgaacatgccctcattcgattgaaggcatatctcagctctcctccggttctggtcgccccagagccaaatgagcccctgctactctacttagcggcgaccccccaagtagttagcgcagcgttggttgtggagcgtgatgaggacaatcctcattccgcgcacccccaccctgtgctgacttggcccgggagcgagcagggaggagaggcccccgagccgaacggtggcctaaggcctctgacgaccggagtcggccctctgcccgctcgtcagacggtgatgggtgcccccgaccctcaggaaggccccgaggccactgcgggaaggccgcacctatcgccctttgaccccgaggctaaccctgtgcggactcgacccaggggagagcagggagaagaggcccccgagccgaacggtggcctaaggcccctgacgaccggagttgggcctctgcccgctcgtccgacgacgccaggagcccccgacccccaggacggccccgaggccactgtgggaaggccgcccctgtcctcctccgaccccgaggtcatcggcacagaaagcgagtgcgccccgagaggccacttggacgaagagcgccccggggatatggcccctagcgaagagaatcggccccgccgaaaggtgcagcggcctgtctactttgttagcgaggccctccgggacgccaagacccgataccctcaggcccagaagatgctttacgctattctgatggcctcgaggaaactgcgccattatttccaggcgcatcgggtcactgtggttacgtcttaccccctcggtcaaatcttgcataatcgagaaggtacaggacgggtggtaaaatgggcaatcgagctttctgagttcgatttgcactttgaaccacgccacgctatcaagagccaggccctcgccgattttgtggcagagtggaccccggctccagagaccgtttcagtctctgaggccagctcggacccctcgcagctgcctcacaccgcccattgggtgatgcagtttgacggctccctgtctcttcagggtgccggtgcgggggtcacgataacttctccgagcggagacgtcctcagatacttggtccgtctcgactttcgagcgaccaataatatggcagagtacgaggggctccttgccggactcagagtggcagctggactggggatccgccgcctcttggtgttaggcgactctcagctggttgttaaccaagtctgtaaggagtaccggtgctctgacccgcagatggacgcctacgtgcgccaagtacggcgcatggagcgccattttgacgggatagagcttcggcacgtgcccagacgggataatatgatagccgacgaactctcacgactcgcgtcctcgcgagcccagaccccaccgggcgtctttgaagaaaggcttgcccagccgtcggcgcgacccgaccccttaagggagacggacgcgcctgatcggcccccgaggcccgtcggagcccaggcctcgggacccgaggggagcgctcctagctcccttagattgattgcttggatctatgagatccaagcatacctcacagataagactctacctgaggaccgcgaagggagtgaacgcgtccaacgcatttccaaacgctacgtgctggtagaagggatcctctatcggcgcgcggctaacggaatcctcctgaagtgcattcctcaggaacaaggcgttgagcttcttgccgatatccatgaaggcgagtgcggagcccattccgcctcgcgcaccttggttggcaaggcctttcgtcaaggattctattggccgacagctctcaatgacgcggtcgacctggtccggcgatgcagagcgtgtcagttccacgccaagcaaatccaccagccggcccaggccctgcagatcataccactttcatggccatttgctgtctgggggctcgatatcctgggaccgtttaggcgggccccgggcgggtttgagtatctgtatgtcgcgatcgacaagttcactaagtggcccgaggcttatccggtcatcaagatcgataagcactccgcgcttaaattcattaagggcatcacggcccggtttggagtgcctaaccgtattattacggataacggcacccaattcactagtgaactcttcggcgactactgcgaagacatgggcatcaagctctgcttcgcctcacctgcccaccccagaagcaatggtcaagtggagcgcgccaatgcagaaatcctcaaaggccttaaaaccaagaccttcaatattctcaagaagcacggcgattcatggatcgaggagttgccagcggtgctctgggcaaaccgaaccacaccaagccgagcaaccggggaaacgcctttcttcctcgtttacggcgcagaagcggttctcccatccgagctcaccctgaggtctcctcggaccaccatgtactgcgaggctgatcaagatcagcttcgtagagatgacctcgactacttggaagaacgaaggcggcgtgcggccctccgagccgcacgctaccagcagagcctgcggcgctaccatcagcgccacgtccgggcccgatcactttgcgtcgacgacctcgtcttacgccgcgtccaaacgcgtgctggattgagcaagctctcaccaatgtgggagggtccgtatcgagtgatcggcgtcccccggccgggctccatacggctggccacgggcgacggcactgagttgcctaacccatggaacatcgagcaccttcgtcgcttctacccctga

SEQ ID NO: 48206 - DNA, 5520 bp, Oryza sativa
  Clone ID: PAT_MRT4530_50903C.1
atggctgagcaagcaaaggcacccgacctctctcccagtgtgagtggcgacgacggggagccgaatccacgccgtcgagctcgtactccaccgccccctcctcgccaaagtcctaagcagggggaggcgctcgaaagggtcgaaagatccgcggtttcaccgatcgcgggcgatggaggagaacggcgagatggggagcgtcgcctcctcgtctacggcgacggcagcacgccccagggtgcgctccaagctgcgggcgcgctcttacgccacccacctgtcgtccctgacccggaatctccagcccaacgatggctggacgacgtggccaaattggtcatgacggcgcggcagcgcctagatgttggtgggcggtcctccgccaccaagacctctggtgctgctaccactggctccgcgtcgtcaagacgaagggcacgacgagcggcggccgctgttcgccgttcggtagccactccctcatcgactccttcgacccgagaagatctgcgtagggagcaggacgcccgcgccagcctcgagcgccggcgtaatgaccgaagtgctgcccacgcgatggaaggcgcttcctcgtccagagtgtcacctcgacacggacgcgggaatcagccctccgtgcccccggttggtggtgttggctgtagagccttcgtggcgagtcttcggaatgtccgttggcccccaaggttccggcccaccatcgccgaaaaatatgatggcagcgtcaaccccgccgagtttctccaggtctacacgaccgggattgaggccgccgggggtgacgacagggtcatggcgaatttctttcccatggccctgaaggggcaagcacggggttggctaatgaacttgccacccgcgtctgtccactcctgggaggatttgtgccagcagttcaccatgaacttccaaggcacgtatccgcgccccggtgaggaagcggacttgcacgctgtacagcgaagggacgatgagtcgcttcgatcgtacattcagcggttttgtcaagtccgcaataccataccatgcatccctgcacacgcagtaatctacgcgttcagggggggtgtgcggcacaaccgcatgctcgaaaagatcgcctcaaaagagccccagaccaccgcagagctttttcagctcgcggaccgagtggctcgcaaggaggaggcctggacttggaacccctccggttccggagtggcagcctcggccgcccccggatccgccgctcagccaggacggcgtgacaggaggaggaagaagaggtcagtccgttccgacgacgagggtcatgtcctcgccgtcgagggcacttcacgggccacccgaaaggggaggcctgcgagcgacaaaaagaaggaggccagcgtccccagcagggagcgccctaccggcaagtggtgcaccgtccacaatacctccctccatgaccttgcggactgtcgcgcagtcaaaagcttggctgagcgaacaaggaagtgggaggaggagaggaggcaggagcgccgggaaggcaagtccccggcggttccttccggccgtcggcgaagtgaggccaagcagaaggcccccgccgaggacatcgatgatgacgatgatgacctaggtttccaagaacctggggccaccattgccactgtcgatgggggagcgtgtgctcacgtctctcgccggagcctcaaggccatgaagcgagagcttctggccgcggcccctactcatgaggcgacgcgccgggcgcggtggtcggaggttgccctcactttcgaccagaccgaccacccaccgtgcgtcgcccggggagggcagattgcgatggtggtttcccccaccatctgcaacgtgaagttggggcgtgtcctcatagatgggggagcggccctcaacatcatttcccccgcggcttttgatgccatcaaggccccggggatggtgctccagccgtcccaaccgattatcggtgtgacgccggggcacacttggccgctaggtcatatcgacctcccggtcacctttggtggacccaccaatttccgcacggagcgggtaaacttcgatgtggcggacctcagtctgccctacaacgcggtcctggggaggcccgcgttggtgaagttcatggcggctgtccactacgcctacctccagatgaagatgccgggccccggtggccccatctctgtccatggcgacctgaaagtcgcgcttgcttgcatggagcagcgcgcggaccacctcgctgctgcgtctaagcccgagggtggtgacgagaggcttggcacctccgcccccactgccccgaggcagcggattgtcacatgcgccgaggtccccgtcaaggaggaagacgcgctcgtctccttcctgcgggcaaacgctgacgtcttcgcatggagaccggcggatatgcccggggtccccagggaggtgattgagcaccgtctcgccgtgcggccgggcgcaaggccggtccggcagaaagtgcggcgccaggccccggaacgtcaagccttcatccgcgaggaggtggcgcgacttctggaggccggattcatccgcgaggtcatccaccgggagtggctggcgaacccggtggtcgttcccaaggcgaacggcaagcttcggatgtgcatcgactacaccgaccttaacaaggcatgtcctaaggatccttatcccttgcctcgcatagatcagattgtcgactccacagcggggtgcgaccttttgtgttttctagatgcatattctggttaccatcagattcgcatggctagggaagatgaggaaaaaactgcgttcattactcccataggaacttattgttatacgacaatgccctttgggttaaagaatgcaggtcctacttttcaacgtactactcgaatttctttgggtagccaattaggacgtaatgttgaggcttatgtcgatgacttggttgtaaaaacgcgcaaccaggaaacgttgctttcagatttagcggaaacttttgagagcctctgctccgcccgtataaaattgaaccccgataagtgtgtgtttggtgtacctgcgggcaagcttctcgggttcttggtctctgcccgaggcatcgaggccaaccccgagaagatacgagctatagagcgaatgcgcccccccagtaaacttagggatgtacaatgtgtcaccggttgcatggccgccctaagtcggttcatatcgaagctgggagagaaggcgttacccttatttaagctcctcaagcgctccgggccgtttacttggacggaggaagctgaacgcgccctcactcagttgaaagcatatctcagctctcctccgatggtgctgggcgcccccgaccctcaggaaggccccgaggccactgcgggaaggctgcacctatcgccctctgaccccgaggctaaccctgtaccgattcgacccgggagggagcagggagaagaggcccccgagccgaacggtggcctaaggcccctgacgaccagagttggccctttgcccgcttgtccgacgacgccaggagcccccgacacccaggacggccgcgaggccactgtgggaaggccgcccctgttgtcctccgaccccgaggtcatcagcacagaagacgagtgcgccccgaggggccacttggacgaggagcgccccgggtatatggcccatagcgagggggatcggccccaccgaaaggcgcatcgggtcgctgtggttacgtcttaccccctcggtcaaatcttgcataatcgagagggtacaggacgagtggtaaaatgggcaatcgagctttctgagttcgatctgcactttgaaccacgccacgctatcaagagccaggccctcgccgattttgtggcagagtggaccccggctccagagaccgtctcaatccccgaggccggcacggacccctctcagctgcctcacgccgcccactgggtgatgcagttcgacggttcgctgtctctccagggcgccggtgcgggggtcatgttgacctctccgaacggagacttcctcagatacttggtccgtctcgactttcgagcgactaataatatggcagagtacgagggactccttgccggactcagagtggcagctggactggggatccgccgcctcttggtgttaggcgactcccagctggtcgttaaccaggtctgtaaggagtaccggtgctctgacccacagatggacgcttacgtacgccaagtgcggcgtatggagcgccattttgacgggatagagcttcggcatgtacccagacgggataacatggttgccgacgaactctcacggctcgcgtcctcgcgagcccagaccccaccgggcgcctttgaagaaaggcttacccagccgtcggcgcgacccgaccccttaggggagacggatgcgcctgaccggcccccgaggcccgtcggagtccaggcctcgggacccgaagggagcgctccaagctcccttagattgattgcttggatctctgagatccaagcatacctcgcagataagactctacctgaggaccgtgaagggagtgaacgcgtccaacgcatttccaaacgctacgtgctggtagaagggaccctctatcggcgcgcggccaacggaatcctcctgaagtgcattcctcaggaacaaggcgttgagcttcttgccgacatccatgaaggcgagtgcggagcccattccgcctcgcgcaccttggttggcaaggcctttcgtcaagggttctattggccgacagctctcaatgatgcagttgatttggtccggcgatgcaaagcgtgtcagtttcacgccaagcaaatccatcagccggcccaggccctgcagatcataccactttcgtggccatttgctgtctgggggctcgatatcctgggaccgtttaagcgggccccgggcgggtttgagtacctgtatgtcgcgatcgacaagttcactaagtggcccgaggcttatccggtcgtcaagatcgataagcactctgcacttaaattcattaagggcatcacggcccgttttggagtgcctaaccgtattattacggataatggcacccaattcactagtgaactcttcggcgactactgcgaagacatgggcatcaagctctgcttcgcctcacctgcccaccccagaagcaatggccaagtggagcgcgccaatgcagaaatcctcaaaggccttaaaaccaagaccttcaatattctcaagaagcatggcgattcgtggatcgaggagttgccagcggtcgtccccttcctccagccacccgcctccgacggcaaccgccgccgaatccgccacgtcgccgcctcctccgctcttcccgcgcccacgccgcgccgctcccgcgtccccctcccacgtcgccgcctctcccccgcgtctcccgccctcgcgcgcctcgcaaatgggcgggattcgaatttgaatcccacccctctctctctcccccaccttcccacgtcgccggcgcaatag

SEQ ID NO: 48207 - DNA, 370 bp, Oryza sativa
  unsure (1)..(370): unsure at all n locations
  Clone ID: PAT_MRT4530_50904C.1
atccacgcgttctcccactcgtccccaatgaaggcctgtctaccccttctctccggcgtcgggcctctttagaccggtgcgcgacctcctnaaacatatctagtacctgctccgttccaagtgtttgccctgcctttagttcatcatggtctgatacgtctaccgttatttctacatatcctatttgttactattttcacatttacattaatttttctcttttttacatattttaatcatagcgttcaacttatagcgttgggtcgttttttgtaggagcttgattctctgtctgccaagctactcctgatgctattctttccgtatcatctggcttcgacaacgtcaggcatgtgctagcttatcaatt

SEQ ID NO: 48208 - DNA, 4428 bp, Oryza sativa
  Clone ID: PAT_MRT4530_50905C.1
atggctgagcaaacaaaggcacccgacctctctcccagtgtgagtggcgacgacggggagccgaatccacgccgtcgagctcgcactccaccgccccctcctcgccaaagtcctaagcagggggaggcgctcgaaagggtcgaaagatccgcggcttcaccgatcgcgggcgatggaggagaacggcgagatggggagcgtctcctccttgtctacggcgacggcagcacgccccagggcgcgctccaagctgcgggcgcgctcttacgccacccgcctgtcgtccctgacccggaatctccagcccaacgatggctggacgacgtggccaaattggtcatgacggcgcggcagcgcctagatgctggtgggcggtcctccgccaccaagacctctggtgctgctaccactggctccgcgtcgtcaagacgaagggcacgacgagcagcagccgctgttcgccgttcggtagccactccctcatcgactccttcgacccgagaagatctgcgtagggagcagggcgcccgcgccagcctcgagcgccggcgtaatgaccgaagtgctgcccacgcaatggaaggcgcttcctcgtccagagtgtcacctcgacacggacctgggaatcagccctccgtgcccccggttggtggtgttggctgtagagccttcgtggcgagtcttcggaatgtccgttggcccccaaggttccggcccaccatcgccgaaaaatatgatggcagtgtcaaccccactgagtttctccaggtctatacgaccgggattgaggccgctgggggtgacgacagagtcatggcgaatttctttcccatggccctgaagggacaggcgcggggttggctaatgaacctgccacctgcgtcggtccactcttgggaggatttatgccaacagttcaccatgaactttcaaggcacttatccgcgcccaggcgaagaagcggacttgcacgcggtacagcgaggggatgatgagtcacttcgctcgtacattcagcggttttgccaagtccgcaataccataccatgcatccctgcacacgcggtgatctacgcgttcaggggtggtgtgcggcacaaccgcatgctcgaaaagatcgcttccaaagagccccagactaccgcggagctttttcagctcgcagaccgagtggctcgtaaggaggaagcatggacctggaacccctccggttccggagtgacagcttcggccgcccccggatccgccgctcagacagggcagcgtgacaggaggaggaagaagaggtcggtctattccggcgacgagggtcatgtcctcgccgtcgagggcgcttcacgggccacccgaaaggggaggccttcgagcgataaaaagaaggaggccagtgttcccagcagggagcgccctaccggcaagtggtgcaccgtccacaacacctccctccatgaccttgcggactgtcgcgcagtcaaaagcttggctgagcggacaaggaagtgggaggaggagaggaggcaggagcgccgggaaggcaagtccccggcggttccttccggccgtcggcgaagtgaggccaagcagaaggcccccgccgaggacatcgatgatggcgataatgacctaggtttccaagagcctggagctaccatagccactgtcgatggaggagcgtgtgcgcacgtttctcgccggagcctcaaggccatgaagcgagagcttctggccgctgcccctactcatgaggcgacgcgccgggcgcggtggtcggaggttgccctcactttcgaccagaccgaccacccaccgtgtgtcgcccggggagggcagattgcgatggtggtttcccccaccatctgcaacgtgaagttggggcgtgtcctcatagatgggggagcggccctcaacatcatttctcccgcggcttttgatgccatcaaggccctggggatggtgctccagccgtcccaaccgattatcggtgtgactccggggcacacatggccgttgggtcacatcgacctaccggtcacctttggtggatcaaccaacttccgcacggagcgggtgaacttcgatgtggcggacctcagtctgccctacaacgcggtcctggggaggcccgcgttggtgaagttcatggcggcggtccactacgcctacctccagatgaagatgccgggccccggtggccccatctctgtccatggcgacctgaaagtcgcgctcgcttgcatggagcagcgcgcggaccacctcgctgctgcgtccaagcccgagggtggtgacgagaggcttggcacctccgcccccgccgccccgaagcagcggatagtcacgtccgatgaggtcccggtcaaggaggaagacgcgctcgtcttctttctgggggcaaacgctgacgtcttcgcatggagaccggcggatatgcccggggtccccagggaggtgatcgagcaccgtctcgccgtgcggccgggcgcaaggccggtccggcagaaagtgcggcgccaggccccggaacgtcaagccttcatccgcgaggaggtggcgcgacttctggaggccggattcatccgcgaggtcatccacccggagtggctggcgaacccggtggtcgttcccaaggcgaacggcaagcttcggatgtgcatcgactacaccgaccttaacaaggcatgtcctaaggatccttaccccttgcctcgcatagatcagattgtcgactccacagcgggccaattaggacgtaatgttgaggcttatgtcgatgacttggttgtaaaaacgcgcaaccaggaaacgttgctttcagatttagcggaaacttttgagagcctccgctccgcccgcataaaactgaaccccgataagtgtgtgtttggtgtacctgcgggcaagcttctcgggttcttggtctctgcccgaggcatcgaggccaaccccgagaagatacgagctatagagcggatgcgcccccccagtaaacttagggatgtgcaatgtgtcaccggttgcatggccgccctaagtcggttcatatcgaagctgggagagaaggcgctacccttatttaagctcctcaagcgctccaggccgtttacttggacgaaggaagctgaacgcgccctcactcagttgaaagcatatctcagctctcctccggttctagtcgccccggagccaaacgagcccctgctactctacttagcggcgaccccccaagtagttagtgcagcgttggttgtggagcgcgatgagggcaatcctcattccgcgcacccccaccctgtgctgacttggcccgggagcgagcagggaggagaggcccccgagccgaacggtggcctaaggcccctgacgaccggagtcggccctctccccgctcgtcagacggtgctgggcgcccccgaccctcaggaaggccccgaggccactgcgggaaggccgcacctatcgccctttgaccccgaggctaaccctgtaccgattcgacccgggagggagcagggagaagaggcccccgagccgaacggtggcctaaggcccctgacgaccagagttggccctttgcccgcttgtccgacgacgccaggagcccccgacccccaggacggccctgaggccactgtgggaaggccgcccctgtcgtcctccgaccccgaggtcatcggcacagaagacgagtgtgccccgaggggccacttggatgaggagcgccccggggatatggcccttagcgaaggggatcggccccaccgaagggtgcagcggcccgtctactttgttagcgaggccctccgagacgccaagacccgataccctcaggcccagaagatgctttacgctattctgatggcctcgaggaaactgcgccattattttcaggcgcatcgggtcactgtggttacgtcttaccccctcggtcaaatcttgcataatcgagagggtacaggacgagtggtaaaatgggcaatcgagctttctgagttcgatctgcactttgaaccacgccacgctatcaagagccaggccctcgccgattttgtggcagagtggaccccggctccagagaccgtctcaatccccgagggcagcacggacccctctcagctgcctcacaccgcccactgggtgatgcagttcgacggttctctgtctctccagggcgccggtgcgggggtcacattgacctctccgaacggagacgtcctcagatacttggtccgtctcgactttcgagcgactaataatatggcagagtacgagggactccttgccggactcagagtggcagctggactggggatccgccgcctcttagtgttaggcgactcccagctggtcgttaaccagataagactctacctgaggaccgtgaagggagtgaacgcgtccaacgcatttccaaacgctacgtgctggtag

SEQ ID NO: 48209 - DNA, 6093 bp, Oryza sativa
  Clone ID: PAT_MRT4530_50906C.1
atggctgagcaagcaaaggcgcacgacctctctccgagtgtgagtggcgacgacggggagccgaacccacgccgtcgagctcgtactccgccgtcccctccacgccaaagtcctaggcgggagaaggcgcccgagagggctgaaggatccgcgacttcgacatccacaggaggtggaaaagggcggcgagatggggagcgtcgcctcctcgtctatggtgacggcagcacgccccagggcgcgctccaagctgcgggcgcgctcctacgtcacccgcctgtcgcccatgacccggagtctccagcccaacgttggctggacgatgtggccaaattggtcatgactgcgcggcagcgcctagatgctggtgggcggtcctccgccaccaaggcctctggtgctgctaccaccggctccgcgtcgtcaagacggagggcacgacgagcggcagccgctgttcgccattcggccgccactccttcgtcgactccttcgacccgggaagatctgcgtggggggccggacgcccgcgccagcatcgagcgccggcgtaatgaccgacgtgctgcccacgcaacggagggcgcttcctcgtccagagtgtcacctcgacacggacgcggggaccagccctccgtgcccccggttggtggtgtcggctgtagagcctttgtggcgagtcttcggaatgtccgttggcccccaaggttccggcccaccatcgccgaaaaatatgatggcagcatcaaccccgccgagtttctccaggtctacacgaccgggattgaggccgccgggggtgacgacagggtcatggcgaatttctttcccatggccctgaaggggcaggcgcggggttggctaatgaacttgccacccgcatctgtccactcttgggaggatttgtgccaacagttcaccatgaacttccaaggcacatatccgcgccccggtgaggaagcggacttgcacgcagtacagcgaagggacgatgagtcacttcgatcgtacattcagcggttctgtcaagtccgcaataccaaaccatgcatccctgcacacgcggtaatctacgcgttcagggggggcgtgcggcacaaccgcatgctcgaaaagatcgcctccaaggagccccagactaccgcggagctttttcagctcgcggaccgagtggctcgcaaggaggaggcctggacttggaacccctccggttccggtgtggcagcttcggccgcccccggatccaccgctcagacagggcggcgtgacaggaggaggaagaagaggtcagtccattccgacgacgagggtcatgtcctcgccgtcgagggcgcttcgcgggccacccaaaaggggaggcctgcgagcgacaaaaagaaaaaggccggcgctcccagcagggagcgcccagccggcaagtggtgcgccgtccacaacacttccctacacgacctcgcggactgccgtgcagtcaaaagtttggctgagcggacgaggaagtgggaggaggagaggaggcaggagcgccgagagggcaagtccccggcggttccttccggcaatcggcgaagtgaggccaagcagaaggcccccgccgaggacatcgatgacggcgatgatgacctaggtttccaagagcctggggccaccgttgccactgtcgatgggggagcgtgtgctcatgtttctcgccggagcctcaaggccatgaagcgagagcttctggccgcggcccctactcatgaggcgacgcgccgggcgcggtggtcggaggttgccctcactttcgaccagaccgatcacccaccgtgcgttgcccggggagggcagattgcgatggtggtttctcccaccgtttgcaacgtgaagttggggcgtgtcctcattgatggaggagcagccctcaacatcctttcccccgcagcctttgatgccatcaaggccccggggatgatgctccggccgtcccagccaatcatcggtgtgacgccggggcacacttggccgctaggtcatatcgacctcccggtcaccttcggtggacccgccaatttctgcacggagcgggtgaacttcgatgtggcggacctcagtctgccctacaacgcggtcctggggaggcccgcgttggtaaagttcatggcggcggtccactacgcctacctccagatgaagatgccgggccccgatggccccatctctgtccatggcgacctcaaagtcgcgctcgcttgtatggagcagcgcgcggaccgcctcgccgtcgtgtccaagcccgagggtggcgatgagaggcttggcacatccgcccccgccgccccgaggcagcggatagtcacgagcgatgaggtcccggtcaaggaggaagacgcgctcatctctttcctgcgggcaaacgctgacgtcttcgcatggagaccggcggatatgcccggggtccccagggaggtgattgagcaccgtctcgccgtacggccgggcgcaaggccggtccggcagaaagtgcggcgccaagccccggaacgtcaagccttcatccgcgaggaggtggcgcgacttctggaggccggattcatccgcgaggtcatccatccggagtggctggcgaacccggtggtcgttcccaaggcgaacggcaagcttcggatgtgcatcgactacaccgaccttaacaaggcatgtcctaaggatccttaccccctgcctcgcatagatcagattgtcgactccacagcggggtgcgaccttttgtgttttctagatgcatactctggttaccatcagattcgcatggctagggaggatgaggaaaaaactgcgttcattacccccataggaacttattgttatacgacaatgcccttcgggttaaagaatgcaggtcctacttttcaacgtactactcgaatttctttgggtagccaattaggacgtaatgttgaggcttatgtcgatgacttggttgtaaagacgcgcaaccaggaaacgttactttcagatctagcggaaacttttgagagcctccgctccgcccgcataaaactgaaccccgataagtgcgtgttcggtgtacctgcgggcaagcttctcgggttcttggtctctgcccgaggcatcgaggccaaccccgagaagatacgagctatagagcggatgcgcccccccagcaagcttagggatgtgcaatgcgtcaccggttgcatggccgccctaagtcggttcatatcgaggctgggagagaaggcgctacccttatttaagctcctcaaacgctccgggccgtttacttggacggaggaggctgaacgtgccctcactcagttgaaggcgtatctcagctctcccccagttctggtcgccccggagccaaatgaacccttgctactctacttagcggcgaccccgcaagtggttagtgcggcgttggtcgtggagcgcgatgaggacaatcctcattccgcgcacccccaccttgtgcagacttggcccgggagagagcagggaggagaggcccccgagccgaacggtggcccaaggcccccgacgaccggagatggccctctgcccgcttgtcagacggtgctaggagcccccgacccccaggaaggccccgaggccactgcgggaaggccgcacctatcgccctctgaccccgaggctaaccctgtgccgattcgacccgggagagagcagggagaagaggcccccgagccgaacggtggcctaaggcccctgacgaccggagttggccctttgcccgcttgtccgacgacgccaggagtccccgacccccagggcggccccaaggccactgtgggaaggccgccccagtcgtcctccgaccccgaggtcgtcggcacagaagacgagtgcgccccgcgaggccgcttgggtgaagagcgccccagggatgcggcccctagcgaagaggatcggccccaccgaaaggtgcagcggcccgtctactttgttagtgaggccctccgggatgccaagacccgatatcctcaggcccagaaaatgctttacgctattctgatggcctcgaggaaactgcgccattatttccaggcgcatcgggttacggtggttacgtcttaccccctcggccaaatcttgcataatcgagagggtactggacgggtggtgaaatgggcaatcgaactttctgagtttgatttgcactttgaaccgcgccacgctatcaagagccaggccctcgccgactttgtggcagaatggaccccggctcccgagcccgtctcggtccccgaggccagcacggacccctcgcagctgcctcacaccgcccactgggtgatgcagttcgacggctccctgtctcttcagggcgccggtgcgggggtcacgttgacctctccgagcggagacgtcctcaaatacttggtccgcctcgactttcgagcgaccaataatatggcagagtacgagggactccttgccggactcagagtggcagctggactggggatccgccgcctcctggtgttaggcgactcccagctggtcgttaaccaagtctgtaaggagtaccggtgctctgacccgcagatggacgcctacgtgcgccaagtacggcgtatggagcgccattttgacgggattgagcttcggcatgtgcccagacgggataacatgattgccgacgaactctcacggctcgcgtcctcgcgagcccagaccccaccgggcgcctttgaagaaaggcttgcccagccgtcggcgcgacccgaccccttaggggagacggatgcgcctgaccggcccccgaggcccgtcggagtccaggcctcgggacccgaggggagtgctcccagctcccttagattgattgcttggatcgccgagatccaagcatacctcacagataagactctacccgaggaccgcgaagggagtgaacgcgtccatcgcatctccaaacgctacgtgctggtagaagggaccctctatcggcgcgcggctaatggaatcctcctgaagtgcattcctcgggaacaaggcgttgtgcttcttaccgatatccatgaaggcgaatgcggagcccactccgcctcgcgcaccttggttggtaaagcttttcgccaaggtttctattggccgacagctctcaatgatgcggtcgacctggtccgccgatgtagagcgtgtcaattccacgccaagcaaatccatcagccggcccaggccctgcagaccataccactttcgtggccatttgctgtctggggactcgatatcctgggaccgtttaggcgggccccgggcgggtttgagtatctgtatgtcgcgatcgacaagttcactaagtggcccgaggcttatccggtcgtcaagatcgataagcactccgcacttaaattcattaagggcatcacggcccggtttggagtgcctaaccgtattattacggataatggcacccaattcactagtgaactcttcggcgactactgcgaagacatgggcatcaagctctgcttcgcctcacctgcccaccccagaagcaatggccaagtggagcgcgccaaagcggaaatcctcaaaggtcttaaaaccaagaccttcaacatactcaagaagcacggcgattcatggatcgaggagttgccagcggtgctctgggcaaaccgaactacaccaagccgagcaaccggggaaacgcctttcttcctcgtctacggcgcggaagcggttctcccatctgagctcaccctgaggtctcctcgggccaccatgtactgcgaggctaatcaagatcagcttcgcagagatgacctcgactacttggaagagcgaaggcggcgcgcggccctccgagtcgcgcgctaccagcagagcctgcggcgctaccatcagcgtcacgtccgggcccgatcactctgcgtcgacgacctcgtcctacgccgcgtccaaacgcgtgctggattgagcaagctctcaccaatgtgggagggtccgtatcgagtggtcggcgtcccccgaccgggctccatacggctggccacgggcgacggcactgagctgcctaacccgtggaacatcgaacaccttcgtcgcttctacccctga

SEQ ID NO: 48210 - DNA, 3630 bp, Oryza sativa
  Clone ID: PAT_MRT4530_50907C.1
atggccgagcaagcaaaggtgcacgacctctctccgagtgtgagcggcgacgacggggagccaaacccacgccgtcgagctcgtactcccccacctcctcctcgccaaagtcctaagcagggggaggcgctcgaaagggtcgaaagatccgcggcttcaccgatcgcgggcgatggaggagaacggcgagatggggagcgtcgcctcctcgtctacggcgacggcagcacgccccagggcgcgctccaagctgcgggcgtgctcttacgccacccgcctgtcgtccctgacccggaatctccagcccaacgatggctggacgacgtggccaaattggtcatgacggcgcggcagcgcctagatgctggtgggcggtcctccgccaccaagacctctggtgctgctaccactggctccgcgtcgtcaagacgaagggcacgacgagcagcagccgctgttcgccgttcggtagccactccctcatcgactccttcgacccgagaagatctgcgtagggagcagggcgcccgcgccagcctcgagcgccggcgtaatgaccgaagtgctgcccacgcaatggaaggcgcttcctcgtccagagtgtcacctcgacacggacgtgggaatcagccctccgtgcccccggttggtggtgttggctgtagagccttcgtggcgagtcttcggaatgtccgttggcccccaaggttccggcccaccatcgccgaaaaatatgatggcagcgtcaaccccgccgagtttctccaggtctacacaaccgggattgaggccgccgggggtgacgacagggtcatggcgaatttctttcccatggccctgaaggggcaagcacggggttggctaatgaacttgccacccgcgtctgtccactcctgggaggatttgtgccagcagttcaccatgaacttccaaggcacgtatccgcgccccggtgaggaagcggacttgcacgctgtacagcgaagggacgatgagtcgcttcgatcgtacattcagcggttttgtcaagtccgcaataccataccatgcatccctgcacacgcagtaatctacgcgttcagggggggtgtgcggcacaaccgcatgctcgaaaagatcgcctccaaagagccccagactaccgcagagcttttttagctcgcggaccgagtggctcgcaaggaggaggcctggacttggaacccctccggttccggagtggcagcttcggccgcccccggatccgccgctcagtcagggcggcgtgacaggaggaggaagaagaggtcagtccgttccgacgacgagggtcatgtcctcgccgtcgagggcgcttcacgggccacccgaaaggggaggcctgcgagcgacaaaaagaaggaggccagcgttcccagcagggagcgccctaccggcaagtggtgcaccgtccacaacacctccctccatgaccttgcggactgtcgcgcagtcaaaagcttggctgagcggacaaggaagtgggaggaggagaggaggcaggagcgccgggaaggtaagtccccggcggttccttccggccgtcggcgaagtgaggccaagcagaaggcccccgccgaggacatcgatgatggcgataatgacctaggtttccaagaacctggggccaccattgccactgtcgatgggggagcgtgtgctcacgtctctcgccggagcctcaaggccatgaagcgagagcttctggccgcggcccctactcatgaggcgacgcgccgggcgcggtggtcggaggttgccctcactttcgaccagaccgaccacccaccgtgcgtcgcccggggagggcagattgcgatggtggtttcccccaccatctgcaacgtgaagttggggcgtgtcctcatagatgggggagcggccctcaacatcatttcccccgcggcttttgatgccatcaaggccccggggatggtgctccagccgtcccaaccgattatcggtgtgacgccggggcacacatggccgttgggtcacatcgacctaccggtcacctttggtggatcagccaacttccgcacggagcgggtgaacttcgatgtggcggacctcagtctgccctacaacgcggtcctggggaggcccgcgttggtgaagttcatggcggcggtccactacgcctacctccagatgaagatgccgggccccggtggccccatctctgttccatggcgacctgaaagtcgcgctcgcttgcatgaagcagcgcgcggaccacctcgttgctgcgtccaagcccgagggtggtgaagaaaggcttggcacctccgcccccaccgccccgaggcagcggattgtcacatgcgccgaggtcccggtcaaggaggaagacgcgctcgtctccttcctgcgggcaaacgctgacgtcttcgcatggagaccggcggatatgcccggggtccccagggaggtgattgagcaccgtctcgccgtgcggccgggcgcaaggccggtccggcagaaagtgcggcggcaggccccggaacgtcaagccttcatccgcgaggaggtggcaagacttctggaggccggattcatccgtgaagtcatccatccggagtggctggcgaacccggtggtcgttccaaaggcgaacggcaagcttcggatgtgcatcgactacaccgaccttaacaaggcatgtcctaaggacccttaccccctgcctcgcatagatcagattgtcgactccaccgcggggtgcgaccttttgtgttttctagatgcatactctggttaccatcagattcgcatggctagggaggatgagaaaaaaactgcgttcattacccccgtaggaacctattgttatacatcaatgcccttcgggttaaagaatgcaggtcctacttttcaacgtactactcgaatttctttgggtagccaaatagggcgtaatgttgaggcttatgtcgatgacttggttgtaaagacgcgcaaccaagagactttactcttagatctagcggaaacttttgaaaatctccgctccgcccgcataaaactgaaccccgataaatgcgtgtttggtgtacctgcgggcaagcttctcgggttcttggtctctgcccgaggcatcgaggccaaccccgagaagatacgagctatagagcggatgcgcccccccagcaaacttagggatgtgcaatgcgtcaccggttgcattgccgccctaagtcgtttcatatcgaggctgggagagaaggcgctacccttatttaagctcctcaagcgctcggggccgtttacttggacggaggaagctgaaagtgccctcactcagttgaagacatatctcagctctcccccagttctagtcgccccggggccaaatgagcccctactactctacttagcggcgaccccccaagtagttagtgcagcgttggttgtggagcgcgatgaagacaatcctcatttcgcgcacccccgccctgtgctgacttggcccgggagcgagcagggaggagaagcccccgagtcgaacggtggcctaaggcccctgacgaccggagtcggccctctgcccgcttgtcagacggtgcttgactctccccaacaaacctcccccccggaggtgcattataaacg

SEQ ID NO: 48211 - DNA, 1533 bp, Oryza sativa
  Clone ID: PAT_MRT4530_50908C.1
ctatatattgtgtcccgccttctccgccgtcccctccgcggcctccttctctgctttccgcattgtccctgccatggccactacggtggcctttcctgccatggccaccgtcgcccctgccacggccactgtccccaccgacgccgcctggtctgagggcgtcaccgtgtggcggccgcggtggccgtggcggacgccgaggcacccaccaatacctctacatccgccggcgcctccacggtcgttgcggccaccacagccgccgccgctcaccacttgtgaaaccacggctgatacaccgatgctccaccaccacacaagctctgccgacatgtggaacccctgcaccggcgtcccccgccggccagccttcgtgcgccgaagaccgcgccactcccactggcagctcctcctcacacctaggtcgcctcctccaccgccggccgcgccactcacgccaaaccggcctcctccaccggatgcgcctctcgcgccattccagcctccctccatcggccgcgcctctcgcgccaagccggcctccatctccgccgcccgcgcctctcgcgccgagccggcctccactgccatcggctgcgcctctcgccaccgcagccgttgctgccgaacgcccagccacctcgctagcaacccgcatccgccgacgtcgccaccgtccacagccacggccgccgtcgccactgccatcgatgccagcctccgcctccgcaaaccgttgcgccgtcgtcctccgccaccaagcagccaactcgacgccaccgttgccagccgacgacgctgccaactgccacgagcaccacggcgggcacgattgtcgccgccgtcaccagcagccgtctggccggtcagcctccgctgcgtgccggccgggctgctcctccgagccgcgttgccgccgccgccgcgagctgttccgccgagtcgcgcccccgctgccgtgagctcgaggtcgcgccgccgtcgccgcaagcacgaggtcgcccgccgtcttgccgcgccgccgtcgtcgagagctcgaggccgcccgccgtcgccgcgagctcgggccgcccgccgacttgccgcatcgccgtcgccgcgagctcgaggccgcccgccgtcttgccgcgccgccgccgcccctctccagatctggccggcggggggccagatcctccatcggggaggccggatccgcgtccggcgcgaccggatccgccccgccggccgctccggccgccgccttccgccgtgcgtgcgtcgcgccgcctcccacgccgaggggttgctccgccgccggcacgttttccccgccgccgccttcccggccggccgcacggtttccggcggcgggctccggcggcggcgaggtggctggaggcgttgggagggggcggcgcgggcggctagggtttcgctcccgagccgctcgcgtgagagcggcgcgagagcttggggaaaaaaatttaggaactccgtggcggctggtgaccgacacagtgctgccaacctgatctccagctcagtcttcat

SEQ ID NO: 48212 - DNA, 767 bp, Oryza sativa
  Clone ID: PAT_MRT4530_50909C.1
ctcgggagcgaaaccctagccgcccgtgctgccccctcccaacgcctccagccacctcgctgccgccggagcccgctaccggaaatcgtgcggccggccgggaaggcggcggcagggaaaacgtgccggcggcggagcaccccctcggcgtgggaggcggtacgacgcacgcacggcggaaggcggcggacggagcggccggcggggcggatccggtcgcgccggacacggattcggcctccccggtggaggatctggccccctgccggccagatcgggagaggggtggcggcagcgcggcaagacggcgggcggcctcgagctcgcggcgacggcgacgcggcaagtcggcgggcggcccgagctcgcggcgacagcggcgctgcaagatggtgggcggcctcaagctcccgacgacggcggcgcgggagcaacccggtcggcacgcagcggaggctgaccggccaaacggctgttggtgacggcggcgacggtcgtgcccgccgtggtgctcgtggcagtttgcggcggtgtcggctagcaacggtggtgtcgggctggctacttggtggcagaggacgacggcgcagcggtttgcggaggcggaggctggcatcggtagcagcggtgacggcggccgtggctgtggacggtggcgacgtcagcggatgcgggttgctagcgaggtggctgggcgttcggcagcagcggctgcggtggcggtgactgtgtctgcggtcaccggaggcatggcggacttggatggc

SEQ ID NO: 48213 - DNA, 501 bp, Oryza sativa
  Clone ID: PAT_MRT4530_5090C.1
taagtttacataaaagtaccagctgctccccaaattaaatagatcctctgttctgttctgatggatagtattcactgatcaaatgaaataacgatataactctgtcttcaatttgacaattttaattcaatcttctggtcttggtaatgtccacacgtcaacaagtacgaaatatcacttttggctaatactccctcccatttttaaaatacaaaacactgttgagtttttgacatacgttcaccattagtttattcaaaagaaattatataattatcatttattttataacttgatttatggtccaatgtttttttaagcataactcgaattttctttatattttcacacaaaaaaatttgaataatgacttgatttatcgttaaatgttctttaagtatgacttaatttttttattaaaaatgaataataacttgatttatggttaaatgttatttaagctgacttgatttttctattttttttaaaaaaaaaaaaaaa

SEQ ID NO: 48214 - DNA, 2601 bp, Oryza sativa
  Clone ID: PAT_MRT4530_50910C.1
tcaggtagctagtttgatcgagtcgctttcttccctgaattttgcgagcttggagagctcgtcgacggcatccacgaggtggtccagccgcgccacgaactcgagcagcagcgacgcgaacgtggccagcgacagcgccgccgtgctctccagcgcgcgcaccctcaccatcatcgccgcgtatccgccgccggcctccgcctcctccagctcgtccgcctcccgcgacggccacgacagcctctgccgccgcgcgctctcgcgcagccgcgagcacgagcgctcgaggccgccgccgctcgtgatctcctccgccacggagccggacgagacgaggaggtgcgagttgagctccagcgcgagctggaggcggtaggcggagccgtgcacgctcttgagaaggctcagcctctcggcgctgcgcgtcatgccgtcgacgtcgccgccaaggacacggacgagctcggccgcctgcgccgtcgcgtcctcgatctccgcacggaacgcctccctgactccgtccggcgcctcgtaggcgcagtggcgcagcacggctccgacgcgggcgtagtgcgaccacgggaaggagaaggagcggaaccggccgtgcggcggctcccatctcgccgatctcgccaaggattcgatcctagcggatgcgttcaggatggcgcggcatttctcaattgctggttcgccgccgtcgacggccgtttcgtcgccgtggagcgagtcggcgacggcggcgaagctggcgacgagctcgcggtggagctgctcgccggcccacgccgggaagatgagcacgttgacgaggagcgccagcacggcgccgatggcgatggcgtaaagccggtcgaggccggcggcgacgggctcgccgacgcggtagaccgacaccatgatgaggcagtaggtgaagaggatcacccggaagccgtactcatacggcgccagcgccggcagctgcttcacgaacgacgtcacggccccaactaggaagatgcttaggccaatcacgtacggctcggcgacactgccgcatctgagcgaaatccagatcaccgcgatagcaacaactccggccaccatgctccccacggcccggttaaaccctcggttgaaactggcgccaacggtgtactcgaacatgatgccgacggtgaggatggaccagatgatgttggtgccgaacagcctgaagggctcgccgacgagcaccagcagcgacgccaggagcatcgcgaggccggccttgagggcgaacgccaccctgccggcgtcctcgctggcgaaagcccacgccgccgcggcggccgcccgggcgcaccgagggaagccgccaccgcagcagctcgcttcggtcatcgcctcgggcctcttggcgaagcccgggagcacggcgttcggcgacagtgtcacgtcgacggtgacaccgcccacggcgctgtcgccccggcggcggagcatcccctcggcgtgggaggcagcgcgacgcacgcacggcggaaggcggcggccggagcggccggtggggcggatccggtcgtgctggacgcggatccggcctccccggggaggatctggccccccggtggccagatcgggagaggggcggcggcggcgcggcaagacggtgggcggcctcgagctcgcggcgacggcgacgcgacaagtcggtgggcggcccgagctcgtggcgacggcggcgcggcaagacggcgggcggcctcgagctcccgacaacggcggcgcggcaagacggcgggcgacctcgtgcttgcggtgatggcggcgcgacctcgagctcacggcagtgggggcgcgactcggcggaacagcttgtggcggcggcggccgcgacagcgcggcagcgcggcgcggaggagcagcccggccggcatgcagcggaggctgaccggccagacggctgttggcgacggcggcgcggtcgtgcccgccgtggtgctcgtggcagttggcggcggcggcggctggcaacagcggcggaggacatggcggcggcgtcgagctggctgcttggtggcggaggatgacggcgcagcggtttgcggaggcggaggctggcgtcggtggcagcggcgacggcggccgtggctgtggacagtggcgacgttggcggatgcgggtcgctagcgaggtggctgggcgttcggcagcagcggctgcggtggcggtggcggtgaccgtgtctgcgatcaccggaggcatggcggactcggatggctagccgagggcgtggcagacgactgcttttggctggcacgacatcgtttggtggaggggtcggagaccggtttggcgcagagaggtgcagccgatggcagcggaggctggctcggcgcgagaggcgcgggcggcggagatggaggccggcttggcgcgagaggcgcggccgatggagggaggccggaatggcgcgagaggcgcgtccggtggaggaggccggtttggcgtgagtggcgtggccggcggtggaggaggcgacctaggtgtgaggaggagctgccgataggagtagcgcggtctttggcgcacgaaggctggccggcgggggacgccggtgcaggggttccacat

SEQ ID NO: 48215 - DNA, 4185 bp, Oryza sativa
  Clone ID: PAT_MRT4530_50911C.1
ctagtggagccgtatatgtaaatctgggtttgatgcttctaattccttgacttgaaccattaaatcgatgctgcagtctcgtattcttagacgttccaatgagaccgggaagccgtccttgggcagcgacatgatttccggacatccagcgatatttagtttatagagagaataaaggcaatgcaacccttcggggagggactgcagacgaaggcacttccggaatttcaggcattggagggaggtgaggagctgaagtgcctcttcctgttcttctgtgaagctttccatccacaaatcatacctgaatcgcaactcgcggaggttggcagcgaggagactgcaaatggggctaacaagcactgccgagatgctgtccacctcaagtttttccagctgttggaagtaggaacctcccgcaggtattactttcgtcatccttgttgccacctctaagaacaaatcatctgctaaagagtagagatgaatctcgtcatcggctttcttgtagaccaccaattccttgaggctgcacgtgatgagaggatcgaaaccatgcactgtcaggttatcacagtttatcagtgttagatgagtgagggacgtgagatttgtgagcagagccatggactgaatgctcaactcgtcgctgatattgagttccctgagggaagcagggaagaacttgttgctccgagctccggcctctaccatggaacaccgatcgaacatcttgccacatcccctaatttcgacttcttggagtgaggatagatcatggagaccccctccatccgccacaggaagaaccaggttcttgcagcaccagattctgacatagctcaataagttggaggatgggagttgcaatactgcttcctctccaacctcaaatgaagagaagatcaagtggaactcagtaagagctgggaaacggtttagtagctttgtcaatgaatttctggtaagacgacaatcactgatttcgagctgctgaactgaagggaagataacaccctcttcaacttcactaaataacatgctttcacatcctttgacggcaagtcttgttagggagctgagcttttggagatcagtcaatgaaacgtgtggcatttcttcgatactcatatcttctactttgtccaggttatcaaagaccaaagcacctctgtatccatgtgagatcagcttgttttcttgaagacgcaacaaatctgtcttacgctctgagacaataacacatgtcaacatggaagtgtgaggtatagggggcagtgacaacttggggcaattttcaatctcaagagaacacaggttggggaaccatctggtgtttatgtcttgtgcataggagacagagaacctagaggatggcacaagcagcatagagagattgggacaattttcacacctgatgcttgtaatctttgaaaacaaatggcaatgagctcccccaacccactccacaagttctggcatatcaacaaattcaactttcttcaagtgtgagaaactttgttgtgtaacaccaccaaaattaggttcaaaccgacgcgtgcttggaatattgttcaaagttagttcctctagctgcatcagttgaccaaaaggtgcgagaatgccccaagatacaccttctatatgcagagatttcaagtagtttacacaaatattaccacacaaccaactaggaccaatggaaccacctgggttctttatgacaagtgctttaagattagaaggtggttgaagaccttcaagaacatcagatcttgtggtccgttgcaccataccccaagctagctccaactttttcatattccgtttggacatcaattttgctttattagcttcttcccttgttgccactttctcaagattaaatattttcagttcaccttcaagatctgtcaaatcccctagctcacttagttcaaacccaatgtcccgttttttaacatggtactcttccaacctttgtaaatacttcatcttgccaatcccaggaatattggaacagagttcttttctagcatttaagaggcataaattgactagatgattgatgtcttttggcaaaatacatttactgtaccctaggtccaaaaatttcaagtgataaaatctacttactgcatttggtagagacagttctacgtcataaggtatttccaactttagataccgaaggtggatcagtttggaaaagttgtgcgggaaagattggagcgagtttgcatgcatgaatagaacacggagacgttttgtttcttttaataaatctttgaaaaggataagcatgcttgcattgccttctccaaaaagcatcaatgtccgtaaatttcctatgtctatttttctcttcaaattttccatttctctctcaaaactatcctcatagttatcttgtaaggtgatggatacatgacgaatggaccatggaatgttatcagacctgaaactgtatgaacttatattgatgcactcttgtgatgaaatattttgtgctagctcatgtaataagtcgtgcattacataatattgcctcccggtcctatcatcaactttcttcacaagaaaaccattaccttctagttcgtccaaatactttaatccaatatcctcagctctatttttatgacttccagaatctatgatgcctaatgcttcccaaaaatgactaatctctatattattaaaatggtagtcctcagggtaaagggcacaataagaaaaacacctttttagataaaagggaaggtagtcatagctaatttgtagtgctggcattatgtcatcattatttgtctgatgttgccactcatttctttcaagaatttctatccaacgttcctgtgaaatgcgatacttcaataatcgaccaacacttttggctgctagcgggaaacccttcaatttcttagaaatttttcttgcaatatcaattatgttgtcttcataatactcgggcttatcatgaccaaatatacattcttcaaaaaatgtgaagaattcactatccccaagaccttgcagttctattggcttagttgtttttaccatctgtgctatggatggaaatcgagttgtgacaagaaccatgctacctttggcatcccctttgctgaatggagctaataggcttccccactcagcttcactaccgcatttccacatatcatccaagacaagtaaaaatcttttggatttcagtctttgtgcaatggttatttggagctgatccaagttggataattcatccactctgcggcttccctcattttcagcatgatatatgcacttcaagatctcctgagtgagtttaaccacatcaaaatgagtagacacgcaaacccagacctttatagagaaatgtgcctctattgttttgtcattgtataggtattgggcgaaagttgtcttcccaattccaccaggaccaactataggaataactgatagtgttctactatgaatagtaaagttagtcatggcatcaagagtctgattaaagatgttttcccgcccatacaatttatcctgtgtaattgttgagctggtaggaggtcgcttcggtggtaatgcccttcctactgcaggatggataattttgagcaaattggatacaggtgtacatgaggcatgtatgccctctataaccaacttgattttattggacatgtctactcgattgaatgtcaacttgctaacatggtcaggaacatcactatgggacttgggtatatcatgtggatcatcggcgtcatctcgtgcagaggaacaacaaaaacatgaaagccagttaccggtggtatgatgaagagcatggcggccatggatgagcacttgaccacgaaggccatcgtctaccatgggagtggcctcatgggtgccgtcgatctggtcctggatgatgaagtactggagctcgtccaaaacatcctcagcctcgtcagcctgcttggtcaggatttctaggagcacccgtaggccatggttgtttctgacatctctctcttcggccgcgtcaagcagtccttgagtgtatgcaagatcggtcttgatttgctccatgttgaggccaagctctgtactggacacgtacgccgccaccatgccatcggacagctgtgtcaccacctttccgaggagccagctcgccgcaccgacggccacatccat

SEQ ID NO: 48216 - DNA, 158 bp, Oryza sativa
  Clone ID: PAT_MRT4530_50912C.1
actattatatgacgccctttatttatattttttctgggggaaaactttatcataaccaacttgttgaatatgccaaatttacttatacactttcctctcgtggtgctagtattatatcctttgaccaacatgttatcttgaacttaatttacaattgt

SEQ ID NO: 48217 - DNA, 780 bp, Oryza sativa
  Clone ID: PAT_MRT4530_50913C.1
atgggccccagaatcaagggccttgggtctctccgggagggcgagggccacctcgccgccgccggagcccgccgccggaaccgtgcgaccagccgggaaggcggcggcggggaaaacgtaccggcggcggagcatccccttggcgtgggaggcggcgcgacgcacgcacggcggaaggcggcggccggagcggccggcggggctgatccggtcgcgccggacgcggatccggcctccccggtggaggatctggccccccggcggctagatcgggagaggggcggcggcggcgcggcaagacggcgggcggcctcaagctcgcggcgacggcgacgcggcaagtcggcgggtggcccgagctcgcggcgacggtggcgcggcaagacggcgggcagcctcgagctcccgacgacggcggcggaggaacagcccgaccggcacgctgcgaaggctgaccggccagacggctgttggcgacggcggtggcggtcgtgcccgccgtggtgctcgtggcagttggtggtggcgtcggctggcaacagctgcggaggacatggcggcggcgtcgagctagctgcttggtggcggaggatgacggcgcagcggtttgcggaggcggaggctggcgtcggtggtagcggcgacggcggccgtggctgtggacggtggcgacgtcggcggatgcgggtcgctagcgaggtggctgggcgttcggcagcagcggttgcggtggcggtgaccgtgtctgcggtcaccggaggcatggcggactcggatggc

SEQ ID NO: 48218 - DNA, 1209 bp, Oryza sativa
  Clone ID: PAT_MRT4530_50914C.1
atgtggaacccctgcaccggcgtcccccgccggccagccttcgtcgcctcctccaccgccggccgcgccactcgcgccaaaccggcctcctccaccggatgcgcctctcgcgccatttcggcctccctccatcggccgcgcctctcgcgccaagccggccttcatctccgccgcccgcgcctctcgcgccgagccggcctccactgccatcggctgcgcctctctgcgccaagccggtctccgacccctccaccaaacgacgccacgccggccaaaagcagccgtctgccacgccctcggctagccatccgagtccgccatgcctccggtgaccgcagacacggtcaccgccaccgcagccgctgctgccgaacgcccagccacctcgctagcaacccgcatccgccgacgtcgccaccgtccacagccacggccgccgtcgccactaccaccgatgccagcctccgcctccgcaaaccgttgcgccgtcgtccttcgccaccaagcagccagctcgacgccaccgctgccagccgacgccgctgccaactgccacgagcaccacggcgggcacgaccgtcgccgccgtcaccaacagccgtctggccggtcagcctccgctgcgtgccggccaggctgctcctccgatccgcgttgccgcgccgtcgcggccgccgccgccgcgagctgttccgccgagtcgcgcccccgctgccgcgagctcgaggtcgcgccgccgtcgccgcaagcacgaggtcgcccgccgtcttgccgcgccgccgtcgtcgggagctcgaggccgcccgccgacttgccgcgtcgccgtcgccgcgagctcgaggccgcccgccatcttaccgcgccgccgccgcccctctcccgatctggccggcggggggccagatcctccaacggggaggccggatccgcgtccggcgcgaccggatccgccccgccggccgctccggccgccgtcttccgccgtgcgtgcgtagcgccgcctcccacgccgagggggtgctccgccgccggcacgttttccccgccgccgccttcccgaccggccgcacggtttccggcggcgggctccggcggcggcgaggtggctggaggcgttgggaggtggcgccgggtgaggaggagcagcggcaggcggggctcctcgtgacggtggaggacgcggtggcgccggcagaggaggaagcgtag

SEQ ID NO: 48219 - DNA, 1386 bp, Oryza sativa
  Clone ID: PAT_MRT4530_50915C.1
tcatagcgccaccgccatccgtcgggactcaaaggagccaagactgggcttacgcccggcaatcgcccttgaagggtgagacccacggctgacacaccgatgctccaccaccacacaagctctgccgacatgtgggacccctgcaatggcgtcccccgctggccagcctttgtgcgccgaagatcgcgccacacccaccagcagctcctcctcacacctaggtcgcctcctccaagccggccgcctccaccggacgcgcctctcgcgccaatccggcctccctccatcggctgcacctcttgcgccaagccggcctccaactctgccgcccgcgcctctcgcgccgagccggcctccactgccatcggctgcgcctctctgcgccaagccggtctccgacccttccaccaaacgatgccgcgtcggccaaatgcagccatctcccacgccctcagctagccgtccagggccgccatgcctccggtgactgctgtcgcggccaccagccaccgcctccgtgagccgccgccactgccagcagccgcttcgttgtcgccattcgccatgctgccgccaagtccttcgccggcgtcgtcggccgacgccgtcgctgccaactgccgcggccacaccgccgccgtcgccaactgccgttgccagccgtcgcaagtcggccaacgtctccgaccaccacagccggctaccctccaaatccggccgagaggcgcggatctgggggcaccgccgccgtcgccgctgagcaccgcgccatcgccgcgcagggaccaataccgccgccttcgcgccctcggccgacgccatccccgccaccatcgccatccccgccgccttgaaccaccatgacgccgtcaccaccaccaccagaaccaccgccgcccagctcaaccccgtcaccagccgccagctcgccggcactatctccgccgtggcggccttgccgttgccagccagccacggccgtcgtgtcgcgctgccagccacagctgcccaccggccagccacggccgtcgcgccactgcgcctgctgcggccgcccgctcccccagccgtagcgcttgccgccgatgccgcgtctccccgccgacgccacgcttccgcaccactgctgaccagccacggccgtcgcgccatcggcgtcgccgcatctgccgtgctcccgcaccaccacggctcagatccggcagcggagacgtcggatccagccgccactcgcctcgtggccgatgctgggcgccggatccggtggtggcggcgccggatccgctgctcttcgccacaccgccgccgcggccttcccgaagctccgcgccgccccttcacgccgaggcggtcacgccgcctgggttggagcctcgccgccgccat

SEQ ID NO: 48220 - DNA, 483 bp, Oryza sativa
  Clone ID: PAT_MRT4530_50916C.1
atgacgtcggcgatgacgtcatcaccggcggcggctcaggcgcgcaagctcgctggcgaacgacggcgcgacggcacgaacggagggcaccagcgcgtagagagcgacgcggcgaactcaccgaagctcacggtcaaggctgaaaagtataaatttggaagtttgtttaatctagtgaaggtattgaagcctccaatgattgtagtccacgtgaaggatgagcagactgcaaagaagatcaaagaggatgtgttgcaatcaatcgagggctgcagagctacttctattcataagatggagttaggttttatgattagattgtcaccacgggacaagacaaagaagccgctgggatacctgagagtgtcctatgatagtgcggtgataagcgaccgcacacccatagaatcaacactaggcgtggcttccgcacgagtgaggatcgacaagaagcttcttacatcaacagcttgcaagaagtga

SEQ ID NO: 48221 - DNA, 2613 bp, Oryza sativa
  Clone ID: PAT_MRT4530_50917C.1
ctaatctgatggcttgaagctttttgtagtaacatgatgcttcttcatcgcctcgaccgcctcccggaatactttctccatctcagcattcaaaggatccaacttcagtccagccaagaatgcgtcacatgccttttcatactccttcagcaacatgagagcagcccctttcctgtagtaaccttttaaccattcaggccgcgattttatgcaataatcagcatcaaacaaagcttcggtcatttgaagatggcaaaggctcctattggaatacaatgttgcatcagtaggatccagctcaattgcctcagtgtagaaaattgaggcgccatggtagtcctttctcttaacagctttctcaccctgtagtttgagctgagcctttttatcctgctcatcatgcttgtccttaatagctttctcaccacgtagtttgaactgagcctttttattatgatcatcctgcttgtccttgggctttgaacattttgatctggcatgctttgatttggcatgggcaagaattccttcaacagtccagtttgacacagctcgaatgggggaagttaagggaaacagtaattccacatcctttcttcttccatagcttgcagcaagttgtattggcaaggcaccacaatgacaagttgggatattagggtctgcaccagcctttagcaagtatttaatgcagttagtcaagccattagtaattgctaccaccaacggagtgtcacgatcactgaagttaatgtcagcacctgcatctgcatcgtgctccaataaaactttcatgacgctggccttcccatatgcagcagcaatatgtagtggtgtcccatgaaaataagctatatcaacgctagctcctctagatagcaacagtcgttctacttcatcatgcccaagctctctgccggcattgatgtcgaagccgagctcctccaccatgcacctgcacgcgtccacttcccccaatcgcgctgcggcctggagcggcccgatgcccgagaagctgatgtcgtcggcaagcctcgccttcccctccgcgtcctcgccgctcgccaactcttttttttttgaacaactcgcacgagacggaaaaagaaaaaaaacccaccacccacacaccgacatcgccaacacacaagcccaggagaaggctagcaccggaccggccgccgctaagcgtgaccagccgccactagaccaacaaagggacacagctgagatcgctccctaggggatgccaaaacgacgtcttcaagaagagaagcgacggaaaaaccgccaccgccgtccgtcgggactcaaaggagccaagattgggctttcgcccggcaatcgcccttgaggggtgagacccacggctgacacaccgatgctccaccaccacacaagctctgccgacatgtgggacccctgcaccggcgtcccccgccggccagccttcgtgcgccgaagatcgcgccacacccaccagctgctcctcctcacacctaggtcgcctcctccaccgccggccgcgcctctcgcgccaagccggcctccctccatcggttgcgcctcttgcgccaagccggcctccaactccgccgcccgcgcctctcgcgccgagccggcctccactgctatcggctgtgcctctctgcgccaagctggtctccgacccttccaccagacgatgccgtgcccgccaaatgcagccgtctcccacgcccttggctagccgtccagggccgccatgcctccggtgaccgctgtcgtggccaccagccaccgcctccgcgagccgccgccaagtccgtcggcgtcgtcggccaacgccgccgctgccaactaccgcggccacaccgccgacgtcgccaactgccgtcgccagccgtcgcaagtcggccgccgtctccaaccaccacagccagctaccctccaaatccggccgagaggcgcggatctgggggcaccgccgccgtcgccactgagcaccgcgccgtcgccgcacagggaccaataccgccgccttcgcgccctcggccgacgccatccccgccaccatcgccaaccccgccgccttgaaccaccatgacgccgtcaccaccaccaccagaaccaccgccgcctagctcaaccccgccaccagccgccagctcgccggcactatctccgccgtggcggcctcgccgtcgccagctagccacggccgtcgtgtcgcactgccggccacagccgcccgccggccagccacggccgtcgcgccactgcgcctactgcggccgcccgcgcccccagccgtagcgcttgccgccgatgccgcgtctccccgccgacgccacgcttccgcaccaccgccgaccagccacggtcgtcgcgccatcggcgtcgccgcatccgccgtgctcccgcaccaccatggctcagatccggcagcggagacgctggatccagccgccactcgcctcatggccgatgctaggcgccggatccgccgctcctcgccgcgccaccgccgcggccttcccgaagctccgtgccgccccttcgcgccgaggcgcccgcgccgcctgggttggagcctcgccgccgccataccagcggccgcacgttttccggtga

SEQ ID NO: 48222 - DNA, 360 bp, Oryza sativa
  Clone ID: PAT_MRT4530_50918C.1
atgccccaccaccacacaagctctgccgacctgtgggacccctgcaccggcgtcccccgtcggccagccttcgagcgccgaagatcacgccacacccaccggcagctcctcctcacacctaggtcgcctcctccaccgccggccacgcctctcgcgccaagccggcctcctccaccggacgcgcctctcgcgccaatccggcctccctccatcggccgcgcctctcgcgccaagccggcctccatctccgccgcccgcgcctctcgcgccgagccggcctccgctgccatcggctgcgcctctctacgccaagccggtctccgaccctccaccaaacaatgccgtgccggccaaatgtag

SEQ ID NO: 48223 - DNA, 200 bp, Oryza sativa
  Clone ID: PAT_MRT4530_50919C.1
tgtggaggtatgccactgtactaaagactgcttaactgaacttggggggacggagagacgacgacgacgactgcgagtgtgattgagacttcacgaccttacctgctgctgtgttgctggtaacttgtttcctcgacactgccactggattctggaatgccactgggtgacgggggtgacgcttgaatggtgaatttctg

SEQ ID NO: 48224 - DNA, 456 bp, Oryza sativa
  Clone ID: PAT_MRT4530_5091C.1
ttttctagatcgcgagcggccgcccctcaggttgtttttttataaaaactaagcggggcatagaataacaaccaccatgtgccgagcaatttacatgttgggacccaaagacaacaatactatgaggatgcctgaactacctcccactggataagaccactaagcctgcaaatcagacaaataacctcaccagcatcagcagggcacctcctccatcctatccaccggattgcatatgccggggcttctccagtcgaatgacgcttcgcacggattcccagcctgcgccttccattcacaatctgggggagttccacaggaaaggcttctgttatccacatgctgaacatccaatccattcaaccaataaccatatgacacctgctcgatggaatatttgaacaagatataccaacctgctgatatgtatgctgctaaatccatgggtacaacata

SEQ ID NO: 48225 - DNA, 159 bp, Oryza sativa
  Clone ID: PAT_MRT4530_50920C.1
atggcaaggaatggagacctcctagacaatgccttcaagaagggtcctgtcgaggagggggagagtggccgctcgacaacgccccgagaggggaacgcggcatccgaagatgtcgccattgccggcttaggcagtcccaagctagtctttcaccggtaa

SEQ ID NO: 48226 - DNA, 510 bp, Oryza sativa
  Clone ID: PAT_MRT4530_50921C.1
agttacaacgatcggcatggccgcttggccaccactcaggcatcaggcaccgtcaaggcatttgatggaggcagcaggttgagtggagctcatttccgaggaacagcatgtgcacctgctgtttcatctgcatttgttgctgtccttgttgtgcctgaggaatttgttggacaggttgcattgctggatgtgtctgagcctgaggtggtgactgaagttgctgcatggcaagtttttgttggtgctgttgaagcaaaagtagtttctgctgttgctgctgctgttgctgttgctcatacagcacatactcttcaggcttatcccactgttaaaggaactgcagctgttgttgaagctgataaattgcctgctgtgaagattgataactggattgcaaagcagcttgctgttggagtagcaattgtggtgcttgcgatggcatctgctgcactggctgctgaagcatttgtggtgcaacatttgagggaagatgctgttgcccgggaatag

SEQ ID NO: 48227 - DNA, 355 bp, Oryza sativa
  Clone ID: PAT_MRT4530_50922C.1
acggtacatcggcgcatatacggacattctctgtacacgctaaggaatccatcactaagttcaccaatggaaaggttcctacccgtataggactgggtcgttactatatcgtgcagggtccgatgtctccgagtcctacttggagaccgcctgacctgcgatataaaagggacccctagggggacctaaggattgaatctcatagccaacacaacaaccacagcctacgaagccggaaactacaggagccaggtcgacgggtgatctagtcgaatcaactcgactacgatctcgtcggtaccatcgagttctattattccctttgtaatctgttgttctctccatataatcccat

SEQ ID NO: 48228 - DNA, 2703 bp, Oryza sativa
  Clone ID: PAT_MRT4530_50923C.1
atgcaccgcggcggcgaccgctccacagtcccctctcccggccccgcgccctgtcctctccgtggcctctcctctctcgttgctctcgcaaaaccctagcccacctccccctccacccacatgcaccgcggcggcgaccgctccaccgacccctcctccggccccgcgcccggttctcgcggcggcggggacggccgattcggccgcggcccttctcgctggtcgtccggcggtggcggcggcggtagcggcagcccaccccaccgcttctcccgtggtgggggtgggggcggcggcgacggtggcggaggcggaggtggaggcgggaggttccacccgtaccgtggcccgtcggaccactccggcggcggaggctacagaagcggcggcggcggcgagtacggggagccgggtagcgggccgagacaccgctacggcagtggccgtggtgaccactcagatcatgataacagaaacaactatgttaaactttttattgggtcagttccaaggacagcgactgaggatgatgtacgtcctttatttgaggagcatggagatgttgttgaagttgctttgatcaaggataggaagactggtgaacagcaaggagggaacgccatggggctattgagcacaagctgtttgtcgcatcactcaataagcaagctactgcgaaggagattgaagagatttttgcgccgtatggtcatgtggaagatgtctacattatgaaagatggcatgaggcagagccgaggttgtggctttgtcaaatcctcatcacgagaacaggggcaggcagccatgagtgatttttgcgcggaatgttcatggagaagatgtctacattctgaaagaagtcgtgaggcagatccgaggatgtgtcttcgtcaaaatctcatgacgagaactggagctggcagtcctgattgctgtgcgtgggaagaatgtgatgaggttgtgagggcaaccgtcaataattctgtacccagatcccaacatatgcatactgactcttggcatccatcaagcccaaggtcagcacctcatcagtttaataactttggatctgacaatcctatggctccgaaagggagtactgttacatcaacaacagatacggccacttttcgacctcagatgttcagcggaaatggctctttgtcaagccaaacagctgtgccaagttcgtcacatatgggcatgaaccctcctcccatggcacaaggccatcatctgggaggccagcagatcccacctttgcaacagcggaaatggctctttgtgcaagccaaacagcagtgccaagttcgtcacatatgggcatgaaccctcctcccatggcacaaggccatcatctgggaggccagcagatcccacctttgcaaaagctaccgccagaataggttatctggtcagcttcctgtgtcacagccgttgatgcaacaaaatgcttccgtcagcgctgtgcaggtgccttcagccgtgtccaattccatgcaagctattcccgggcaacagcatcttccctcaaatgttgcaccacaaatgcttcagcagccagtgcagcagatgccatcgcaagcaccacaattgctactccaaccgcgaccaattccatgcaagctattcccgtcttcacagcaggcaatttatcagcttcaacaacagctgcaactaatgcagcagcagcagcaatcgaatctaaaccatcaacaacccacacaggtcgctgagcaacatggtcagccagtgcaatctagtaaccctggtgccccaaatgccattattccatcaaacattaatacaattccccagcaggctacttcacctgcagttcctttaacctgcaattggactgaacatacgtctcctgaaggttttaaatactactacaatagcataactcgagagagtaagatcgcaacatttgtgggtctcactcttagagttattgttttacagtgggataagcctgaagagtatgtgctgtatgagcaaccaatagcataactcgagagagtaagtgggataagcctgaagagtatgtgctgtatgagcaacagcaacagcagcagcaacagcagaaactacttttgcttcaacagcaccaacaaaaacttgccatgcagcaacttcagtcaccacctcaggctcagacacatccagcaatgcaacctgtccaacaaattcctcaggcacaacaaggacagcaacaaatgcagatgaaacagcaggaattgaattatactcagctacagactcctggtgctattgatcccagtaggatacaacagggcatccaatctgcacaagaacgtgcttggaaaagttgagactgaaggtgaatgataaattggtaagctgttactcggaaatgagctccactcaacctgctgcctccatcaaatgccttgacggtgcctgatgcctgagtggtggccaagcggccatgccgatcgttgtaactctggatatagcttagattgatgtctaaaaagttgtagctccaatccgtgtaaaatgtttgcagtctaggccttgtaccgctgtaacatttctgctgattagaatgttcgctttccttgcataggcaactgccagaggttcgtcgctagtatgattttgggcatttcatgacatgtccccagcaatcatcatttagattgtttcctccaaaaaaaaaaaaaaaaaaaaaaaa

SEQ ID NO: 48229 - DNA, 361 bp, Oryza sativa
  Clone ID: PAT_MRT4530_50924C.1
ttggtttttttttttttttgggttttttttttttttttttttttttttttttttttttttttttaaaaccaaaaacccgggggtttttttaaaagggcttattttaacatccataacaagcaaacgattgttgtttcccccccccacctttgaccattacggggcaactggccacccttgacttgaccaaaaatcccgggggccggataaaaaaaacatcaggggcgagcaaaaggaaccgtttaaaacttgaccccctttaacccattaaaaaaaaaaaggaagggtgggtcgggggctccccccctggaggagggaaacaccaagcccgcattattatgcgtggtttcaccaacaaaaa

SEQ ID NO: 48230 - DNA, 420 bp, Oryza sativa
  Clone ID: PAT_MRT4530_50925C.1
atggctgcaaataggaagctgctgttctgctttgccatcctcgttgctacggcgatcttggtacgtatgaacgcgcgtatatacacattagtttgttttgagctagtctcgttattgacgctggcggtcccggacttggtggtggccgccggcgaggagaagtacgggtgcgtgtactgtacaccgggacccgaggaccgtggcgatgatgcagcagagaccgggaccgggtcaccgggaccgtctatgcacggccaatcagtatacgatgctgctgaagacgccgaacgcacgacaccgccggcgtgctcgatcttcaccgacatctatcgtgctccactgtggagttcgccgtcgagcagtggctcgccggcgagccaccggagcagcactgcgccgagtggaggcgtctgcaagtag

SEQ ID NO: 48231 - DNA, 221 bp, Oryza sativa
  Clone ID: PAT_MRT4530_50926C.1
aaaacgcgtgaccgctccaaaacgcatgaccgacgatcctacaaaacggttgcgcgggacctcgacggtcccgcaggttcaatgtgcggaactggccataaacagttcgctcccgcgttttgggaccatcgcggtcccgcgcgaccgttccgtgggacatcggtcccgtgttttagaactgcgggaccatcgcggtcccacgtttccgttcctcgaagcgg

SEQ ID NO: 48232 - DNA, 1407 bp, Oryza sativa
  Clone ID: PAT_MRT4530_50927C.1
atggaggagccgccgtcctcgtcgtcgtcgccggctctgccgctcgacatcgtcgtggagatcgcggagcgctccgaccccatcacgctactccgatgcgccgccgcatgcaagcacctccgccgcgtcatctccggcgagggcttccgccgcgacctccgcctccgcaacgcggacggcttcgtcccgggcctcctccatggcttcttcttccagcctcgctgccccagcccccatgaccacggctacaactacgagcccctccgcttcgtcgccgccggccgccacgatcacatcgccagcggagacaactgtcagataccgtccttcgtgtcggactccgacgagaataatccttgtcggcgcatcgaacccgtggcggcgcgcggcggcttcgtcgtcctccggaccggcgagttttccgggaaggtgtgcaaccctatgacgggctacgtgcgggccatcgacatgccgaggaagacaagcaagggtgaggggtcgtcctacctagtgctcaccgccgacgacggcggcgatggcgtcgacgtcggagtgacctccgacgactccgagctccacccgttcaggctcctcgccgtgcgccttttcgcgaggacacgcgtggagatgcaggcgttgaccacggacactggcacgtggggcccagccaccacgctcgccgtcgtcaataccggctgcctcggcccgcgccccgtgctggtccgcccgcccgtcgtcgtcgccggcgtcgcctacttcctcggcgagatgtccgggagagacgaccggacataccaactccaacgccggatgtcccgggtgagcttcgacccaccataccagcactcgccgccgccgtcctacacctacttcgtcctcgccgtcgacgtctccatccgccgccgcgacggcgagaccgggggaacaacagcggcggcgacgatcatgccgttgcccaccaccgaactccgtgccccgtcgtgcaccggcgaggcaaccgtcacgccggggcagctcctgctggcgccgtcgtcgtggcgcggcggcgacaggaggtcgtcgtcgttggcgctgctcgtcggccgaagcacccaggtggagatatggacgatgaagctgacctgccacgggatggccttgctccggatggcgtgcaccaaggtcgtcgacttgatgggagtaccccggagtccctgctcgccgccggtgtcggagtcggaggtggcgctcctgtggtccggcgacgcgagcggcgccgtggtgctccggctcggggggacggtctgcctgctggaccggcggcggcgcgccattgtggtccgcgcgctcggcgaggagttcgtcgagtttcgctctgggcgtcgccatgtgttgctgccgtatgaggtcgggcgtggaaaattttga

SEQ ID NO: 48233 - DNA, 531 bp, Oryza sativa
  Clone ID: PAT_MRT4530_50928C.1
gcacgaggcagaagtgtgagcaactgagcaaggcgtggtggcagttagcaacaagagggtgatcctgaagagatacttgacggcatgcgagatcggccagttgggggatgaaatggaggtggtgacggcagaggcagtgccgctatctgttccggcagggtcatctgcggtgctggtgaagaacttatacatttcatgcgacccctacctacgcaaccggatgatccgccatgaggtgcccacctacatctcggactttgtcccaggagaggtgatatcatctgggcacctggatttcaaggccggcgaccttgtttgggggatgaccggatgggaagaatacactctaatcaataatccggagtctcttttcaagatcaattaccctgaatttcctctttccaactacactggtgttctgggtcaacctgctgaaaaccaaatttggcttcgacgacgctttcaactatcagaaggagccagaccttgaagccgctctgaagaggtgcttccctgagggcatcgacatcg

SEQ ID NO: 48234 - DNA, 499 bp, Oryza sativa
  Clone ID: PAT_MRT4530_50929C.1
ctgcaggctcagtttggagggtagaaaaggaaaggtgtggtaccaaggtcatttttaagttgcagcaagctaccgagtgctagattatttttgtcagctgcatggtcctctccagtggaatgtagaagcaaatctacctggaaagcatgtgcatgcacctggagccaggcaatttcttttataagttcagaaccatgacaggcctccatgtgcttccttgtgtgttccaagaagagatggagtaatatatatcttggcatgatcgctgtgcactcgatgttcttaatctgagtggccttcctgcctggtgcacatggcctcaacatcatgttgctttacaaggcagtactccgtttgcttccagcttgagaggccgcattgataactgctaacggtactgaatgaagtcaatgacctcaaacatgtactacaaatgtacagctcttttagttgaaacagtactttgcactggtttgctgtaaatttgttggttgcttcc

SEQ ID NO: 48235 - DNA, 656 bp, Oryza sativa
  Clone ID: PAT_MRT4530_5092C.1
ggacagtttttcgaacctatggaccaagacaagcttcagcgctcctattcaaagttacctcactaaacgcttctgaaggacacctgtaatatatctgagtgtctgtctttagcttaagcaccagctactcctgacaggctgaatgattttggcattttgaaagtgccacaccacctttcaaaagtaacccatctgataacaccattttacatttcatctaatttgaaatgaattctctgaggagcatacacaaaaactgatgactgacactggttttatgattttttttcctaacttctacgctaacctattctattgcgctacccctggggcgaagcaagcatacaaacagtatgtaggagggtacttttgtggctaataaagcaaggacatgctctctgtactctgatggctacataatagtaattcttttatgctatgcagtgcttttgttcggctttcaattatccgacagaataaaaaatcgactatgatttcaactgtgggttgataaagttctggacaattgaacctattgctgttttcaagattatatttacctaatggctctatgataaattactaatgtatcggactagatctttatctgtggagctagctggctgcctttatctttgagaggagagattgtcact

SEQ ID NO: 48236 - DNA, 418 bp, Oryza sativa
  Clone ID: PAT_MRT4530_50930C.1
ccagaaaagaaggtgttatgcgtgtgtcggtgaggatgggtattttgggaagagctcagattaccggttttgaatgtttaggtgcccggaggatggcaagaaaaacatattggctgggagcaaaacttgctgactttggaacatggacaaagttgggagctgtcattgttgggacttggatcagtacttgcaactactgacaaaatgcagtgagcctcttatggatgctgatccttgttggttttgaatgctgtatgcttgcgttggtcaatgcacaacacgggcttgtttcagttacccatataaggtaccaaatgttaacctggcccttcccttcacaaggtattagagtttacttacggccagaccatggagaaactgtgggttaatgacatcagagtatcttgtccaaaaaaaa

SEQ ID NO: 48237 - DNA, 268 bp, Oryza sativa
  Clone ID: PAT_MRT4530_50931C.1
ccctggcctcgtcgctgcccgccctcgacgacgttttcttggagaggagaaatccgtaggctccagaggatttttggtcggctaggttcgcgatcttctggaacagggggggagctactgcgtggattcctaggatcagaatggcaacactgcggggctcgctagctatctgagcttgcaaacacaggttgtgagtggaatctaagctgactgtcctaatggagacacgggttggcaacactaacagtagcaacctctggtcgttgat

SEQ ID NO: 48238 - DNA, 1287 bp, Oryza sativa
  Clone ID: PAT_MRT4530_50932C.1
atgcgccgtacaccgtgccagctgagtctgccattggccgcagccccgcgcctcgctgccctccacgtcgtcgccgcatcggcctcctactgccgccgggcacaccaagcaccacgtcacatcagcctcggtcggccacggcttccttccatcgccgactgtgtcgagtcagcctcccgcaggacgtcccacataatggacacgctgactttctactccgtgtgctgtcatccattaccgaccgtccactgccgcagctgccaccacccctcccatggacgcctcttcccgttgcccgtcgtgctgcgctggctgctcgaccccgacaagatccaagcggggacgccagatctggccatgggggcaccggatcaggaggggggaggggagtcgccgccgccccgacccatcgtcgtcgccgccggcagcctcccccctccctcctccggccggatctgggaggggggaggggagccgccgccgccggcctccccctccctcctccggccagatctggagggagaggaaggggagccgccgccgccgccgccccgcgccgtagtcgccgccactgccagacgccgcgccgccccggacgccgcgccgctgccgaacgccgctgccgcgctggccggcctcccccttcctcctccgccagatctgggaggggagccgcgccgccagccggacgccgcgccgccccgcccagggcgaaaccctagccgccccggcgtcgccaccttcctcaccccctctggctgcctagtcaccaccgaaaaccgtgcagccaaccgggaaggcggcagcggggaaaacgagccggcggtggagctcctcagtgtgggaggcggagcggcgcaagtcgggcgggaggcggcggccggagtggtcggcgggacggatttgcccccctccacccacggccaaatcgagaggaaggggcaactgcgacaacggtggcgaacgccggcacggcgcgtgcgaggaggcgcggccggcggtggcggagtccggagcggcacgaggagacacggccgctggccggtgacagtgaaggccaacgtggtgcgaggaggcgtgatcggcagcgtcagcggcaggcatggccaaatgccatcacaacgcaacgagggtgatgtcatgcggagactggccggtggtgcgcgcgggtgcaacggtgcccacacgccaacggagggtgaaaacccagtctgggttctctttgagaactcaacggacggtggtggcggtgctttcatcgcttctctccctagagacgtcgtctag

SEQ ID NO: 48239 - DNA, 1184 bp, Oryza sativa
  unsure (1)..(1184): unsure at all n locations
  Clone ID: PAT_MRT4530_50933C.1
tcgtcgncgncgncgnccgaancaatggcgacgcggcgatgcctcctccgcctcctctcgcgccgcctcctcgcccacacccctcaacccgcgtcgctggcctcgatcgcgacgcgaaccctagcctccttggccaagcccctcgtgccgcaggcatcccgcgtcctcgcctccccccgcctcttcccctcgcgctgccactacgcgtcgaaccgatcctccggcgacgaggaggagggggacgacgacgatcactacgacgaggaggggagcggggatgagtggggggaggaggaggaggaggccgtggcggcgaagccccccagcgggaagacggaggaggagaaggtggcggaggcggcggagatagggtacacggtggttggcccgctcggtgccgacgagaagcccttcaagccctacgagcccgtgttcgccgtcgtccagattggttcgcatcagtttaaggtgagcaatggcgactcgatcttcacggaaaggttgaagttttgcgatgtgaatgataagttaattttgaatcgagttctcatgcttgggtcacaatctcaaacagtcattgggaggccaactcttcctgatgctactgttcatgctgtcgttgaggagcatgccctagatgcaaaggttatcatattcaaaaagaaaagaagaaaaaattaccgtcgaacaaagggccatcgtcaggaattgacaaagctgagaataaccaacattgaaggaatagataagtcagaggccactgctgttgctgcttaaattaagatgaataatgaaggaacatggcttcatgcccaggcagtccttcatactggttttagtgtccaatcaaatcttgatgcggcgtgctgttgcttattgtcagtcactgattgaaagaaccatatctgaaggtcttgtctatgtatccacattttgggaacgggccactcaagctatgccctttctcacaatgccaatgtcttgaccagtttggatattctgatgtggatcacatcttgtagttacagccaaactaactttttgttttctttctccatttactagcgtacctccttgaatgtgttccaatgcatcagtgccatgtataccgttctagccatgaataatgaaactgaaagtttgtggttcccatctaaaaaaaaaaaaaaaaaaaaaaaaaaaaa

SEQ ID NO: 48240 - DNA, 1963 bp, Oryza sativa
  Clone ID: PAT_MRT4530_50934C.1
aaggcggcggacgcggcggtcaaccccaccgcccttacaaatctctctctctctctctctcaagaggaattgaactgaagttcttgcagcacggtcgagaagtaagggagttgagagttgagagagtagagaagagggagatggggagggagagcttgccgacgctggccatggtgatggtgcagctgggcttcgccggcatgaatgtggtgtccaagctggcgctggacaccggcatgagcccctacgtcctcatcgcctaccgcaacatcatcgccgccgtcttcctcgcccccttcgcctactacttcgagaggaagagtggcatggtgatcaccaagaaagtacttgtccagatattcttctcctccatttttggcgcgacgctgaaccaggtgctctacttcgtggggctcaagtccacaataaatttctcaccagcaacatgtttaaatacgacagctactcttgtctgcgaatacaactgtagatggagtaggaattataattacggccaagagaagattttcaagtctaaaatcatgaacatctttcaggtagtcatctacttctcgtgatgctactgtaaggttcacaagattaatccccgcttgataaaacagacaaaaaaataggataggtgacacacgagtataacgctctcggtgaaaaaccggagcagagtagtagtagtaatacagcagccgtgattttatttagaagactaagtatatcaattaagagggtagttaaccttaaaccccgcaagaaacccgcgtcaccctcacttggccttgccgttgacggcggtctccttgccgttggccgctgctgcggcggcggggaccttgcccttgccatcgtcctccttggcgaaggcgtcgacggggtaggtcctcccgaggccggtgggggtcttgaaggtgatcttggaggcgtcgtccttgtcgatgaacatgtcggagagggagacccagatgaggagctccttggtcttggccccggtgacgcgcttcatccggcggtcctcgacgaaggcggtgacctcggcggcgtacgagacctgcctgctgatctgcttgaaggtgtgggtgatggccttcttctggcgcagccacacgaaccccgtggcgcggttgtagccgacctcctccatctccgccagcggcagcaggcccagcggcatgtggatctccgcgaggagctccaccgccttctccgcgcacagcgccgccccgtggtacacctccgccccctccctgtgcgcctctatcgcctgcgaccccatcgaacacgaactccaactcttggattcgacactcacaattcacaaatgcacaatgcggtggtgggatactgggaatctttgggttgcgttcctggcgggaggccgggcgctggttatagccgcggaggagccgtgtggttcatcatacagaccaagatgtcggagcggttctcggcgccgtacacgagcacgaccatcatgtgcttgatggccggtgtgcagtgcgccggcgtcagcgccgccatggacaggagcgtcgccgtgtggaagctcggcttcgacatccgcctctactccgtgctctacatcggcgtggtcgggtcggggatcgcgttcgcgctcatgtcgtggtgcatccaggtgcgcggcccgctgttcgtgtccatgttcagcccgctgatgctggtggtcgtggccattgtcggctgggcgatcctcgacgagaagatacacgtcggcagcgcgatcgggtccgtgctgatcgtcgccgggctgtacatggtgctgtgggggaaggcgagggagatgggctcgccatcggacctcgacggcggcggcggcggcggcggcgtggtggagctgaacggcaagggcgccgacgccgcgacgaccttgccggtgttctgcaccaccaccaacaagcacgagacgacccggaacggctgcagcaactga

SEQ ID NO: 48241 - DNA, 542 bp, Oryza sativa
  Clone ID: PAT_MRT4530_50935C.1
ggagagagagagagagagaactagtctcgagttttttttttttttttttggcgacagaatacattgagatgcagaatacatgtagtggttaaatataagctaatatactggcaaagacaaaaattacattccattattaagcaaaagcacaataaaatagagggagctaataagcacgaaagaatgaagtatctaggagggctttgagatcccagggttcgcgtccatgccccattgccccaacggcaggtgctgcagtggaacgtggacatgcaacgcaacactcaggcagacacgtgtgcatcggaacacgtacatacacatatagacaaacatcaggcatacatgcaatgcaaccaaccgcatcctcagaagtaaagaaggcatccaatagatagcaaacccaacaaaacgctcggtaccttatatgagttgaattttgcatgccattgttgttgtcagtctcaagactccgctgatgtatagtatcttgttgttactcatcatcactaacacaatctcaaaatgtccatcaattaaac

SEQ ID NO: 48242 - DNA, 1123 bp, Oryza sativa
  Clone ID: PAT_MRT4530_50936C.1
ccggccgggaccaaaatcaccagcttttccatctcctctctctctctctctctctcggtgttgcgtgctctccgtctcagccatggctgccgctgccgacgctgctccaaagacgatgagagctgtgcagtacgataagtacggcggaggaccagaaggcctcaagcatgtggaagtgccgatcccggcgccgaaggaaggggagttgctgatcaagatggaggcggcgagcatcaaccccatcgactggaagattcagaaggggatgctccgcctcttcctgcccaagaaattccccttcattccagttggtgatctatccggcgaggtggtggagctcggcggcggcgtgagcggcttcaagccgggagacaaggtcgtttccatgagcttcccgaactgcggcgggctcgccgagtacgcggtggcgccggcgtcgctcacggtggcgaggccgcccgaggtgtccgcggccgatggcgccaccttgccggcggccgcgggctccgcgctccagcagctgaaggcggccggagtcaggttcgacgcggacgccgacgccgccgccgccgccggcggccccaagaacgtgctggtcaccgcggcgtcgggcggcgtgggccactacgccgttcagctcgccaagctcgccggcctccacgtcacggccacctgcggcgcccgcaacctcgccttcgtccgcgacggcctcggcgccgacgaggcgctcgactacaggacccccgacggcgccgcgctgcggagcccgtcgggcaggaggtacgacgcggtggcgcactgcgcgccgccggcgccgtggccggtgttcagggacgccctggccgacgccggcggcgtcgtggtcgacctcacgccgggggtcgccgccaccgtcaggtcgttcctgcacagggtgaccttctccaagaagaggctcgtgccgctgatcctgatgcccaagaaggaggagatggagtggctggtcgacatggccaagcaagggaagctcaagaccaccatagattccaagtaccctctgagcagagcacaggaggcttgggctaagagcatggaaggccatgccacgggcaagatcgttgtagaaatgggaggcacagaatga

SEQ ID NO: 48243 - DNA, 255 bp, Oryza sativa
  Clone ID: PAT_MRT4530_50937C.1
atggcgctcctactactgctgctgccgtcgtcgctttcgctcgcgctctcgccgccgccgcctccgccgcccttcttcccaccgcagtgggcgccgccggtgcccggcggcggtggccctttcgctgaacatggagttggatatggtagtggtcccgacgggtctcacaatcctacagtctcgtccgtgcatggcaaccaatacatgccgacaggtcgacacggaatgtatcgttggccaggccgcaggacatag

SEQ ID NO: 48244 - DNA, 209 bp, Oryza sativa
  unsure (1)..(209): unsure at all n locations
  Clone ID: PAT_MRT4530_50938C.1
atactgnaatgtatcatgtactcttgctgcaaatcccattattaaggagccaacctctctctgaaaaagaaaaagaaaacaaaataagagaaaaaaaatccaaagagaataagaagaagaaaaaaaattacagcgtatatatatacgatgcttgattgaatgattgactgatttttgtgtgtaggaataattcaccaacgaaattcact

SEQ ID NO: 48245 - DNA, 923 bp, Oryza sativa
  Clone ID: PAT_MRT4530_50939C.1
atggcggaagagagagaaaatctccaaagtcaatgggctccttccgatgtcactgaggaaactctcaaggagatggtggagcacggagtattaccatccaaggagatcatcgaatagcgtccagcatttggtgaggcctttccaatccccgatactcatgaaatcgtagtcttcacccatttcttctatggtggctttgctcttccaacctctaaattctttaggggtattcttgaattttatggaattaatatctaccatctcaaccccaactccattattcatatcgcaaactttgttcatctttgtgaagccttgctgggcgttcgggctcattgcgccttatttcgccgaatctttttcttgaaaccccagccaaataaaagcaagccttgcattgttggggtatctagctttcaacttcgtggcaccctatgccaaaaatacttcacccttcctttcaaaacctccaacaagggctggcatgctagctagttctatatccaaaacccagatccttccctgcccaaatactcatgcatccctcctaagtatcaagatatctggaactcactccctatgggcgatgaagcttctcaagctcttgaactgctgaaccggctgttgaagttgaaagaacagggtcttcaaggagagcagatcacttggcatttcataaagtgtcgactggctccaattaaagaaagatctctcgcacggccttcgagtatgatggggagaatgaccccaacctagaagaccctgactccctcgaattcaagatcatgaaggagaggatgtataaagtcttttcatccagtattgcggtcagcttttcacatctactgtcagtcgtgccatacaacgccttcaatcctcctccagcggaaaatgccttgatgaaatctgagccaccaactact

SEQ ID NO: 48246 - DNA, 1847 bp, Oryza sativa
  Clone ID: PAT_MRT4530_5093C.1
atgagggagaaatccgcaatggcatccctgagtagttttgtgatgcgggaggccgactaagacagtagaagcttggtgaaggatacaattgcgaactccgctgagcggctcccgcgtggggagaagcgcaggaggagtgtggaccaggagaaggtggaggtggatgacggcgagaagcaccttttagagcggaggggggagaagaggagaaggtctgggcatggtaaacagaggaacctccagcgttcccagaggggtatgcacacatatgaccagtagataactcaggatccttactatggttggagccacatgcgtgaccaggatgggagtctctagcgtgaccaggagaggggccactagcctgaccgacataggagtgtgaatcgtgaccagcataggagtgtggattgtgaccagcagaggagccgtcagcgtgaccagcagcagggacaagaaaaggtggttgggagtgaccaccaaattaaggagcagcgggggcgggaataattcaacactatatccgacattgagacatcgtttgaatttgatggaagattagttggcaagagacttgtggatgctaatgttgcaacagaaattcagactatcgtacaggatgccaagggcaagtttgagaaagaaaggcaaaattatctgaaagttctatcaaagacttcaaaggagtgtgaaggtttactgaagaacgagtacaccaagtttcaagcaacacatgataaattctgcaaagaaaaagctgcacacatgcaaactctcaaagtttacaaggaagtcagtgcagcgttcaatgctggtcctgctgatctgggataccttacatttctaatgaactttctgaagtcgatagcatctcccttggcaggtatcctctcccttcactatgatcgcccaacagtgcttgcaatagggactgtcttctgggccttatcaacaggggctgttggagttagccagcatttccggcaggttgcattctggagagctgtaaatggccttggacttgctattgtaataccggcacttcagtcgttcatcgctgacagctacaaagatggtacacgtggcgcagggtttggtttactaagcctcatcggtgcagtaggtggtataggtggtagcattctagccacaatcatggctggaaatgactattggggtttggcaggatggcgtgttgcatttattatggttgctctcgtcagtttgataattggcattcttgtgtacttatatgcgactgacccaagaaaaatccctggtaatcatcttcttgacgacgatgactatgagcttaatatgattatcaaactgcttgctcgtaaggggtgataggggtttagtgaccccattgttactacaagtatctgattttcggcaccctctgaaaatttatgttcagagttgaaatgttccacgttgagtaatacagtttccactttcttcaggcacgataagaaaaccccagaaacactcgatgaattgttgtataattattatatcacagactcatagagggaagccaaacctttgtctgtcatttttcttctaacttttttgtagataaacggaaagcttttaatctttctgcttacttggctagggaattttcttgtaaacctgaactttacgacgataatcatcctttctatacgttgctgagaaaaaaaaaaaaaaaaaatgtaccttgtgttcaagcgtgaccgggagaatgcgaaactgtcgagcttcaaggatcaggagctggctacaacatgaaggttacatttggccagcaaagatgttcttccaccttcttctatatgaggggattctttggtagcaacaag

SEQ ID NO: 48247 - DNA, 201 bp, Oryza sativa
  Clone ID: PAT_MRT4530_50940C.1
atgtcttctaccgaggtcttctccatccgcgtcctcggtgggtcgctctccgtccctgcgcggctctgggccacctgcgacttcaacaaatgcggtattgaggacaccaagttctcggttttagggtggtcatccttgtcggctatgatatttcacatggagggtgaaattcagctgcctgagggttcctcccaggtttag

SEQ ID NO: 48248 - DNA, 186 bp, Oryza sativa
  unsure (1)..(186): unsure at all n locations
  Clone ID: PAT_MRT4530_50941C.1
gtgtaccctaattngtagtatagcgccttncngggatccggnagtnaatcgattacatcacgggacagtcgggggcattccgtnatttcatagtcagaggtcgaaattcttnggatttatgaaangacgaacaactgcgaaagcatttgccaaggatgttttcattaatcaaaaaaaaaatanaaa

SEQ ID NO: 48249 - DNA, 371 bp, Oryza sativa
  Clone ID: PAT_MRT4530_50942C.1
ggcccggaaaccccgggccgatccactcgcccggaataggttccgaaccccaccgcccgggcgccaccgaagagcgaaaataaggagaacaacccgagaccccccggcgaagaacacgccagagaaggaaggcgcgagagcccaagaaaaggcaacagcccgagaaggaaggccaagaggaccaccccgccgggaatagaaaaacaaccccccaaagcaaaaccccgccaaaaaacgagaagaacccactgacaccccccacaccaaaacccgacagaccccgcaaaccaaaatgagcccaaccccactggaaggcacggccccagccccgagacaaaacaaccacacaaaccccaaccaacaacccaagc

SEQ ID NO: 48250 - DNA, 458 bp, Oryza sativa
  unsure (1)..(458): unsure at all n locations
  Clone ID: PAT_MRT4530_50943C.1
gagagagncncctcngccgcccgcctcctccaccgcccacacgaggggcacgcgcctcgccgccgcctcccctcgccgtcactaccttccatttccgccgcctcctctccacgcgccacctcaccctccccctcccccacgcggcggtataagtacgctcccctctccctacccccaaaaaccaccaaaccctagcccccccaactccgaggcggcgggcnggggcgagganggngtgggtggttttagggttttgatccggaaggagttccggggggcggcggcgggatgagcagccttggtggagcggctggnggtgcggtcggagaagcggccgcaccggttggaagcttcagnttttgttcctttagttagggttaattncgcgttggtaatcatggtatagtntttctgtgtaaattgtatccgttaaattcaaaaaaacgancgaagataaa

SEQ ID NO: 48251 - DNA, 837 bp, Oryza sativa
  Clone ID: PAT_MRT4530_50944C.1
atggtactttttaggaagttgtcagggatggttgaatccttgagacaagaattcgatttttttttcctccgcgctggcagaaactggccgaagtttattaagaatgggagaaaacagaatttacaggacacatggcttacagaccaaagcgccggagcacgccctaacaatcagagaacgaaacaagccacatcacagattttaacaccgcaacaacaacaatgccaaaaattctcacatcagaacacgcagtgccccatgcaccccaggcccagcgtaaaaagagcagccaccttccacatccgccactcatctatgatgaccacacatagcgcaaacaccatagtggccttcccctcaaaaacacgggcgttctgttccttccagataagccatgtcactaggatcacacctgcattgaaggctctctgctcctgcttgcagatcgtcttgcggactgcgagccaccagggaagcaaatgcagtgtaggctgtgggcaaatgaatcccaggcggctgtgcattccagacatgcaccgtgcatgcgcaacagtgaaagatgtgcaagcaggtttccagatcacagcaaccaaggtgacagaagctcaccaaatgccacctgcgacactgcaagttgttggcagtaagacaagctcctcgcatggcaaggaacatgaagaatttgcaacgtgccgacaccctggatttgcacccaattctgcccaaggcacactttgttcaccgagcacagagcagcgaatacaccgatttgacagagaaatcgccattagcctatgccaaccagagcatagaatccctggcacagggatactctga

SEQ ID NO: 48252 - DNA, 716 bp, Oryza sativa
  unsure (1)..(716): unsure at all n locations
  Clone ID: PAT_MRT4530_50945C.1
gctcctttgtatggcgacatcgctcatagtctactccatcccactcgtcggagcaactccatcccccgtccagctcgccggcgtgtactggttattaggagagcaggtctcaaaaaaggtttttgggaagcgctccacgtgacttcttgttgttcgtcaactacggctcctcattgctcgagtgatgcgtgctgtcgtcaacacccggtaccgcgagtggttcctgttgtgcagcagaacatccagaacccttgcttcatcgatgacatcgactgcatcctctatgatggtaacgaccgcatcaccgatgatgacatcgatcatatcatctacaacaacaatgtctccatcaactcggcatcactatttttgatgactgctacacgacatagaaagtcgtagactgcaagataattgagctatcgccaccaatttattataacggaaaatatttcgtagcaatatattatattatcgcaatgataatttttctatggcaaataactatattttgttgcaaccatttataatcgttgttttattcagtatttttgttgcaataggaaatgagctattgccncaaaaaaacattactattgcaaaaagcatgttctatcaccncaattttaatttatgtggctatttgcatagtacatggtacttttgttgccncgataaataaattcgttgcaataaaaaaaaaaaaaaaaaaaaaa

SEQ ID NO: 48253 - DNA, 293 bp, Oryza sativa
  Clone ID: PAT_MRT4530_50946C.1
cccaagcgtgcgaacccccatcggagaagaagaacaaaaaggagaggaagatggtgtcaggttcggggctgtgcacgcggcgggtggtggtggacgcgcggcaccacatgctggggcggctggcgtcgatggtggcttaggagctcctgaacggacacaaggtggtggtggtgcggagctatgagatgtgcatctccggcgggctcgaccggcagaagatgaactacctccggttcctccgcaagcggatgaacaccaagccctgccatggccccattcactttcgtgccctc

SEQ ID NO: 48254 - DNA, 988 bp, Oryza sativa
  Clone ID: PAT_MRT4530_50947C.1
cacccctgcgccgtgaacgggacgtgccaaggtcccaacgggagccggttcgcggcggccgtgaacaacgtatccttcgtgctcccctacacggcgctggtgcagtcgcactacaccggcaggtccaacggggtgtacgcctccaactttccggccatgccgctgtctccgttcaactacaccgggacgccgccgaacaacaccaacgtgtccaacgggacgaggctggtcgtgctcccgtacggcgcgtcggtcgagctggtgatgcagggcaccagcgtccttggcgccgagagccacccgttccacctgcacggcttcaacttcttcgtcgtcggccaagggttcggcaacttagacaccgtgaacgacccggccaagtacaacctcgtcgaccccgtcgagcgcaacaccgtcggcgtgccggcgaccggctgggttgccattcgcttcctcgtggacaatccaggggtatggttcatgcattgccacttggaggtgcacgtcagctggggcctgaagatggcatgggtggtgcaggacgggagcctacccaaccagaagatcctccctccgccgtccgatctccccaaatgctaaccgatcgacaccggccgaccagagacagagattgcgtcttgctcatcagcttccctgtaggatactcggatactcctctgcttttgctagcttgcttctgttgattgctcgcggttggtgctatggaatgcttttcttgtagtggtgtgcctttccgaagttgtgtcgtcatctggttagctgatgtacgaatgatcatgggcaagtttcttgatcagacgcaaggcctttaattttgggcttctcattattatttgtcaccttttgtaacatatgagggagctggatcataaatccacgttcatcccaataatttgtaccatcatttgatgtacggcaaaggatttttttatgtactatttcatattaatcaaaaaaaaaaaaaaaa

SEQ ID NO: 48255 - DNA, 573 bp, Oryza sativa
  Clone ID: PAT_MRT4530_50948C.1
ccggccgggaaaccaacattcactacatagatcacaataagacaggtaaaacatagtaacgtcatatatatttcgcaatggtgaaatgtatgaagcctgcctaccaaggactcatgttgttttgcttggttcttgtggtgtgctccgctcttcctgcacaaataagaggtcaaaccataaggaagatcggaagcaatattccgatgggactgaaaaacgtggtcagccatgcgagcttgaatgtttgctatcaggaagagagggactttgcctattgctgttcaaaggacaagaagtgctattcaacaatttctgagtgtctagcaaaatgcacctacaactaaaaagcgagcgaaggactaattggcaaattaattaagtgcgctccattttgtggttgaattggatacataagaagttatagtgtttgattggtagtaatcacatccagtgtctgggaataactgatttgtatgctccaatccatatgtatttcctagaaacatattggagcatatgagatgataataaaaaaatatgcgtacatataaaaaaaaaaaaaaaaaagcggcc

SEQ ID NO: 48256 - DNA, 2935 bp, Oryza sativa
  Clone ID: PAT_MRT4530_50949C.1
atgggccgactggcgaacgctggcccagtggcctccgggcttgatcggctgagatggcctcttgggcctccttgaagttggacttgctacggcaaagtcatccgccttcgccatacactcttcgccatatagtcttcgcccaacatgccttcaaccttgtgggataccggtgcgattcttcacccttcgccatctttgcttcatagtcttcgccatgggtttcggcaggtccggtcgaagggtctcatgacataccgccaacaagcccctcacgggcaagagtgagataggagcttcggctgagaccgtgcaaaccatgtggtatggaaaggccgtggtgccgaaacacggcgacaaccggacgatggtatttgccgtgttttttgaggtggggcttcagtttccatgcaacgttttgttgccggagatccttcgtcttttccaggtggagcttccccagctgagcccatcggcacttgtccgagtcaccatcttcgactgggcgtgccggaccgccaggttcgaaccgagcgccgagcttttcggcgccgtgttctatggcaccgtgaactcgaagacagtggtcaccccagccgggacaaagaaaacggcgttcgggagcgtgaactttaatgttcgccccgagcgctccgatctatggccggtgaacgccgccatgtcgaagtgggatcgccattagatggcgaagtggttctaccactccatccccttcgaggccggttccgacgcggcgaaggccctccgttggcggcgcagggcaatttcgccgaacaggaagcccaaggtcgccatcgatggcaccatggaggctcggttcaccctgcttcgcaaggtctgctctcggcttagctgccgcgatctggtggaggaattttgcatgcttcggattttccccctctcccaatcgtggcatgttgtggtgaatgaagacgaggaagttcacggcttgtcaaagctcgtcatgcccgagggggcgaacatgttgacccttgctcaggttgacactgaagcccggaagatgatcggcgacgtgtcgattactgagttcagccagctgcttacgcggctggcggccggtcgggcgaacgaagtggctgcggggcaggtgaagttggccccccggaagtgcagggcccctgcctccaccgactctgatgctgatgacaaagacactgtcatagatcacgacgacaaagaggaaggggaggatgtgggggaaacggaggttgtggccgaaaaggccacggacgaggccgccggcaaccgcgccaagacgcccagctacactccgactccgagccccgagcacgttgggaccggggtggagtcgaacttctccctcctccgccaaatggatatggagggggtgaaggcgctggttgcgatcgccgcaaccaaggtgacgaaggggggttcgatcaagaaggcccccaaaaagaaagggctcgttgatgtcgctcgcatttttagcgacgacgagtcttcggacgagacccctacttcgcccactggtcggagcttgggtctttcgaccgctctcagcgccatggttgatgcaggtggagctcggggggagtgtggccgctgggctttggcctttgctgaccggattgtcagggtcgttgctagggtctttggcagtcctgtgcggaggactgtggttttcgccgcttgtcattgagaaggggaagaagacggtcgtcgagacgtctgcttcagagtattctttggtggccccccactgcgcccctgctgacttcgagactggcgcggaccttatccccttcgtcgaggggattctcgcggcccattgttcaaccgaacggactatgcgggcttgccttgacgggttcaagaaccgtcttcgagccaaggacgacgaactgggccgcaagagcttggagatggagggcctcgccaataccctcaaggaggcgaaggctgagaataagcggctccaagctgaattggagaaggggagcgaggcgaaggctgagatagagcgcctcaaggctgagctcaaaaaggagcaagcacattctaccgctctaaccgattactacaatctcatcgagccgaagatttaggctcttcgcctagaggtcagcaaagcggaggcgaacaccgaacccaaaggaggcggcggtgaagcttggtgatgatggaagtgttgggatacgctatcactaacaggaaggagcagcagggcctcgctggagatcaaaacgcggcggcgagctcggtcttcatggcgacgaagtgcttcccggggtcttcggctttggggagatggctgctgagcttgctattgaccttgcggagccgagagaggtggcggcgctgactggcgacggccgaagcgacggcgcacggcggctggagcggcggccgaaggtagagagagaaggggctcccggggagagcaattccggcgacggcggaagacaggacttgagggagaggtagaggacaacgaggggggtgtttgccgaaaattgtgtgttcggtccccctttgggaattggcgaaacaagaacgagaagttcgtggcggcgaagggtttgccaaaggtgcgatgcccgtttcggcctgtttactgcgagatgataataaacggcaacagctacaaggttttgaaggttgccggctgaatgcgggcgcaccccgggagaaccctggaagactacgaccgtatccatacagaacgtctggaggacatggttcgcttttggcgaaaccatcagaaaacagatcgtcaggaggcgatctcccaatgtcgttatagtctagtctgtgtttcgcccccttccctcttagggtcgtgtataatattagtagtgatgacgaacctgattcgccaaatcattccttagggagtgaggattgttgtgggggcgaatgtgtaatttatctg

SEQ ID NO: 48257 - DNA, 280 bp, Oryza sativa
  Clone ID: PAT_MRT4530_5094C.1
gtcaaatcttcttaagtaactagcaaagaacagccttatccgtgataaaaaagagaaacacaaaaaaaaaaaaaaaaaaaaaaaaaaaaaaaaaaaaaaaaaaaaaaaaaaaaaaaaaaaaaaaaaaaggcgccgaaattcccgcagccgggattcactagttcagagcgccgcaccgtgagctcagcttgtccttagaaggaatcagctggaatatgaagcgtacgaaatgatctaaatacacaatcgcgagaaagaaagcggtacatagagaacamta

SEQ ID NO: 48258 - DNA, 289 bp, Oryza sativa
  Clone ID: PAT_MRT4530_50950C.1
ggtcaccggactcgggcgttggcgagggcggaggcgccggagccgccggcgtgggcaccggccagcacttacgtggcgtgaggaagcggccgcggggccgttacgcggaggagatccgcgacccggccaagaagagccgcgtgtggctcggaactgctccacacgggcgaagaggccgcgcgctcctacgacgccgtggcgcgcgagtaccgtggtgccaaggccaagaccaacttgccctaccctaacggcgcgcccgccgtccgtgtgaacagtggcagcagtaaca

SEQ ID NO: 48259 - DNA, 268 bp, Oryza sativa
  Clone ID: PAT_MRT4530_50951C.1
acaactaaaccaacagttcgttttataacagcttttattcacgggtggatatatgtacatagatacagcactctttactggacatgaactgtttcggccactattaatgaatggggtgatagaaatcgaacatgcatgcagcatgtgtacatacagctaattaaacaagccaaattaagcatacatacatgggcgcaagaattgaagaattgaagcagtgtcatactaggatggatggatcagtcccagaacatgacgacagccatta

SEQ ID NO: 48260 - DNA, 2295 bp, Oryza sativa
  Clone ID: PAT_MRT4530_50952C.1
cggaattcccgggtcgacccacgcgtccggcaagaaagccagccattcgccagcggttcactacaagtagccagcgcgccacccagcagtttccccaccaactctgttttccttggccctcctcgtctctggtcaaccgggggcaagtctgactgcgtccgcatctttgctttctctctcttcttcttcttccgcgcctgtttcttggctcccggccgaggacggcgggcgggatgaaggcgggcgagcggccgaagctggtccggggcgtccggcaggagtcgcggcggttccggctgctggtcatcgtcgtcggcttcttcctcgtctccctcaccttcgtcttcgtttccaagcccgacgccatcctcttcagcttgaacggcaagcttccggtggaacaggcgccgacgtccatcctgatccagcagaaggtcaacgagccctccggcgagtcccggaaaacctccaccgacgctctccgtggtgaccccaaagtggtcgacgacgaagctgatgcgaaaccaaaagggacaggaggaggcagcgaggaggaagaggggagagtgctgagcgagccggacccgaccagcggaatgatggagccgacccacaacaaggacggcaacggccataaatctcaccaggagacgttaggcggtggaggagacggggagagtaaagggaatgacgaggagggcgaacacgcggagcagaagcataaagtcaccctcccaacagtttccaattacacaattcatgatgctgctgaggacactgaaaatgccaagcaagaaggtatgaataatgtccagcagggtagcaagcccttgtgtgatttctctaatttcagagcaaatgtctgcgagatgcgtggtgacgttagaattcatccaactgccacttcggtcttgttcatggagcctgaaggttcgcagagggatgaggtgtggaagattaagccgtaccctcggaaaggggatgaattctgcctcagccatatcactgaggtaaccgtgaaatcgagcaaagtggcgcctgaatgcaccaaataccacgatgtgcctgctgtgatcttctcactgaccggctacacggggaacctgttccatgatttcactgatgtgctcgtccctcttttcacgaccgcaagcgagttcaatggagaagttcagttccttataacagacatggcactttggtggacgatcaagtaccagacagttctccagaagttatccaagtatcctgtgattgatttcagcaaggatgaccaagtgcactgcttcaagcatgccattgtcgggctgcatgcctatatggagttcacaatcgactcaaccaaggcaccgcacaactattcgatggctgatttcaacagattcatgcgtggagcttactcgctgggcagggacagtgtgaccgtgctcggtgagtaccccaagatcaagccaaggttgctcatcatcaagaggcaccgtacaagaatgtttctcaacctggatgagatcatttccatggcagaggagcttggctttgaggtggtgattgacgaggccaatgtgagctccgatatctcccggtttgcgcggctggttaactccgtcgacgtgatgatgggtgtccatggtgctgggctcacaaactgtgtgttcctgccacagcatgcgacgctcattcagatagtgccatggggtggcctggactggatatcacgcaccgatttcggcaaccctgcagagctgatgggtctgaggtacaagcaatacagcatcggcgtcgacgagagcagcttgacagatcagtaccctagagaccacgagattttcaagaatcctatctcattccaccagcgcggattcgatttcatcaggcagactttcatggacaaacagaatgtgaagctggactgcaagaggttcaggcctattcttctggaggcactggataatctaaacccgtaggctttgagatgctcttgtacaatgttccatttttcttttcacggttcgttccttttacttttatgtagtaaatctgttgtttattctctctctatctctcatggctttcatgaggagatgcaaattgtctgaattatagaaaaattaagaactacttgtgtgatagtgtaaactgtataaattgccgtcgctccaagatggaacaatattcattctaatcatataaaggttccttgaattattcatcgagaaaaaaaaaaaaaaaaaaactcgagttcaatctacaaacagtggaacctaaaatgatcattaatcactaccagttccatat

SEQ ID NO: 48261 - DNA, 1077 bp, Oryza sativa
  Clone ID: PAT_MRT4530_50953C.1
atggtggagccatggcagtgcgacgcctgcaagcagcccgggttcggcgagctgtacgcctgcgacgcctgcggcttccacctccactacatctgcgcccacgccgaggagacgatcacccacccgctccaccgggacaggtgctgcacgttcacgctccacgaccgtgcgccggggcgaacacggcggttctgcgacgcgttcggcgagatcgcggcgccggcggggctcgtctaccactgcgcctgcggcagccgcgacctgcacccgtgctgcgccgggctggaccggagccggccaaccgacgacggcggcgtactccacctccgcaaagcgtcgtcgtcggcgcgctggcgctgcgactgctgcggcgagcggagcgactactgggtctaccgctccgggtccgggaacgtcacgctgaacgtgtcgtgcctgaagaagatggccgcgcgcgagtcggtgctcgcgtacctccggccgcaggacggcagcgccgccggcgacgaggagtcgtcggcgggccagcagccggcggacgcgttggtggttcgggttcctcgaggagcggtgcagagaaccaccaccaccaggggtgacgagcattggctccagcgcctgtgcaggattgctgggacggcaatacgtatcatcatcggcaccatccttggagatccgacggctctgattgccgcggtggttgctggtttcttgcagttaactactctgttggctataagtgacgtggataaaattatagctcacgtacgattggctatagataaattgaagctagcagtacttggctatactattaaacttgctattaggggcatgaatgctcggcggacggagtacaagctactaattcaaacctcacagctggcccgccgccgtatcgacatggtcgcaacccgtagagcaatagggtgggagagcctgggagactggactggagacgtgcaatttccacagattgtccgaacaaaacaaatttcagaagcgttatgggccgttgttttggaacaggatgcaaaaagtctattccgtgtccttcaaaatattatcggagtttga

SEQ ID NO: 48262 - DNA, 258 bp, Oryza sativa
  Clone ID: PAT_MRT4530_50954C.1
atggtgggttgtgagcgcatggttttgatggtcgtgctcatgacaattaaggaccggttcacgattttcggttgtgaaacattaaccgtgccaaccacaagccagcatgggcaacgactttactttctgtatagtatggttcataggagagcaccagactgtgaagtggcggagataagcccacaggggtcgctggggagtccatgccttgtttacaagggggtgattatgatccgggagcagtgcactactttgaat

SEQ ID NO: 48263 - DNA, 366 bp, Oryza sativa
  unsure (1)..(366): unsure at all n locations
  Clone ID: PAT_MRT4530_50955C.1
aagaaataacataagtttttattcatgtacttttatcagattcaaatttcacaaaataaaattaaagccatccaaangctaatactggtgcaatgccttactggagaccgaaaacagaaaaattggtccagagcatgggcgaggaatattcaatgcctctaaccccatgctattcctagcattgnagtccttcgaacaaaacctgtgggcctgttttgcttcctgttaaattngtttatcttggaagggtttcggggacccgaaatggcccatnacccgtggttgttgggcccgtaatggcgatcaacgtttgtcggnagggctttccncaacttattaggnttaccctatnggtnanccctttag

SEQ ID NO: 48264 - DNA, 404 bp, Oryza sativa
  Clone ID: PAT_MRT4530_50956C.1
atctggtcgaccgcccataaccgtgggcacggctattcgaatagttttactcagatcagaggtgtacaactgtacccacaagacacagccccacaacacatttccgtgcgccgacatgccaccacgacatactggaaagaggccgtgacaggacccttcgcataaccccctctaactaatcacaccacacctcgggtttcacccccactcctcgcaaggcagcgggcagtcccccctcgtgccacggtgaatccggaagccgatcaaccggacacgctggccgacccacgcgcctttcatactatctccgtgcgtcgcaattaattagtcggtcttgctatgctgatatggatgtcgctcattctcctgtctgtctcttgctttccctgctgagtttgttagct

SEQ ID NO: 48265 - DNA, 1562 bp, Oryza sativa
  Clone ID: PAT_MRT4530_50957C.1
atcacatccacccgaaaaaaaacatgtcttttttactctctttcttcttcttcccccgatcccaaatccctccctgttcttgctgctgctctcgagttgagtgagttgaccctcatcctccccacccacccgaatctcgcggagccatttcgcgttcttggaggagttggggagttttggtgtttttggatccgaggagcgtgagagttcttggatctcgtcgccctcctcctccggcaatggcggcgctcgcggagcacctgctgggtttgtcgtcggcgccggtggactgggaggcggagtcctacccgggttacggcgacttcgccgtgctccccttcctcgtcgccttcttccccgccgtccgcttcctcctcgaccgcttcgtcttcgagttattagcaagaaggcttgtacttggaaaggggtatgacaaacttgctgaaacagatgaaagcaggaagaaaattaacaagtttaaggagtcagcatggaaattcgtctattttctttctgcagaactgctatcactgtctgtaacatacaatgagccatggttcaagaacaccagaaatttctgggttgggcctggtgaacagatctggcctgatcagaagacaaaactcaagcttaaggctgtctacatgtttgctgctggattttacacatattccatcttcgctcttttgttctgggaaacaaggcggtcagactttggagtctcaatgtctcaccatttggcaactgttgttttgatcgttctatcctatattttcagatttgctcgcgttggctcagttgttctagcccttcatgatgctagtgatatattcttagagattgggaagatgtccaagtacagtagttgcgaggggctagctgttgcagcatttcttctttttgtggcttcatggattcttctgcgtctaataattttcccgttctggatcctaaggagcacaagctatgaagtactgctgaccttggacaaagagaagcataaattttacggccccatatactactatgttttcaacagccttctgttctcacttctagttcttcacatatattggtgggtactaatataccccacgctagtcaagcaaattcaatctagaggccgtatcggcgatgatgttcgatctgattctgaaggtgaagaagatcatgaagactaatctgtgggctgaatgcttaactgaagaactatatatagtgatccctacatgaagatacatcatattgaatacctgattcccagaccagatcaattttcagtatcaaacatggcaaccatgattcacgagttgctaggaggctgcttgcgctgccatatactttatgagaaaaagttgatcaatgttttccccccttatatcctcatttataagagaaatatgcaggataagttcgttaattcattggttcattcatgtaattgtgcagacgattaattaatttacggtgcaatcatgtaatgttctgtggaactcgattgtaacttggtgtatcttccattctaatggaaattctggacaaaaaataacctgatattcttt

SEQ ID NO: 48266 - DNA, 5202 bp, Oryza sativa
  Clone ID: PAT_MRT4530_50958C.1
atggggaggaggaaatcgcggccggcccgggcggtaggcctaggccccggcgctgccgctgccgcggagcccgacgcgccgagccctagcggcagcggcggcgcctccaaatcgaggcgcgcggcgaagggcgaggctaggaggagagaggatgtgtgcttcgaggtggatgatagcacgtggtgtttgagcgacggcgaccgccgggacctcgcggagttggtcatgcgcgacgtgaggatctccggcgagggagagggggcgttggacgtagcggctctgcacgaggcagagagggagaagaggtgctcgttgcgcctgcgggtgcgcgacgcgccggaggagggtttccggcttggccagtggcctgtggtaccttcagattgtgtgatcctggagtatgccatcgccggtatggttttctctggatgttttgatggtcccgatgaaggtgtatcaggcctcgcccatttggttagattgagattcgtgacattgcgtgttcatgcctttgctgtatctcggtctgctgattccgtgtcggttgcatcatttagagttagattggggttgatggagcaggcttttgctacatgcgaatcattgttggaggtgacaaggcatccgtggaggaagagtttcatgaatatgatggcttgggttcgtcctgaggtcatgacctcggctgcaatatatgggatggatggtcttgcccggcctataaatggaggtgctaatggtgattttaccccaaagaaggattctcagtttgatcttgctgctttctacgaagccgttaagccctcaatggaggctggactgttggaagaggagcttcccgatttgcttcctcatctcagaacctatcaacttcgtgcagcgaattggatggttcaacgtgaaaagggaaacacaatgatttcatcaccaaatcaacattatgttcattctgcaccttattgtgttcccatagattttatgcacaagaaatctaggatgttctacaatccattcaatggaaatgtctcgatgcatccagaaccttctccaccttatgtctctgggggcattttggctgatgaaatgggcttagggaaaactgttgagcttttggcttgcatttttgcacatcgcaggccatattcagcagactgttctgtctcttcgaatataaaaggagcagatcagataaagaggcataaaagagaaagagttgagtgcatttgtggagctgcaagtgtaacctctgcataccaggggatatggatccagtgtgacatatgtgacgcttggcaacacgctagttgtgttggttactcaccaaaggaggaaatgcatgttgatgatgatgatggtgatgaagcatcaaacaatgaaaaaggaaccctaaagtcaaaaaatagaaggaagaagaaagacagacacacaagaccaggatctctgaaagtttgcatttatgaaggtgcaaagaacacggacttaacatctacccaaaaaagtgatatggctgagataagcacagctgacattgttttgacaacttatgatgtcctgaaagaagatctatcacatgattctgatcggcatgatggtgatcgccgttttttgagatatcaaaagaggtaccctgtcactccaactgtcctaacaagggtccactggtggcggctatgtttggatgaagctcagatggtagagtccagcaaaacttctgtgactgagatggcaatgaggctaaatgctcaacaccgctggtgtatcacgggaactccaatacaacgccggcttgatgatctttttgggcttcttcgctttctcaaaactcatccttttgacacatatagatggtgggtggatattattagggacccatatgagaagggggacatggtagctatgaattatgcacacaagttcttcaaggaaatcatgtggcgctcctctaaaattcatgtttcacgggagttacagctgcctccacaagaagagtgcttttcgtggctcatcttttcatcaattgaagaatatttctatcagaagcagcatgccacttgcatggaccatgcacatgaaattataagacgtatcagagatgatgccaacaaaagcgagccaatatcagactcgaatgttgtatcaaatttgtacctctccaatgatgacattgccaaactcctagtcccactgctcaaacttcgacaagcttgttgccacccgcaagtggggagtttcggtctctgctccctgcagcgtactcctttatcaatgggtgaaattttacaggttcttattgggaaagcaaaagtcgaaggggaggaagagctcaggaaaattgttgtcgccctgaatggtcttgctggacttgctgtcattgaacaaaataatcaagaggccatctctctgtataaagaagcactagctttggcctgtgaaaattttgatgatttccgtgttgaccctttgttgaatcttcatatcaaccacaatcttgcggagctgctcagagctagttctgagtatttgcaagaatgcccactaaaagaacaaacctctgaagtccatggtgcgcgaaaaagaaaggaaactagtcccgctgactcagaaacatccaaggaagacaaaaacatcaatacacaagtatgtggaagtgaagagatggatgtagagaatgattctggatgccacacgtcatctgtctcaactctcagtatggagttacagaatcaaaatatgaattggtggctgtatgctttggattgcattgaacagaacaaggattctgctgatgagctcattaggaagattgatatttcttccaataaaagcaccactggcttgggttcaacagggatgtcttccagggttcaaaccattgctgggttgaagtataccattcaaactggtattgattctctgcaaagttcaaggcaacaagtgatggacagacttttagaacttgacaaaacaatggatagcccaaaggatgaagacattgagtgtcagcgatattgtccaaattgctatgatggtaatggttctttatgcatccaatgtgaattggatgatctgtttcaggggtatgaagcacgtctgtttcttgttaagaaatcaaataatgattctgttattgcctcagtagaggaagcaagggacttgcaaaggcgaaaatatgagttgaatcagttttttcgtaatactaaaactaacgagggatctgaacctggtgacgacaataagaatccaagatctgctcgagaaggttttctggtctacaggcatccttctcgaattgagacttccttaagggttattctaacccactcaaagacaataatgggagagcaatctgctaaaattgctaaaaagaatttgctgctttttgaggctatgcgcaaggagttctctcaagcaaggaatctatcaatagcacagacccagttactgcgtgcccatgatgagatcaagatgtctctctcacgcctgcagctcaaggagaaagatgatgaacccagtgcagtcaatattgttactagagaagagcttataccatacaatgtgcagtttacaagtgaaaaattcttgtctttgtcatctttagctcgtataagaggccaactcagatacttaaagggattggtgctatccaacaagaaaccactgggcaagcatggtgaatcactgcccgagtcaggcaacagtgttgctatagcaacttccatccctgccacagggcaaactgcttctgatattatcaatgaaccatgcccaatttgtcaggagaagatctttgaccagaaaatggttttccaatgtggccatttcgtttgctgcaagtgctgtctttacatgacagaacaagctgcagcccactttgggaggagcaaaaaatggattatgtgccctacttgccgtcaacgtacagatcttgaaaatgttgcttttgtagttgaaaaccagagaggaaatgctgatagagaaattgaggatttggcagaaagcgctatttctgtccaaggttcatatggaacaaagattgaagctgtgacaagaaggattttgaggatcacttcaactgacggagcagccaaaatacttgttttttcaagctggaatgatgttcttgatgtgctagagcactcccttgccgctaacaatatctcttatgttcggatgaaaggaggaagaaaatcgcaaacagcgcttgcccagttcaaaggtctggcaagtagtataagtggagagaaagcaaagaagtcattttccaagatgcaacctgctcaagtattgctaatgcttatccagcatggtgcaaatggtcttaatcttttggaagcacaacatgtaatattagtggagccgttgttaaaccctgcagctgaggcgcaagctatcagcaggatccatagagttgggcaagacaaaagcacgtttatccaccgttttattgtgaagaatactattgaagagagcatctacaaattaaacaggggcagagctgtttgctccacgatacaccgtaaatcaaaaaatttcaaagatgagcttgttttgacactgaaggatattgagtctttatttcctgtggcaacacttgatcagccttcagaacaggagaataagaattacggtggggccggtgggcatatgagaagtttacctccatctgttgcagctggcttagctgctgaaaggaggttattggagcaacatgacaaccagcattaagttatcagctgacttattctttcaactggaactcggagaggcaatgaaagaggttgaaataattgatgctgtagatattttagttaattggatttatcgattgccttcttagttctaaattatgttaaaattacagaaggtagggatatactatggtctggagcttctcggatcattatattagaatctggcatcagtgatagaatgtttaggacacccccgagcatcgggtatgtacttaaggagatgttgtgaaatttagttagttagcctgacagaagcatgtgtatcattgtataaaacccgccgtcttattttccttttgatttttgataggtaataaatatccttaacatgtgtacatgtttatgaacattgctttagtaaatgaaagatcagttcagatcatttttggtcaaaaaaaaaaaaaaaaaaactcgagactagttctccctcgtgccgattcctgcagcccgg

SEQ ID NO: 48267 - DNA, 139 bp, Oryza sativa
  Clone ID: PAT_MRT4530_50959C.1
gaaccgagattcccacccctgactgctcaggacatcaaaggtctgcagaataggccccgtggcgccacatcccgccaagcacaagcaagaccaagacctcagtctcttagttcagcaggccatgccctaagcatgaggg

SEQ ID NO: 48268 - DNA, 1524 bp, Oryza sativa
  Clone ID: PAT_MRT4530_5095C.1
atggcgtcggtcgacttggagctggggcgacctctgtcggcggcggcggcggcgtaccctcctccgctgcggcggagcatcaacgacgacgacgttgacgacgacgggaagcccaagcgaacaggcggattaaaatgcgaaatgtctgctttaagtctgagaaattttatgatcattgaaaaagtatctagaggaacggagtggacggcgagcgcgcacatcgtcacggcggtggtcggctccggcgtgctgtcgctggcatggtccacggcgcagctcggctgggtcgccggcccggccaccctcgtcgtgttcgcggtcatcacctactacacctccgtgctcctcgccgactgctaccgcgccggcggcgatcaggtctccgggaagaggaactacacatacatggacgccgtcgagtcctatctaggtggtcggcaagtgtggttctgtggtctctgtcagtacgttaacctggttggaactgcaatcgggtacaccatcacagcatccatcagtgccgcggcggtgtacaagtccaactgcttccacaagaacggccactccgccgactgcagcgtcttcaccacctcgtacatggtggtgttcggcgttgtccaggtcttcttctcccagctgcagagcctccacgaggtggcgtggctgtccgtgctcgccgccgtcatgtccttctcctactcggccatcgccgtcggcctctccttggcacaaaccatatcaggtcctactggtatgacgactatgtctgggactgtaatcggaatagatgttgatttgtcgcacaagatatggcaggcactgcaagccctcggaaacatcgcgttcgcatattcctactccctggttctcattgaaatccaggacacgatcaggtcgccgccggcggagagcaagacgatgaggaaggcgaacgcgctggccatgccggtgatcacggcgttctacacgctctgcggctgcctcggctacgcggcgttcgggaacgcggcgccggggaacatgctcacgggcttcggcttctacgacccctactggctcgtcggcctcgccaacgcctgcatcgtcgtgcacctcgtcggcgcctaccaggtgatgtcccagcccgtcttcaccgccgtcgagtcctgggcgtcctcccggtggccccggtgcggcttcttcgtcaccggcggcggcggaacgaggctgatcagcgtgaacgcgttcaggctcgcgtggcgcacggcgtacgtcgtggcgtgcaccgcggtcgccgccgtggtgccgttcttcaacgacgtgctcggcctcctcggcgccgtcgggttctggccgctcaccgtgtacttccccgtggagatgtacatccggcggcggaagctggagaggtcgtccaagaggtgggtggcgctgcagagcctcaacgccgtgtgcttcgtggtgacgctcgcctcagcggtcgcgtccgtgcaggggatcgccgaatcgatggcgcactatgtaccgttcaagtcaaagttgtaa

SEQ ID NO: 48269 - DNA, 1254 bp, Oryza sativa
  Clone ID: PAT_MRT4530_50960C.1
atggccttcccatcgaggtcgggcccttggacaccggtgctcgagctccttcggggcccctacccggttaagcacctgtccgaccacctcggcatactatcctgtggcgagcacttcttggtcgtcaaccccaaatggcaattccacgccgatggtcaggtgaggtgcgacctgcatgtcttctcgagcaagaccacgtcgtgggaaagtaaggtcgcaaggctgccatgtggcgtggaggcgtatatcggtgattttatacccaccaaagtgttgtccgttgaaggacgatcgattgcctgggttgatctctggaacgggatactgctcttcgactcggtcaccagcaaccccgaggtgcgcctgatacagctgcccccgttgatgcccatcaacggtaggtacctcagaggagggggtttggatgatacctatatttctgtggatccaaatcgagatatcacctgtagtaatggctggttcaggttcattgagatgggattcccgctgttggatggcagcactggacagttaaactttcggtggcaggccaccatgttcaagaggttggttcgtccagaggaatgccaatgggagccatgcggcaccgaaactgactctgcagagctggtgtgcgccgattcgtgttcccttgatttgttgcctgtgatttgggattccaaggacaaccagctgacctttacgaacttgatttgtacttaccccacaatggatttgtacgatgacaatattctttatgtaatggccaagatgaagggtactgatccaagtggttgggtgctctctgtcaacaccgagaacaagaagctagagaaagtctcaccgttttcccaggaaattctgtttttccatcgcatctacctgcaatgtgaccttttcaagcacctcggcaaggctccagtttggtggggccctaattttttaaaattttcattgaccaaggtactggataaacacaccaacagagacaaacgtagaatctttgaagagaaggaggcagatagctcaaatagtgacagtggcacttatgttgtttctgaacacttacgattaatgggagatcttacgttgcagcttttggcccctattgatgtaactgaaagcaagatcagagtggcccacggtgccttatacaacctcaagggaactttaccatctgatgttctggataaaaatttcgtgaagcgtaccagcttttctggacctgaacaaaaaaaggatgctgctgtgtag

SEQ ID NO: 48270 - DNA, 708 bp, Oryza sativa
  Clone ID: PAT_MRT4530_50961C.1
atggctcggcgagtgcgcgggcgcgcgcgctggggccacgaggtagtgagggttttaggccgcggcgagcacgtgttggcgcccgtctcaccttcacctaccatgcgtcacttgctgcagtcgtcggagcacctgaccgccgcgacggcgacggcggcggcgtcgggcggccggggcgtccacacggacacgttcctcatcctcgccgccgtgctctgcttcctgctctgcgtcgtcgggctggcgctggtggcgcggtgctcgcggctgtgcaacccgtcgtcgttcgccgtcgaggcggaggaggcaatgcccccggcgccatgcaaggggctcaagaggaaggcgctgctgtcgctgccgaccgtgtcgttcgccgaggcggcggcggcggaggaggaggaggagcggccggagtgcgccatctgcctcgccgagttcgcgcgcggcgacgaggtccgcgtgctcccgccgtgcggccacggcttccacgccgcctgcgtcgacgtctggctcgtgtccacctccacctgcccctcctgccgccgcgccatcgtcgtcctcgcggcgccgtcgcctgcagtcaccgccgccgccaccgaccccccgccgccgtgctgcgccgccgacgcggcacaggcgtcgtcacagccaccgcaacccaccggcgccagcgaccgcggcggctgccggacatcggtgccgtag

SEQ ID NO: 48271 - DNA, 174 bp, Oryza sativa
  Clone ID: PAT_MRT4530_50962C.1
atggagtcgccggcaaggtcgtgcgtgtcgtcggaggcggaagatcagcaggcggcggcggcggcgatggtggtggctgggtgcccacggtgcctcatgtacgtgatgctggccgtgtccaacacaaagcagcccagatgccccagccctagcttgatgaaatcatactgctag

SEQ ID NO: 48272 - DNA, 336 bp, Oryza sativa
  Clone ID: PAT_MRT4530_50963C.1
atgtcgtcctccgccagcccgtctaccgcgccatctgccgagtacgctgagaaaaccacccctgagaaaagctggattacatggtacaagcgcgtatcggctagcaagaaagttcactgggatgagatcggaatcggccaagcacttgcccttaccatagtaaattcatccaaggatgaacccttaatggccgccgccacctacttctgctgtggtcctacaaccaactggcagtttgcagccgaagctcttgagccaaaaagagaatttcctctaggcaaaatcctcctcggctacttataccaaatgctgaacaatgcatcggccaaaatagcc

SEQ ID NO: 48273 - DNA, 322 bp, Oryza sativa
  Clone ID: PAT_MRT4530_50964C.1
ttgtatcctcttatttgccgcccttccattttttgggtggttttttaatacgggggggtttcttttttactttttttacttttctcgttttacggtgcatgcattgtcatttgaccacaaaaaatgttgagccactgcacacggtgcagcgttagttgtagcattcacaacataccgagtttcttttttttgaggtaaaagttttcgaggattacattatagtttaagccttgcaggatttactagataccagttgcatttttttagtcgcattcaaatggggtgcagtcccgggttaaggggggcaaaatgagctttactt

SEQ ID NO: 48274 - DNA, 1740 bp, Oryza sativa
  Clone ID: PAT_MRT4530_50965C.1
atggatcatcagctggtagctcgaggtctcttcaagcctctcctcctcttcgtcgccggcctgattgttctctacgcgctccgccgccgccgccgccaccgccggagcagcggcctgcgcctcccgccgagcccgttcgggctgcccatcctgggccacctccacctgctcgcgccgctgccgcacctggcgctccaccgcctcgccgcgcgccacggcccgctcctcttcctccgcctcggctccgtcccctgcgtcgccgcctgctcgccggacgccgcccgcgaggtgctcaagacccacgaggccgcgttcctcgaccgccccaagcccgccgccgtccaccgcctcacctacggcggccaggacttctccttctcggcgtacgggccctactggcgcttcatgaagcgcgcgtgcgtgcacgagctcctcgccggacgaacgctcgaccggctccgccacgtccgccgcgaggaggtggcgcgcctcgtcggctcgctccgcgcgagcgccgacggcggcgagcgcgtcgacgtcgacgccgcgctcatgggcctcaccggcgacatcgtctcccgcatggtgatgggccggcggtggaccggcgacgacaacgacgcggaggagatgcggagcgtggtcgccgagacggcggagctcaccggcacgttcaacctgcaggactacatcggcgtcttcaagtactgggacgtgcaggggctcggcaagcgcatcgatgcggtgcaccgcaagttcgacgccatgatggagcggatactgacggcgagggaagccaagaggaagctacgccggcaagcggcggccgacggcgaggacgacgagaaggacctccttgacatgctcttcgacatgcacgaagacgaagccgccgagatgcgtctcaccagagacaacatcaaggcgttcatgctggacatcttcgcggcggggacggacacgacgacgatcacgctggagtgggcgctgtcagagctaatcaacaacccgcccgtcctccgcaagctacaggcggagctcgacgcggtggtcggcggcgcgcggctcgccgacgagtcggacatcccgagcctcccgtacctgcaggccgtggcgaaggagacgctgcggctgcacccgacgggcccgctcgtggtgcggcgctcgctggagcgcgccacggtggccggctacgacgtcccggcgggcgccacggtgttcgtgaacgtgtgggcgatcggccgcgacgcggcgtggtggccggagccgacggcgttccggccggagaggttcgtctccggcggcggcggcggcgggacggcggcggacgtgcgcgggcagcacttccacctgctgccgttcgggtcggggcggcggatctgccccggcgcgtcgctggcgatgctggtggtgcaggcggcgctggccgccatggtgcagtgcttcgagtggagccccgtcggcggcgcgccggtggacatggaggaggggcccgggctgacgctgccgcggaagcgcccgctcgtctgcaccgtctcgccgcggatacacccgctgccggctgctgcgtcagcatcgctgacgcctgcagccgccggcatttctcattttcttcgagaaaaagaaagcagacgagcactagttagtggaacagaggaagcagaaaacacacgggagacaggagtgacagacaattgcaggcccagcattggaatttggaagcgaggtgggttgggctag

SEQ ID NO: 48275 - DNA, 1823 bp, Oryza sativa
  Clone ID: PAT_MRT4530_50966C.1
ttttttttttttttttttttgaaaaaaatgagtggctgccattaaagaatcacttattgattgatttacatgaatatgagctataaatccggctttatgatcttgacatcattctccttgatctcatgttccagacttctagtgggtctatctcaaagtcttatcaacccctatctagcttaattaatctttagtactgagctagcttgagtacacagtagtatagtaccatgagaaaaaatgtatacacaccacaaactatatagctatgcatgatcggacgacctagctagtccacacaagtacaaattaagtacaatttctttcccaatatatttactatttaaatctatcgttttggacctatttgctttcgaaatagacctcactgttcaaatcatcaattcgccatgtgcaattatgttcagtgtttaatcaggctgtggtattatgtacgaagaacgagctatcagttcatccccatgttagagtggagcagcatctggtggctcagtcccagtgacgatccctgcaaggcgctgcctatttggaaagttgcaccaacgcatgaaccgttcggcttcttgcccgccgcggcagcaggaggcagcgcctggatcgtcggctcgcctccgtccgatgatctcttgcgcttcccggtgacggccggcggctcgacgacggcgcctgccgacgtcgaggcggccgcagaggaggacgggtccaggtgcgcgagctgaaccatgctgttgttcgcgatgaaatggttcatgacggggtggccaaagagggcgtgttgttgttgttggtggtggtggtggtcgggctgcctcgccatctcctgcaggggggcggcggcggcggcgccgccgtcgtcgaagagctgcgacagcgagtactcgttgagcaggtcggaaatggaagggatcttctgcatcgccgtcctctgcgtagcggcggcggcggcggcgtgcagcgacgggaaggcgccggcggcagcgccctgcaagatcatggatgcggcgctcgacgacgacggcgcgtacagcggcgcgttctcctccagggcgcacggctcgtcctgctcgtggtcggagagcggcggcacggccagcggcgacgcgtggctgctcttcttgtagatccggcacagcacccagtcatccagcctcacgcgggccgtgccctgcttcatggggcggtaggtgttggcggcgtgggcgtctgcggcggcgaggcggtactcgtgcatgatccagttggtcttggtgcccttgggcgggcggcccttgtagaagacgagcgccttcttgacgccgacgctctcgttggtcgccgcgccgccgctgctgtggatgggcttgtcggtgccggtggccttccagtagccggagcccgcggcgcggttcggccggatcccgttcgggtacttgcggtccctcgggctgaagaagtaccactccctgtccccgtaattcgccttggctgggaggtcccacggatcgaacttgtagatgtcgacgtcggcgatgatggagacggggcacggcgaggaggcggcccggttgcggaggtagtgcacgatcagctcctcgtccgtcgggtggaaccggaaccccggcggcagcatcgccgggttcgacagaaccatcgtctccggcagtcacccacacacaacacacacctccctgcacaagcaaaacctatctagctatagctgctcacttccaagatcaagccactcgatcccctctcagctatgatctatgagatctatcagggtcgagcttgtatcaagaggaggcgagagatggacctcgtgc

SEQ ID NO: 48276 - DNA, 2400 bp, Oryza sativa
  Clone ID: PAT_MRT4530_50967C.1
attaatgaataatgacaattggcaggcaatggaggcatggagcattccactaatttttttgtaggcagtaacatccgacgcgctttcatatcttcaaaccttcggatgattttttcattactaatacttctaaaaatttgcttctcagtatagcatatcatcaagtcattcagccattcatcccccattttgtttctcaaatttgtctttataagagacatggctgaaaaaaccctctcaactgaagccgttgccaccggaagtatcaatactaactcaatgagcctatacaccaatggataagttctgttctttcctgtttgaaccattaattctgccacctttgcaagatctttacatccaacaaattctttagctctcctaatattggtaataaaatttgcaagttgaggccgtagaagcataagatcaccaaccaaaaaatcttgactataaatttcagcaagcctcacaagcttatccacatcaaaattagataagaaaatccatggattaaaggctgacatgcatacttagtaactttgaactaacttcactaaactgacgattcatttctgccaaaattgcatctatggctgcaagaaagatctcaacatggtaataatgcttatttgttaccttgtgctttcgacatagagatgtcccactttcatttacctccttgtccattttgggaacttcaatctcatgtttaacacaaaatgatgctactctattcatcaaaggctcccatccattctcccttgtgtaacataaatgattaaattcattgcctcaacaatgtattgatccttcctttgcaaagcacgtgacatgtcatctgttatactcaagatgtctatcatcaaatgcattatgaacacaaaatcaaaccattgcattttacccatcaaaccaaatgctccaccaataaatgttggtttagtagaatctttcttaacattctcaagcacaaatatgatagcttcccacattaccataatgcgaagcaaagttttaagatgtgatccccatctagtatctccaggcctagctaggctacattcttggttcagccctcttcccgtggtaatctcaccattctctaccttttctaacaatacatcatgatgttttgcaagcaaggcatcctttcgcatgcaagatgcacccacagtgttgactattaaaggcacatagttaaaaaaatctatcgtggctgcagtagaagatgaaacagtaacaaccactaactgtaattgatgggcaaaacaatggacaaaataagcaaaagggttttcatccctaatcaatttctgcacaccattaaattcccctctcatattagaagctccaacataaccctgctcacgaatcctagagatgattaacttataactagaaagcataccaaccaaagcttcttttaatgcaaccgttgtacatctctcaatgtgtttaagacccaaaaatctctccatcactttcccttccatcattcacaaatctcaagatgacacccatttgctcatttatcgatacatcacaagattcatcaataagcacggagaaatttcaatgtccaatctcatccataatcacggccgtcacttcttctgcacaagctttagtaagatcctgttgaatgtcatgtgataacatttggcaatttttattgctcttatgggaccttgtctttgtaccaattaaccatctctctaaatttacccttattgagggatgcattggtcttatcttgtccacggaaaggatcaccttgcttaatgagaaaccttataacatctaaagaagatgtcaaccgaatcttgtatctaatgtcttcctccttgctaacaatctcaattttcctaaatatacttgtcctttggttcataaagtctttgcattttttcctagtatcattgtgagtcttacaattactatgtgtagcaagcctatctttagctttcttccaattaacaaaaccttccttagcaaatacagaacttccaaatttttaggttttcctagctaaaagaaaagataacaatacaagcaataagctgcatcctttgaaacactatactcaagccaatcgaactcattgaaccaagctttttgaaaggacctccattcaccactttgccacttacgaggaaatgtgcaaaaatctggttgagttggaccactcaatgcatatatcctttttacttgatctctaatttcaggttgataattctcaattggtttccattccactggatcaccaatgatatccatatgactaaactctgccctaggcctctttgactgacttgcaatctcattattgagtggaggatcgctggtatttgtgttacttaaactagaataatatgtgagcagtgttcttttcggcat

SEQ ID NO: 48277 - DNA, 733 bp, Oryza sativa
  Clone ID: PAT_MRT4530_50968C.1
agaactagtggatcccccgggctgcaggttcttcctctacctcaaccttgccggccgatccaccacatcatctccggccaatccacatgatcgtcgtcagccttctttttccctcgaagttgtcggccagatccacgatgccatcaccgcggaggtcctcatcgagggtgaagacgtgggtcctagaggatgcggcggcggtactcggaggcgagcagcttgaggcagagggagtggtcgaagacggggaggccgagcgagtcatggatggatcgcctcgctcgtcatctcgcctccctcccgcagcagatccggcgtcagtggcggcggcggcggcggccgcgggtggatcggcgacggtggcagtggcggctccttccgccctctctcgcctccctcccgctgcagatccaacggcggtggcggcgaccgcgtgtggatccggcggcggtggcagcggccgagggtggattcgacggtagtggctcctcccgcggcggatccggcggctgctgctcctccctggcatggtggccggcggatgcttccctccccggtgtgttggcagcacctgcccgatccggcgatctcttcccctctcgcacggatcccatggtttttccattccctcttgcgcggatccgccgtcggctgcgacgggatggatggattcggcgacctcctcctctcccgctctgatcccgtcgtctctctgcgccctgctcatgcggat

SEQ ID NO: 48278 - DNA, 864 bp, Oryza sativa
  Clone ID: PAT_MRT4530_50969C.1
atgcgggtggtgcacccgcacaagaaaatcggttttttgcgtgcaggggacggccgccatcgcgtggtctgggtgggggatggccacctccactggatctgcgcagggcacggccgtcgccactcgcccaccgccgccgccgtgctcatcctgccaccgtgctggatccacgcggatccgggcgggggatggccgccgctgccgctgtcgcccctcatcgccttcgccgcattcctgctggcctctgccaccgtcaccccttgtcagctcgccacgcttccatcgaggggagatgttgagaagacggcggcgaatgaatctacaatatttgaaagcaaggaagggatcggagcaagcggcacggatgcagcaacacaatgggatcaacacttcgctgcaaatgtgccaaaacagcccacctctgttgcagatgggttgaagcagagacaggaacatgaggaaacggggttgtcgagggaggcggagaggtcgacgagcttggtggatctagagtcgaggggactgggatctggaagggaaaggatagcgacaggtcctttcccccgctgttgcgccgcgccctgctcctctttcccgttggctgccacgtggcctcctctcccccacaacgtgccgctgctcactctccgccgccgcgctgcatgccgctcctctcccccaccgggcggtgagcttggtgaagctagaggcaaggggcaggagggaaaggagacagctcgcagcgacgacatggatgatgaatacaccagacgcgcgaggaagatatacagttcaagaggctaccccgggcggtgccaacaccgcgtctctgccggcgacaaccccgaggtcctctccctctag

SEQ ID NO: 48279 - DNA, 173 bp, Oryza sativa
  Clone ID: PAT_MRT4530_5096C.1
aactctggtctccggtctgtgacggacggcgacggcgtacctgtcgaacttcgcacgccgcgtcatcgccgtccacgcgatctgtaagcacacgacgaagtgaaggaatagcgattcgtcagcagcgatggcttctcgacctgcagatctgtgcagaatcggatacatgacgg

SEQ ID NO: 48280 - DNA, 505 bp, Oryza sativa
  Clone ID: PAT_MRT4530_50970C.1
atggcatggcacggtgtgacattggagcaatctgaggcgttgaaaactaatccaacggtccgccgcctcgtcgctttgcttcccttcgcccgcgtcaagccgcccccgcgagctagttggcagccgtccccgcgccagcccgaaaaggcggcaggccgcctcgccgtttcgcttcccttcgcccgcctcaggctgccgccgcgccaggcggccgcgactaggaaggggaccggccggtggctgcgcgaggaccctgatgtatttatttcctactggtatttatttcctactgctacttctcagttcgctctacaagtgcagcccacattccccaactggccgcgcacgcacctcttccacaccgggaggcggctggacctcgtcgactccaggtcgcctccacgcgcctctggccggtcgcctccatgcgcctctggccacggcggcacggcaggccccggccccaacctcacgcggcggccgcccgaccgcctccacactcgtg

SEQ ID NO: 48281 - DNA, 214 bp, Oryza sativa
  unsure (1)..(214): unsure at all n locations
  Clone ID: PAT_MRT4530_50971C.1
tttttataaaaaattttttttttttttttttttttttttttttttttttttttttttntacgacaaaccacgaacttggatattaaagatgccacttatggatctccatgtgtgttctcttccagttccaagtgaggggttaatttgctcaacaacccagtcaaacaaatgggcgtaaatggactttgctagagcatcccttgcatcaatagcc

SEQ ID NO: 48282 - DNA, 927 bp, Oryza sativa
  Clone ID: PAT_MRT4530_50972C.1
atggcgctgtggggcgggctggggcagacggcgacggtggcgcagctggtcggagtggacgtcggagggctggtctccatgatcatgcacgcggcgttgacagctcggcagaacaagagggagtgcgagcagctggcccgccgcgtcttcatgatcggcgagctgctgccgcacctgcaggactcgtcggtgatgcggcggccggaggtccggcgcccgctgatgctgctcggaggcatgctccgggaggcgcacgagctcgtcgcctcctgccagggcaggagcacggtgtaccagttggtggcagccgggcggcaagctgaaaagttcagagatatccagcgtagaatcgactcctacctcctcctcttccccttcatcagccacatcgacatcactcgccgtctcgatcgaatccacagagagatgattccaagtgatcacccgaagccgacgtccctgccgtctccatctacaggctcccagaatcatgaagcggtggtcattcaagacgtggtaatccatggcggggaagctggtgagaagataaacttggcggggctcgctgcggcgacgaacaacttcgcccccgacagagagatcggtaaaggcggcttcagcacggtgtacatgactaggcttcccgacggacgggaggtggccatcaagcgcatcgacagcgcgtctatggaggaggacaccctgagagaggccaccatgctaccctcgcttcgccacgagcacatcattcgcctctttggctgggtcagcgtgagaaagaagcagcatcggcagcaaccattctggaagaagaggaaagggggaaccgacactgggtatggcggttatcccccgatcagggatgttcatgagagatcgatcactgtagcgatcgccctaaacaaaatatctctttgccgactttag

SEQ ID NO: 48283 - DNA, 536 bp, Oryza sativa
  Clone ID: PAT_MRT4530_50973C.1
ctgcaggaatcggcacgaggcctccccctatatccgattcctcctcttctcacctttcctccttcccttcttcttttactactacagtataccacacaaaaatttaaaaaaaacaaaagttagaaaaatatatgtataaaaatactatatataaaaaatttgaattcaaatttaaatttgaattgggtatgtaaacttttgacttataaactttggatctataaactttaggggtataaactttagaggtatagaaatactatatatagaaaatatttaaattcaaattcaaatttgaatttgaattagatataatttgaattcaaatttaaaacgggtatataaacttttgacttataaactttaggtctataaactttagatctataaactttagatgtataaaaatactatatataaaaaaatatttggattcaaattcaaatttgaatcagatatataaacttttgacttataaacttttagtctctaaactttaaatgtgtaaacttgatgtgtgtaaactttaagtgtat

SEQ ID NO: 48284 - DNA, 984 bp, Oryza sativa
  Clone ID: PAT_MRT4530_50974C.1
actatagtttactattttctccacatactagtactccatatcagttctagcagtagtgcagtactttaaaagcgatcaagaaattacctgacgtagcaggctaatgacagctaaggtaaactgaggtgggtatgaacaggttcactactccttaccaaaggagaaaaacgctaaaaatagaagcttatcaatcgatttgatcacggcaataatgctgcatgcgggctcaccttgtggattaacgccaggcggatgcgacagtgacgacgcggcccatccacccgaccccgagccggccaccgtcgggcgtcccgtcgcgccccggccgcgcgggcccggcccgggccctctcgcggccgccgatgtcctccccgatcgccacggcgcggaaccccgccatgccgaaccgggcgcgccacttgccgaacacctcgcaccgctccacccggtccgggccctcccggcccaccgcgttggccaccttgctcgccagggccgcctcggcccgggttctgtccgcgctgtcccggcccagggtcgcgtccagcgactccagcacggcgccgtagtgcgcgctcgcgtcggagaagcgcgccgccatcggcgccgtgttcgtgttcagctcctgctccaccagggtcacgacccgcgggcccagcgcgcgcacgcgccggagtagctcgtcgcgcgggttcgccggcgacacgctctcgtcgggcacgcgcgacagcgtgaaggcgaggttcacggccagcgcctctcccggctcgcaccctagcttggatgcctcgatctccggtgctcggcagctgactgccctgaagcggaagtctatcccggcttgctgcgcgagcttcttgagccgctcgcatgtggccgcgagcgattgtgtcatcgccggggtgaatggcgaggtgggatccgccacgacggtgaccttgagggaagtggcgggcacgcgccggtcggcgagggctttggatg

SEQ ID NO: 48285 - DNA, 1577 bp, Oryza sativa
  Clone ID: PAT_MRT4530_50975C.1
attaatcaccaaaaccaaattaaggcacatgaacttataacccacaagacacggccccacaacacgttttcgtgctccgacatgcaccacgacataccggaaagagcccgtgacaggacccttcgcataaccccctctaacagatcgcaccacacctcagggttcacccccgtccccagcaggcaacgggcggcccccctctcgtaccatggtgaatccgaaagccgatcaaccgaacaccccggccgacccaactccatcacacccacccttgcctggggatgacatcagcaaggggtgggcgccggcaagcgggcatcgcatgtcagcggcacaaggggaaggagaggggccggcatgcgggtcccaccggtcagaggctcaaggagagagaggtggctgctgggcgcggctcggctccaagccggccggccagccatggctagcggcggcggcgctcactgtcactggcggtgaccggcggcatgggaggtggcggcggacagcgcggaaggctgcggcgcacggcgcgaagggcggcggcgcggctcggcgctaggagagagcggcgcggcggcaatagaggctcgggagagtgcggcgacaaaaggaaaaagagagagggaggtgcgggggtgcttaaataggagcaggggaggcgagtcgtggctgggaaggggccctattgcgccggcgaagtggggaaggtggaggaggaggcgggcttgcgggaggcgtagggaaggtgggcggcgacgtgggtgcggagcacgggcggagtggggcgcggagagggcgggcaggcggtggcgtgggtggcggttgcctgcttaggcgtggcggctggaggtaggggatgaccgacaggtcggcccacctgtcggccagggcgtgacaatgacgcatcccctaacttacaaaaccagtgcaaactagatccctcggcggttttgactccggttctgtcttatgtggcagctgactcagcgtgggacccacgtgggccccatgcgtcagcctcttcttccctcccatctccaccgttgccgaaggggcggtgcacgccagcgcggtggctgctgaggtaggcgttccagaggttgtcggcgatgtcggcaacggaggcgttgatgtggagggagtagccgccgccctggctgccgatggagaggagcacggtgatgcccctggactggcagtgcttgatgtcagcgccaacggcggtgagcaggtggccggagatgtcgacgagtatcggccgtagcggaagacgttgtagaaggtgatgatgacggtggtgtagtggccggtgtcgcaggcctctctcagggagccttcttccttgtggcggccctagtagacggcaaggcccgggtcgtcggcagtggcggagcctcgccgtcgaggcctcaggtgtgaggcgacgaccggacgacgcctcggccgctcggcggcgcggcggcggcagcggaaggcctcggcagctgggcttcggtgatggcgatgctgccgagccgacaaggcgcgccacctcctcgcggcgggcgcggcggagccggtctagcgttcgtccggca

SEQ ID NO: 48286 - DNA, 412 bp, Oryza sativa
  Clone ID: PAT_MRT4530_50976C.1
ccggccggagcatctatttcgctctatccgcaggtgctttggtctgctttctaagcgagcgctatggctgacagatcttgtcgactgcgtccctcttgcacgcatagggacagagcgcagattctaccggcgcagccgacccggttcaaggcgaatagagagttatcttttcatccaggaattgaggatgtcgctcgtgcacgtctacgacgccgtagtccacgcggtggtcgtcacgaagaatgagccgcgttgattagacggtctccaactggctccggcatctgcgtgagtcagctcctgcaggcgcgcgggtggtgccctcgtggggaaggccacgaccggcttcacctcaaagtataccttactcaagcctgtgcaagacagagtgcttgcaaagcttgctgctgta

SEQ ID NO: 48287 - DNA, 802 bp, Oryza sativa
  Clone ID: PAT_MRT4530_50977C.1
ttacaaaatcatccttaaaccacaaaacggatacaacgcgtccctcaacttgcaaaaccagtgtagactaggtccctcggcggttttgactccggttttgtccgatgtggcagctgactcagcgtgggtcccacatgtcagcctcttcttccccttctctctctccacctctcttcctctctcatccctaaaccggcgggggaggagtggggagcgaccagcgagggcggagatgggcgcggccggcagccgcctggggaggaactggacgcggcggttgtcgtcgtcgtcggatctggggaggtggatggtgggaggtcccttatcttgccgtcgtcgacagaggaggaggcagtgcggtaggccgaccacgacgtcggtgtcatcgtcgttgatccgctctagctgccggggccgatagatgggagaggagacgacagcggcggaggcggaggcggaggcggatggggaaacggggctcgacgagggagagggcgcaggcataggcgaggagcgcatcccgcctccgctcgagggaggaggggttcgggagcgatggctgctcgacgtcggtgcgcaggtcgtacaccaccgtgaggtcgtcatcggccgcggctgcctcctgctccgagtaggcggagagttactggcgcagcatgaaggcgatgccgcgttgaagcaatacctgccgcaaatgcaaaaagaatatgcttactggatggacgacgaggccaagggaagccgtgatgggggtggcaagaaaattatatcccgtgatggggtagtcgtatttgatacttga

SEQ ID NO: 48288 - DNA, 357 bp, Oryza sativa
  Clone ID: PAT_MRT4530_50978C.1
ctatcccatctcttccccgttcccacttcgccggagcaccaccgcggccacggcgcgcgacgcgagcacccaccccgccgccgccggcgggttgcacgccttgacggcgcgctgcgcgctggggctcgtgacgtagctgcggtaggatgggtcgcgcgcgtactggcacaggcacggctgctgcgcccgcagctgcacgcagcagccgggcgacggcgccgcgcccagcatgatcgcgctcatgcacggcgacagcgccgacgggttgcaccccgccgcatccgccgcgcccgccgcaagcaacagcgccaccgcgtacgccgccgccgcgccgcccttgcggttgatgcccgccat

SEQ ID NO: 48289 - DNA, 846 bp, Oryza sativa
  Clone ID: PAT_MRT4530_50979C.1
ccggccgggaaccatatctcatcgtaaaatttgcagctcgtataggacagtaaacgaagaaaccatcgtcgtacgtcgtccatgtctgacgcccctcccatggccgagaaaccaactatcaaggtggagacgacgccgggagactggaggttcccgtcggccaaccagaccaagcgatgcttcacgtgctacatcgagtacaacaagtgcatagaagccaagggtgaagggtccgacgagtgcaccaagtatgccaagtgctacagatccctctgccccggggaatggatcgagaggtggaaggagcagagggcaaacgggactttcgctgggcctctctgaaacggggacagcgaccgatcgatcgaccatatctctacatatatcgatcggctacagctaataataccaatcaatcctgtatgcaatgtcgtctcgatcgtcagggtgaagcctcgtcgtgacactcctagctagtattatgtacactcatgacagtgtcagttattaattggttgttgtgtctaattgcagtattagtagcgaactagcgatgcccctgcactgctgtacagtgccgtgacaagctactctgaattttttagatagtacgctagctgcacccgtcataaatttggttgtctttggtttcggttggctctgcttccatgttgctctactactagtcgtactactaataatgggtaattagctactcacaggtcgatcagtacgttgatgccacatatatagttgtaatagtcatatggtttgggtgaactagctaggtagttctatatgatacacgaggaaccattgaccaagctatctgaaaggataagtaat

SEQ ID NO: 48290 - DNA, 603 bp, Oryza sativa
  Clone ID: PAT_MRT4530_5097C.1
atgcagtattgtgtggccgtagttaggtacgcacgtaacgtggccaatgtgtcatcgagcagaaaacaaccatgtggacgatcgatcgatgttgtcacgttgatgaagacgataactaacaatctgtctccactgcgtccagacgaaacatcgtgtgtggacccgcatggcatcgcgtcgcgaggtgaccgggacggacgacgggatcacgtgacaagggcaagggcagaacatggatgcatgcgccggaaacgtgagatttcacgacgatttcgtcgtcgttttcgcgtaattcgatcgttgcgcacccaggtagtcagccattggatcgatctgcgcatccactgggaaggagattattattactacctgcacgagcacgaacctgtcatttcgcgggtagggtacgaagtcccgccaaccgccttgaccgattacttcacgacatgcccgtcgtccttccttttaatcgtcattaggattttatctggtgatttattaatagtttttagatgtcacatcaacagccaccactctgctccacttgttgttatcgagtcgatcggtcggaactcggaagtaaacgcacggatgcaattctac

SEQ ID NO: 48291 - DNA, 348 bp, Oryza sativa
  unsure (1)..(348): unsure at all n locations
  Clone ID: PAT_MRT4530_50980C.1
ctgcaaagaccaggtacatgtagatacagtcctcatagggtgaagggacagcgctggggttggaaaaaacanaggctccccttccctgtcaaaacaaanagatacaatgttttttatgggggatagctgtgatctccctgtttagccctttgatttggtctcttcttccaatatgcatgtgttcactgaaccatgcatatgcatatgagagatgtgtcatcaggatntgatnanatggtggtggtggtggtgggctcaggggaatgtaaacaaatgtaacctagctacccccatactaattgctagaataatgaccataaaaaaaaaaaaaaaaaaaaaaaaaaaaaa

SEQ ID NO: 48292 - DNA, 2251 bp, Oryza sativa
  Clone ID: PAT_MRT4530_50981C.1
gccaacatatcgtttcttttcttttcatgtagtagaacaggcaacaacctcgcagtacaacacaaccagcttcttatcatcttgtgctgccttaccaataaatgcaaatacatcaaagaatctgtcaatctagtccaagctcccaaaaacaaaaaccttcaagaaatgctcctgcacctctaaaggtaaacaaaatgtatctgagctttgctcaagtagtacctctgctgtcttctgtatctgaccatgctaatacagtctgtatgactgccatggcaatgcactaaccctactaaattgttcatcatgatagatcatgcagacttgctcctcaggctgtatacatttccaattactccaataatgctaacaaccatggccaaaccaagcatcacaattgacaggagcctctcacccttacctaaagacttgccttccttgtccaatctcaatgcaataagggccgggaaaatgaaccccagtgccaaccccgtcgtcgcaccggtgaacttgaaggccacccagatgtttggtatcatcgtcgagccaagatagatgagtgccaagagcaccactgtcaaggtgagcatctttttcctgctatggggcgctaactcgccaaagatcaacgagtccaccgtctgcctaagcgagaagtggacaaccgggaagacgagaaccagatggatgacatacccaatcctgacaatgaagttgaggattgagctgaatctgatcccgagatccttgtcaaagttggtgagcacatcagattcagtgtcttcgccgaacaagaggtaccctgagaccgcagtcagtgcatataccacaacacatagcacagtggtgatcctcccaatcttgtacatgttgtgaggtgtcttctccttgagctcattgtagattggctgaacattgaaatggcagatgtaggcgttcgtcatgatcggtatcacgacgagcaaatccagcattgctgccctcgagctaaaatccggccccatcctcggcatactgatcttaccctcaacaaccttcaccagcgcaatgatgcatgacacaaccacaaacacgacagcaagcgcgaccgatgcagcagacgacaagctcaacgaatcgatcttctcgagcgcgcacaacggggagagaaagatcacaagaaccaccaagatcagcagcctccggttatcccactcgccatgcccgatcaactgatccatgacaccaatgtgcttcagtgaccctgacatcacatctccgatgatgatgaggtacacgatgagcacgccggcattgttgatgatgacgcacatctgcgccacgatgctcgccggacggccgagcgccttgtgcaccacctcgccgtaggacagcgcgcggcagtacacggcgaacctcacgagcagctcaatggtgacctcggagaggatccccatgaccaggatggagacgaggccgacggcgacgccgagaaccttcatggtggccgggagggccataatgccggcgccgatgatggaggtggcgaggttgaacaccgcggcgggcacgccggagccctcgggtggcccggcggggccgtcgccgatgagcggcaggtcgtcgttctcgccgccgccgccgccggcggcggcatcgccgtcgaccaggaacgaatcttgcttggagatcttggcgtggccgttgtagccgacgccattggcgacctcggatgtgcgctggttggattggagctcgatggaggtcaatgggagggacgagtaattcgtgttcatcttgcttcttggcgcatcaaagattggatcaatcaatcaacaacaaacacgacgagaaattcctcgtcgaatggacaaaactgagccaagaaatggaaaaaaaaatgtataaccaatctacagctccaagaacacaatcttgcccccaaaaacggaacaaaattcgactgcaaactacatcagctgatcagccggtgagatctcagaggggcttggcacacattggtggcatctaccacacaagaaactcaaattttcttgggccagatttggttggagatcgaaacagaaacaagaactgaaattcgtcctccctccgaacaaaaattggaggaaagagagggaggcgtgtacctaaggattgggacgagagttgagagatttgaggcgttgaaactgtggagagatctggggttctatctctctctttattttattttattttcgattattttttttcttctccctcctctctc

SEQ ID NO: 48293 - DNA, 297 bp, Oryza sativa
  Clone ID: PAT_MRT4530_50982C.1
atggtgagactccagaaatccttcttctcaagcatagagacgaagccaccaagaagaacaacggtggtccataaacccaccaagaagcccacccctttgacggccatcgacagccacctgaacctccgtggtctggagctgacattcttcactctgcagttgtgtagcatgtgtgctactcttggctaccctcatgagatggcctaccacggaggacacatcttgtcggtggcctaccagaatgttgctcttgtagccatcgacatgcttcaccagcactacctggacgagctgtag

SEQ ID NO: 48294 - DNA, 204 bp, Oryza sativa
  Clone ID: PAT_MRT4530_50983C.1
atggtcaccgggaacacagtcacgtgcaccctctttcgagatgaaggctacaacgatttgactgcaagtctgcaacaaacgccattgttccgtgaagtctacatcaaagcagatttggttcagaaatttggtgcagaaaaagaaggcttattggaatcggaggcgaaaagaacggatgacttccagtgttccaccatggtctga

SEQ ID NO: 48295 - DNA, 354 bp, Oryza sativa
  Clone ID: PAT_MRT4530_50984C.1
tttgtttatgaagaatgtctttttttttatttagagcgtttttgttactttttaggcccatgtggacactatttttacatggaacatcaaaaaaactaacattttattgcaacacggtactactagaacatcctggttttactaggaagaggttgctaaaaatgcataaccagtcaggttattgaaatgattttaaggccccttaccaaggatccggcgggcgagctgaataaccttggacataatggggacccccttggcggggatggaccaaaggttggtgtccttgaaaagcccagccaggaaaggcttagaggccctctggagcccgtgcaacgcagatttttggaaccg

SEQ ID NO: 48296 - DNA, 442 bp, Oryza sativa
  Clone ID: PAT_MRT4530_50985C.1
acggcacgagggtagtaaagttgcgagagagagagagagatacagtatagtaagtatgagtaggaagcagatacaggaagatagctaggagaagctagtgggacgacgtaggtaggccggtacctacgaccggagaccggcctacgagaagctaccgcaaggccgctaacaacccgccccctatgtacatacaacaaagataggcgacggcgaggcgagcggagtaggcgtaacaagcggacgcagtcgatagccgacgaccccgacgacgccggtagacgccgtcgtactaacgtaccccgacgacggcgacgacgacgacgccgcggggcagcaacgtagtaggaggagcgtagttaccacccggggagcaacctacgccaccaagagcctacggcgccaacctacttcgaccgcccccagcccaactacccccaccgtc

SEQ ID NO: 48297 - DNA, 435 bp, Oryza sativa
  Clone ID: PAT_MRT4530_50986C.1
atgggtgtccctcacccaatctcaagcaggcaacaaagacacgcttgggggcaagcgacaactgctggcaacccgcgtggagcagcggagctatcgagggaccacagggcacaagaggccgccacattcccttacgcggcgacggcaggacgccggcatcttgagcacagagatcgggggacgatgccagacatgcggatgatgtcggagaggagttggtgcgggggcaaaggttggggaagggtggaggaggggctggctgttgacaacaaatctgtgctcggcagatggtgccagatccgtgttggcgataagtccctctgtatgctggcggtggagagtgtgtcatggcggcagggccgaccgacgctagcgctaggcggcggtagcatggtgggaggggtcagcgtaaggagcttggtgaagatgacctaa

SEQ ID NO: 48298 - DNA, 1455 bp, Oryza sativa
  Clone ID: PAT_MRT4530_50987C.1
ctaaacctgctcttcaccaccctcgtcgctgtcgttgtcacctccttcagcttctttctggctactctctctgtctaaattcggggctttgatcggcagaggctcaacgtcatcaggaggatcatagtttgggtcagctagaaacgtgagcgccgtcaccacgtcgctgatcagaggccggctgctcgcctcttcttgcaagcacatcgatgagattgccagtgcctggtacagccctttcagtgggaacttcatgtccagcagtggatcagccatcttcacgaacttcttcttgtccctgaacagtggcgctgcccagtgaacaagaatctgctcgcgagtgggcttggtggtgtcgatggctcggcggccggtgatgatctcgaggaggacgacgccgaagctgtagatgtcggacatcttggtgagcttgccggtcatggcgtactcgggggcgcagtagccgtacgtgcccatcaccctggtggtgacgtggctcttgtcgccgacggggcccagcttcgccagcccgaaatccgacagcttcgcgttgaacccgccgtcgaggaggatgttggacgccttgagatcccggtagatcaccggcgggttggctatctcgtgcaggtactccatccctctcgccgcgcccaccgcgatcttcatccgcgtgtgccatgacagcggcgacgagttcggtgtcagatctaggagatgatcttgcaatgaaccgagtggcatgtactcgtagaccaggattctctggtcgcactcggtgctgtaaccgagcaaggtgacgaggttggggtgatggagaaggctaagcatcagcacctcgacgaggaactcgcggttcccctgcaatccatccttgtccagctgcttaaccgctatgacttccttggtgtctgggatgaatcctttgtagactctcccgaatccaccttcaccaagcaggttttccgggctgaaagagccggttgcatcggccagctgacggaacgtgaatactctgcttggaatgttgtggttgccgatccgtagtatctctcctgccgctgccctgttcctggtactattctcgagggagatctccttgacgaggctggccaagccggtcggttgggtcttgcccttcttcttcttccaattcttcttggtcccccacttgttcttctccagctccgggctcgtcgcggcgctcttcctcttcttcatcgtctccagcgtcagcggctcctccgcctcccgcgcggccttgccgaagacgccgcgcaccacccacttccgcttcttcctcttcttcgcgtccgacgccgccgtgtcctgcgccgacgtcgtcgcccccccgccgccgccgcagaagccgcggatccacgagcagcagctggcgcagccgccgcgcacccaggagcagcagcagcacgacctgctcgccgagctcagcagccccat

SEQ ID NO: 48299 - DNA, 560 bp, Oryza sativa
  Clone ID: PAT_MRT4530_50988C.1
tgctcatccatcatcgtcctcgactcctcgccgtcgcctccctcctctttgccgtcgcaggacggcggcagcggcagcggcgggcatcaacggcgatccattgtgtgagcgagttcctctccgtcccccggtgctatacattctcctctcaccttgcagattgctctctctctctcgttgatttggttttcctcatcgtcgttgatttctctcccttacttttggttggttctattgatatcggaccgtagatctagtgaggcaaacggaatggtatttttcagtttgaatattctagtataatggagactgctagcatgatcttgctgtcgaaatgaatctagcactcttgctgaaatatttttctatggttcaggataaaaacatttacccgtcttttcaaggttttcctagatcgattttttttaggaacattcgatttgacttacagaaaaaacgtaactgataaacctgatcctgaacattagtgcagtacatagtactagtttacacttgatatgttatgctaatatttgtctcaagtgcttcactgcttctgc

SEQ ID NO: 48300 - DNA, 213 bp, Oryza sativa
  Clone ID: PAT_MRT4530_50989C.1
atggccatatcgtcactccttctccgccatcacctatgcccagatccagagaagatgggggtggttgccgacctccaccctgctcgctactctccgccctttactagcctccgtcttgctagctgtcctccgctgtgggactccatcttactcgccatcgatgtagcgcggacctttagtggagaggatgtgaggctagaggtagactggtag

SEQ ID NO: 48301 - DNA, 300 bp, Oryza sativa
  Clone ID: PAT_MRT4530_5098C.1
atgccgggccagcccagcgtgccggcggggaggcccaggcatggcccggcggtcgggccgggccagcatgggcccgacccaagtcgggccatgccgtgcttgggccgggccaaaaagccatgccgggattccggtggcggcgcgatggatagcagacgatggcggcgcgacggataccaaacgacggcggcgcgacagataccaaacgacggcggcacgacggagaccggcaacagcgcgacaaaggccggcggtggcggatcgacggcaattagggttggtcaggcagtgcgctcctga

SEQ ID NO: 48302 - DNA, 155 bp, Oryza sativa
  Clone ID: PAT_MRT4530_50990C.1
ttggtttttgaaattaaggggggactcaacttttattgaatgcaccaacctatatgctataccaagagtaacctagtatcgccgcctaacaacacgccttaagaccaatatacggaacaatgtgtacatattacctagccaatgctattgccctt

SEQ ID NO: 48303 - DNA, 276 bp, Oryza sativa
  Clone ID: PAT_MRT4530_50991C.1
atgatgcgctggtttgagggtcctgaggaagattctgcagttggtgtagagttcagcttgcacgtggagtatcaccgggcagtcctcgagagcatgcttggttgtcttatgtatgggacaccaagttctcggtttcagggtgttggggccgtcgatgttccgttctccatcggagtgggaggaattattgacggggcgccgtttctctcagtcgtagccgtacccttcttgttcccgatgacgatcgggccagtcgagattggtgtaacggtgtag

SEQ ID NO: 48304 - DNA, 515 bp, Oryza sativa
  Clone ID: PAT_MRT4530_50992C.1
atgcgataatcactttgtttctattgacaagcactggtttagttcacaaaacaatagatttcaggatactccaagtataactgaatacctgatttagtatttgctgtctaaccatgctaatttagttatcaagaaaatacaatcgtaggtgtacaagattgtgatattcactagaaattgtgtacagtcccagttgttggcagtggttaacttccttgtttcctagaaagagcattacagcgccaaattttgagccatgcgccaaaaaacatcccctgtggatttctttgttcccaatatcattgcaacttgtgaatcaaacaggcagcagctgctatcttccatcgtatgatctctcatactaccatatcattctccaacatgatcggcccagttgaacaggtggagttttgtgggcatccagttgtcttcattgcccctagcggctatggacctccagaagtaagttcccatgtgtaacgtgcggcatagtgaagtaaatgcccaggtgttac

SEQ ID NO: 48305 - DNA, 290 bp, Oryza sativa
  Clone ID: PAT_MRT4530_50993C.1
ccttctccctcaacctacggcgccgaccacctccaaaaccagaccccgaaatctcgaggagcttgtcttttttcggtagcaatggcgttggagtcgaccttcatcatgatcaagccccgacggcgtcaagaggtcattcattgcgagactgacggcgtccatacaggcctgactggagacatcatcagcaggctcgagaagaacggattctacctgagggggatgaccttcatgaatgcggagaggtccttcgccagcagccctatgcccgactttccgacaagcccttc

SEQ ID NO: 48306 - DNA, 387 bp, Oryza sativa
  Clone ID: PAT_MRT4530_50994C.1
gcggggggcgcgtccgcacaaactgccacacatatcaagaacaaaaccaaatttctcttaaatatatataggggtaggggaaggcgagggggcggacttcactcctcctgcccctccgtcggcgccgccgtcgcctacgacacacgtcacggtgatcggcatgggggtcccgatcgggggcgtcatctggctcggcctcctcggcgggctgctgtgcgtcgtcttcacgaggcggccgcgcgcgcggctcgactaggaggaggaggaacctaatgtggaggaggggcaggacttgaagtgaaggtgacggagcacgtgcgcatcgtggagggcgtcttccgctaggccagggtcccctgcttggcggtcgggggggccatcagctgc

SEQ ID NO: 48307 - DNA, 342 bp, Oryza sativa
  Clone ID: PAT_MRT4530_50995C.1
ttgacattcgcatccaaacagataaggagaatggaataataacaatcactgatactgggattggtatgacgaggcaagaacttgttgattctcttggaactatagcgagcagtggaactgccaaattccttaaggcactaaaggagagccaagaggctggtgttgacagcaacttgattggtcaatttggtgttggattctattctgcgtttcttgtttctgataaggttgcagtgtcaactaagagcccaaaatctgacaagcaatatgtttgggaaggcgaggcagaatctagttcttacaccattagagaggagacagacccagagaagctccttccta

SEQ ID NO: 48308 - DNA, 2196 bp, Oryza sativa
  Clone ID: PAT_MRT4530_50996C.1
atgaagatgctcaacttacataaccgagaaccatttttaatttgtaatgggcgttacgaatctgtactaatattttctgttgcagcgcatgttctgtacccatgctgcattcagtcatcgtttctctatctgattgtagacttgatagaaattttaacagtttattatctggacaagataatgcccgggctatgtttgtttctcaggttcctagttgtaatcgatgacatatcaagcatagaaacatggaacagtattagtggtgcatttgtcgaaaacaacagtggaagcagaattattacaactacgcgaacaaaggatgtagcaaatgcctgctgctctagcttccgtggcattgtctataagatgaaaccactaggttggacggactccagaagcttattcttcagaagattatatgggtcagataactacatccctgaacctgaagaactcgtaattgttgttgatattttaagaaaatgtggaggagttccgttggctatagatgtcatagctagtcttttggctagtcaaagagaagttaacaaactggataattggttgaagataaaaaactctatggggtttgaactggaaacaaatcctaactctaaatggatgaagcatatacttaaacttagctataataatttatcttgggatctgaagacgtgcctcctatatcttcatatgtatcctgaaaacattaacatcatgaagaaagacttggtaagacaatggatagcagaaggatttattacccaaagagataaccgagacctggaagatattgctgagagctacttcagagacctcataaatagaagcctgataaagccagttcagtttaagtatggtgaggttgtctcctgtcgtgttgtgcacaatttgttacttgatcttattgttgagaagtcgacggaggaaaactttgtgactgtaattagtactgatcaagattgctcaagacgaggtaactttttgattcgccggctcaactaccgatcaaactgtggtaacataatccaagcaagtgagtctttacatcaagtccgatctatcacttattttgggaattggctccatcagcgtggtgaaagcttgcctcgtcttcgcatgtttaaagccttgagggttctacatatgagaatagaaggttatttttcattccgtgcaatatacgatttgtctcctatatgtaacctttttcaactgaggtatctgaagttggaaggtatttttttccagtttcctgatacaattggggaactgcgatatttgcaagtggttgacataaattgcggcactaatctcgtactcgtgggtggatttctgcgtgatgcttgtttaccatcattgcggcatctgagagctgcagggagtgaagagctcggcagggggattaacaggctgacctctatacgtacacttgaaggaattaacttctgcaattgctttgttgaaaacatccgacatcttggggtgctgaccaatctaaggacgcttggtgtcatctacaatcgccgtcgaggcaacgatgaagatgacctgatagatatggtaaagtttgctgctcttgccacttctctcagggaactgggcggctgcaacctccgctgtctagatttcagagttgttctagaggggaatatcaggcaaccacccattagcttcttgtgcagctggtctcctcctccacaattccttcagaggtgtcacctttacaaggcgttccatagggttccatattggatacaacaggttgagaccttaactagtctgtgtctcaaggtcgttgaactcaagggtgatgatatgcgagttctctcaaggttaccctgcctagcttaccttgacttgcaagtgttcatggttcctggcatggagatcattatagatagtgtatcattttcagttctcaaagaactaaagttgacctatggatcctccacctccagtttgtcgatcaagccaggagcaatgccaaagcttagaattatgcatcttattgtttttggccaggcagaacaagataccaagtctctatatggcattcagcaccttcacagccttgaagacgtcataatcacatctgattacaataatgtgttggtttcatttagggaagccctcgataggcatccgaggattggttccatccaagtatgcataggagcatcttcggatctataa

SEQ ID NO: 48309 - DNA, 351 bp, Oryza sativa
  Clone ID: PAT_MRT4530_50997C.1
ccaaccagcaagcagctatcattggggataaaaaatcgaccgtatgcggaacattacaataatgcatgcaagtatagaattagttatacaccagttgttacagataataaggtgatcgtagtagttgctcaaaacatgctaactgagcaacaggtaaaaatgattactcaaaacttcctttcttatcaggaaatgtgatgttgcactacaacaatgatgtttcgatgtatactgatgtaagttaaaaccaagtgctttgttgctaaaatcttggttgataaattggtaagctatatgttgaatgatcaaaattggaaggtgatcatcaggcgttgcttgcagctagcccat

SEQ ID NO: 48310 - DNA, 483 bp, Oryza sativa
  Clone ID: PAT_MRT4530_50998C.1
cccacgcgtccgcactaccttctcctccggctcttcttcagtatcgaatcctctcttctcctcgtgcccaccaccaccaccgtagcaatggcaggccaaggacgccgccggcgtcgccgtcgagctcgacgaggaggcccgcccccgcgtcaaggccagcagcgagtggatcctcaactgcatcgcccacggcggcgacatctacggcgtcaccaccggcttcggcggcacctcccaccgacgcaccaaggacggccccgccctccaagtcgagctcctcaggcatctcaacgccggaatcttcggcactggctccgatggccacacgctgccgtcggagacggtgcgggcggtcatgctcgtgcgcatcaacaccctcctccagggctactccggcatccggttcgagatcctcgaggccatcaccaagctgctcaacaccggcgtcacgccgtgcctgccgctccgtggcaccatcaccgc

SEQ ID NO: 48311 - DNA, 2972 bp, Oryza sativa
  Clone ID: PAT_MRT4530_50999C.1
gatgaattaggtgaactatagaagagctatgacgtcgcatgcacgcgtacgtagcttggatcctctagagcggcgctcgcgatctagcactaccttctcctccggctcttcttcagtatcgaatcctctcttctcctcgtgcccaccaccaccaccgtagcaatggcgggcaacgggccgatcaacaaggaggacccgctcaactggggcgcggcggcggccgagatggccggcagccacctcgacgaggtgaagcgcatggtggcgcagttccgcgagccgctggtcaagatccagggcgccaccctccgcgtcggccaggtggccgccgtcgcccaggccaaggacgccgccggcgtcgccgtcgagctcgacgaggaggcccgcccccgcgtcaaggccagcagcgagtggatcctcaactgcatcgcccacggcggcgacatctacggcgtcaccaccggcttcggcggcacctcccaccgccgcaccaaggacggccccgccctccaagtcgagctcctcaggcatctcaacgccggaatcttcggcactggctccgatggccacacgctgccgtcggagacggtgcgggcggccatgctcgtgcgcatcaacaccctcctccagggctactccggcatccggttcgagatcctcgaggccatcaccaagctgctcaacaccggcgtcacgccgtgcctgccgctccgtggcaccatcaccgcgtccggtgacctggttcccctgtcctacattgccggcctcatcaccggccgccccaacgcgcaggccatctcgcccgacggcaggaaggtggacgccgccgaggcgttcaagctcgccggcatcgagggtggcttcttcacgctgaaccccaaggaaggtctcgccatcgtcaatggcacgtccgtggggtcggcgctcgcggccaccgtgatgttcgacgccaacatcctcgccgtcctgtccgaggtgctctcggcggtgttctgcgaggtgatgaacggcaagccggagtacaccgaccacctgacccacaagctgaagcaccaccctgggtcgatcgaggccgccgccatcatggagcacatcctcgccgggagctcgttcatgagccacgccaagaaggtgaacgagatggacccgctgctgaagccgaagcaggacaggtacgcgctccgcacgtcgccgcagtggctcggcccgcagatcgaggtcatccgcgccgccaccaagtccatcgagcgcgaggtcaactccgtgaacgacaacccggtgatcgacgtccaccgcggcaaggcgctccacggcggcaacttccagggcacccccatcggtgtgtccatggacaacgcccgtctcgccatcgccaacatcggcaagctcatgttcgcgcagttctccgagctcgtgaacgagttctacaacaacgggctgacctccaacctggccggcagccgcaacccgagcttggactacgggttcaagggcaccgagatcgccatggcctcctactgctctgagctccagtacctcgccaaccccatcaccaaccatgtccagagcgcggagcagcacaaccaggacgtgaactcgctgggtctcgtctcggccaggaagaccctggaggcggtggacatcctcaagctcatgacctccacctacatcgtcgccctgtgccaggccgtcgaccttcgccacctcgaggagaacatcaagagctccgtcaagaactgcgtcacccaggtggccaagaaggtgctcaccatgaaccccaccggcgacctctccagcgcgcgcttcagcgagaagaacctcctcaccgccatcgaccgcgaggccgtgttcagctatgccgacgacccgtgcagcgccaactacccgctcatgcagaagctccgcgccgtgctcgtcgagcacgccctcaccagcggcgacgccgagcccgaggcctccgtgttctccaagatcaccaagttcgaggaggagctccgctctgcgctgccccgggagatcgaggccgcccgcgtcgccgtcgccaacggcaccgcccccgtcgccaaccggatcgtcgagagccggtcgttcccgctctaccgcttcgtccgcgaggagctcggctgcgtattcctcaccggcgagaagctcaagtcccccggcgaggagtgcaacaaggtgttcctcggcatcagccagggcaagctcatcgaccccatgctcgactgcctcaaggagtggaacggcgagccccttcccatcaactaagccaagatcccatcgccattgccattgccatacacccatcatcgaggaggagaggagactaaaaataaaagaaaacgaaccgcttcgtgtatcttcagacaaaaaagaccctgtattttcttcgttcgttgccgtttggtttatagtgatctcgtgttctttgtgttagctgctctgctcagcttgccagccatggcggcaaagcaagcggcttttctaagatattgtcgctaaactgtattttggggtgaaagtattgctactcaattccatccttaaaaagttgtggtaatagaaatgttttgatcctataaaaaaaaaaaaaaaaaactggagggggggcccggtgcccaatgggcctttaatgagtcggtttcccgccctaactgggcggggtgaccacgggaggattggaaaacgctgggtagccaattaatgggttgggggactgcgctttggggctttgggtttagggaaagccaacactgcccttggacagggccgacgaatggggatggcacacgctgtaggtgatagccgggggtttacgaccagagctacctgcctgccagactaggcgtcctctccttagttggtgcgcccgctatgggcttacctttcatagctctggtagtcagtctctagtggccatattgttgagtgttttgttacctgcgtgtagagtacacactcgcatcacgcaa

SEQ ID NO: 48312 - DNA, 1685 bp, Oryza sativa
  Clone ID: PAT_MRT4530_5099C.1
atggggctccccggcgccgagccgccggcggccagcggcggcggcctcccgggattcttcggcggcaagagcaagtacgtccgcatggacgacgtgctgccgcaggagcaggaggaggacggcgtcggcggcggaggcggaggcgtccgcgtccgccggagccacagcagcaggcgctacgtcttcgcctgctctgtcttcgcctccctcaactccgtcctcctcggctacgatgttggtgtgatgagcggctgcattctcttcatccagagagacctccacatcaatgaagtgcagcaagaagtgctcgtcgggtgcctcagcttcatctccctcctcggcagcctcgccggcggaaggacgtcggacgccgtcggccggaaatggacgatcggcctcgccgccatcgtgttccaggccggcgcggccgtcatgacgctcgccccgtcgttcgaggtgctcatggtcgggaggctgctggccggcgtcggcatcgggttcggcgtcatgatcgcgccggtgtacatcgccgagatctccccggcggcgtcgcggggctccttcacctccttcccggagatcttcatcaacctcggcatcctcctcgggtacatctccaactacgccttctccggcctcccggaccacgtcagctggcgcgtcatgctcgccgtcggcatcctcccgtcggtgtccatcgcctttgcactgctggtgatcccagagtcgccgcggtggctggtcatgaagaacagggccgacgaggcgcgcgaggtgcttctcaaggtccccgacagcgaggacgaggcgaaggagaggcttgccgagatcgagcgggccgccgccgccgtcgcgagcgccggcaagtacggcgacaagacggtgtggcaggagctgacgaggccgtctccggtgatccggcggatgctcatcaccgggctaggcatccagtgcttccagcagatcaccggcatcgacgcgctcgtctactacagcccgacgatattccgggacgccgggatcaccaccgagagccagctcctcgtcgccaccgtcgccgtcgggttcttcaagacggcgttcatcgcgcttgccatcgtgctcatcgaccgcgtcgggaggaagccgctgctgtacgtcagcacggtcggcatgacggcctgcctcgtcgtgctcgcggcgacgctcgccgcgctcgcgcacgggtcggcgtccaggagcgccggcatcgccgtcgccatcctgaccgtgtgcggcgacgtcgcgttcttctccgtcgggatagggcccatctgctgggtgatgagctcggagatcttcccgctccggctgcggtctcaggcggcggcgctcggcgcggtgatgaacagggtgaccagcggcgccgtggccatgtccttcctgtccgtctgccgcgccatctcggttgccggcgccttctccgtcttcgccgtcatatccgccctgtccgtcgtgttcgtctaccggtacgtgccggagacgagcggcaagacgctggaagagatcgagctgctcttcggcggcggcggcgggcgacggcgaggcggcgcggggagaggtggagctccgtgacggcgagcacctggtgcacaagggatgaggatcttgagttattgaccaaatggatcaatgtgaacttggccatttttttaggtgggttttaa

SEQ ID NO: 48313 - DNA, 245 bp, Oryza sativa
  Clone ID: PAT_MRT4530_509C.1
atgtctttcgtgattagtattacacctctcactataataaatgatgctgtaattggtaataatttgtttagctcctggtttggaatggtatattcctggtttgctgatagaagccaggattggttgttcagaatggttgggcctatgcaacgggtatgttgtatagcgttgaattaatattgtttaattaatactttactgttttattaaattctgaaagatttattaaatgctatttatgcaaa

SEQ ID NO: 48314 - DNA, 165 bp, Oryza sativa
  Clone ID: PAT_MRT4530_50C.1
atggaattaaaacacggttcaatcgttgacagcaacgcggcaaccaccgaccggtcgatcgagtgcgactccatcgtcattttggatgtcctcttggacatggacgcatatgtgttcatggctatgctaattgatgatatcttcaatacactacttcactccagc

SEQ ID NO: 48315 - DNA, 168 bp, Oryza sativa
  Clone ID: PAT_MRT4530_51000C.1
atggagctcctcctcggactaaggccactgagcgagagcgccaggtggacaaaccgccccgtcctcgcaatttgggaggtagttttggcgggtgggcccaatggtgtcgctactccaaagcacgagaacaaggtcggtctcgcgctcgcacagagcgagaccgagtga

SEQ ID NO: 48316 - DNA, 456 bp, Oryza sativa
  Clone ID: PAT_MRT4530_51001C.1
aggggggggagaggggaaagaggaagggggaggaagggagaggaaaaaaaggagaaaaaagaggggggggggaaaggaaaaaaaaaaaaaggatggagaaagacataatccctagcctgttttttgaccgccaataaaggtttcatctgggtttcagccgataaagtatctggacgttgcatcggcttacaaggattgcatataagttggatttagccagattatattgttgatttcttgcattatcatcagccgattgtctttatattattatttacatcaagcgtcagaatctacatcagaattatagccgatagctcaaaaccctatcgctatcggttgggtcaaacttactggtatgtccgtatctcatcaacttttggtcctgcactggagctgagcagatcttccagcccagtgtgtgtttttcgcatcaacatggtatgatcggataag

SEQ ID NO: 48317 - DNA, 3837 bp, Oryza sativa
  Clone ID: PAT_MRT4530_51002C.1
atgaatgatataatgattttttaatgaggttatcagtaatttgggaattcttgagattcctcttaaagggaaggcctatacctggagtaatatgcaagattctcccctgcttgagcaatgagactggttttttaccatagtttcttggacttcctcatatccaaatactttagtcaaatctctctcaagagtcgtttcagatcatataccttgtgtggttcaaattgtaacttctatccccaaaacaaatctgtttgggtttgaaaatttttgggtggagcatgaaggtttttttttatttggtctcttcaatttggtgtggtaatgggaactgccaggattcagctaaaaatatctctctcaagttcaaaagcttaaggaagggcttaaaaaagtggagcaagggtttgcccaggcttaatttggttattaaaaactgctctttggtcacttctttcattgacagaatagacgaactcagggatcttactttggctgagtggaatctgagaaatattatcaaagggaaagcagttctatatatgagatacatacatttatattgcaaaagagatgtactgttagatgggtcaggtttggtggtgagaacaccaaattttttcatgcagctgctacagaatgatacaaaagaaatctaattactcatcttaaatctaatgatggtatctctctctctgggcatgctgagaaggctgctgtcattttctagacttttcagcaaaggatgggggtaacttctaagcccaaaatgcattttcagcttagtcagcttttatcaccttgtgaatcacttatcaatctgtttgataatatttctatctctgaaattgatggagttgttaataaaatgcctatagatagggcccctggacctgatgggtttaatggcctctttatgaaaaaaatgttgccctttgatcaagcaagatttctatatgttgtgtgctcagttttgtgaaggtactctctgcttggaaagtctgaataggagtttcataactcttgcccctaaaaagccaaaccctgagaaggttaatgattacagacccattgctttgcaaagtatagctctcaagctaataaaaaaggttctagcagacaggttgcaatcagttattattagtctaattcaccaaaatcaatatggtttcatcaaagctaggattatccaagattgccttgcttggtcttttgagtatttgcatcagtgtcagaaatccaagagagaaattattttgttaaagcttgactttgaaaaggcttttgacactatagagcattctgtgattttggatgtcatgaggcataaggggtttgattcaaaatggctaggctggattgagaaaatctttacttctgcttcttcttcagttctcttaaatggtgttcctagaaagtctttttactgcaagagaggggttaggcaaggagatcccttgtctcctcttctttttgttttaggggctgatctcttacagtctattattaatagtgcctatcaacacaatgtaatatctatgcctatcccaactcctgacaatgattttccaattgtgcaatatgctgatgatacgctactcttcttatctgcatcatcaaatgagcttttcagcttaaaggcaattttgaatacttttgcctcctcgacagggctgaagataaattttgagaagtcatgcctgattcctctcaatgtgcagcctgaaaaagtacagcacttatctaagatgtttggttgcatgattggtaccttgcgattcacttacttgggtttacccatgggtataaataggcccaaggtaattgatttcagccctcttgttgatagaattgaaagaaggttgtatgctacctcagctttgctatcttatggtgatagattaactatggtgaactcagtgctctcttctttgccaacttactacatgtgtactctctctttgccgaaaagtgtcattaactctattgatagagcaagtagacattgtttatggagaggatgagacataaattcaagtaagaagcctttagttctttgggatagggtttgccagcccaaatccaaggggggtttgggagtaatagaccttaaatttcagaacaatgctctgttgatgaaaaatcttcataagttctataataggcatcctgttccttgggtaaatctaatttggactacatattaccctgataaagttccacatgccttgtctttaaggggttctttttggtggaaagatgtcttgcagttcattgatattttcagaggcttatctaagtgtacagttggtgatggcaagacttgtttattttggactgacttttggaatgataatataatatcagtgtcttatcctagagctttctcctttgtaagaaactagaaagactcaatgctgcagacttctttaaaggatctatctcagatgttattccttcctttgtcagatctggcctatcaggagtatcttcaaattcaaatggcagaccctttggatcggctctctgatgagtatcataaatggtcctgtgttctatgctcatttggagaaagagaaacccttgagcaccttttcttctcctgtcccttttgtactgatcgctgggagcaatttggtatagtctgaaatctctcctactcttttgagaatatgctaacacatgccaagaactcctatcaatcttcgcacttcctggaaaaggttctttatgcggcctagacaccaggtacgtgcgaccacggcggcgaggtgaaatccgcagctcccccgccttgtcgtagctgagcccaaacacggtcacgtggagcacgcatccatcctccgcgcacagggcgtccgccatgtcgaggccacggcgaagcgcgcactcgacgaggcagaacacgccgtcgcccatgtacgcgagcgtggcgcccgagggatgccctacgtgcctcttggggtcctcgcgaagcagcgtctcctcggtgatcttggaaccgagcgcggcggccgatgccgcggcgccgcgagacgcgacgtcgcaggagcagaggcggccgtcgtcgtcgagcccgacccacgcgtccagatcgtcgacgtagtgtccctggccctggaacggcagcagccagtcgccgagcggcgtccacgctgccgcggccggacggcggcgggcgatgtcgagggcgtaggtgccctgcctccggcgttcgtcgtccccggcgcgccggttgtgcgccgacacgaagacggtgcggccgtccgggtgcacggcgtaggcggtgacgaacatggggtcgcggccggcgccggcgaacggcggcggcgacggcgaggggacgctctcccatgaccaccgctcggcccgcccggaaaacctgaacgagtcgcgcgcggggtagtcgtcgtcgcggggcgccggcgacatcacctggaggtagtgcttcgacgcgctgcgagggtccagcgcgtacagccgctggccgtggacgggcaccatgatgcccggcatcagcggcgccgtcgggcgagggccggcggccagcgacgacgtccccgtgtcgtacatgaagacgggagcatcctcaaggagagcatgcgtggcgatgacgatcttgctgccgaccgcggccacggccgggaaggagaggtccaccggcgcctctatgcggacggcggcgtgctcagggaggtggtggaacatggcggcgccggtgccggaatcggtgaactcgtcgacgtccagcttgtggatgacgtatcccatgtcccaatcaagcaccacgtagatgtgtttatcgtcgtccctccgacgtgaccttttactggacat

SEQ ID NO: 48318 - DNA, 2425 bp, Oryza sativa
  unsure (1)..(2425): unsure at all n locations
  Clone ID: PAT_MRT4530_51003C.1
gtacntcctcgaggnnccggccgggtagaagtggtatgagaagtnntgagaacactcctctcccccaccacccacccgcctccctctccctctctctcttcttcctcctccgcgacgcctctccccaaaaaattcccctccccgaccgcctcgcctcggattcgattcccgcgccgccgcttcgccggcgccgacgacgacgaccgaccgaggtgggtacatcatcggggggcgagatctccgcggtgctcgaggatccggaggtttgggagaggaggaggaggaggaggaggaggctgtgcttgttcgtccgacgacgtccatgtcggggcatctcgatcgcctcgcgcggccatgttttgaagggtcttcaagtaatgatgacaagagagatcacaagtcagacgttgaaaattctgaagatgacaagagaacaagaatgggttctctgaagaaaaaagctatagatgcatcaaccaaaattaggcattccttgaaaaagaagaagaggaggagcggcagtcgggtcctctccgtgtctattgaagatgtgcgtgatctagaggagctgcaagcagttgaagcatttagacaagcactgattttggatgagttgttgcctgcaaggcatgatgactatcatatgatgctgagatttctaaaagcaaggagatttgacattgagaaagcaaagcaaatgtggactgacatgcttaaatggaggaaggagtacggtacagatacaattgttgaggattttgattacaatgagttagacgctgttctgcaatattatcctcacggttatcatggagttgacaaagacgggagacctgtttatattgaaaggcttggaaaggttgaccccaataagcttatgcatgtaacaacaatggaccgatatgtaagataccatgtgaaggaatttgaacggagcttcttgatcaagttcccagcatgctctcttgctgcaaaaaggcacattgattcgagcacaacaattcttgatgttcagggtgtgggtttgaaaaatttcagcaaaactgcacgtgaattaattgtccgattgcaaaaaattgataatgataactacccagagaccctatatcaaatgtttattgtcaatgctggtccggggtttcggctcttatggaacactgtgaagtcctttctggacccaaaaaccacttccaagatacatgtactcgggaacaaatatcaaagcaagctgctagaagtaattgatgctagtgaattgccggaattccttggtggcgcttgtacctgtcctgaatatggagggtgtcttaaagctgaaaaaggaccatggaaggaccaaaacatactcaatatagtccttagtggcgaggctcagtgtgctcgacaaattgtaactgtttccaatggagaggaaaagataatttcttatgccaagtccaagcaccacacaatacgagggagcgatacatccactgctgagtctggatctgaggctgaagatgttacgtctccaaaagtactgagaagttacatctcccatcctaagttgacccctgtccgtgaagaggtcaagatggttagagccacgagcttttctactcgcatgcctgaatacgatgttcctgtcgtcgataaggctgtagatgcaacatggaagagagaagtgactcgaaagactgccttctcatccaaagactcttctttgacaagcacagaaagttcatccaatggctctttggaccggatcgttgcagttttgctggcagtttttatggcaatcattactttagttcggtcagttaaagatcttgctgcaaagagattgccagataaaaacgagtcagaacagaagtattcaacattatatccagactcgatgccaaaagaggaattccgaccaccttccccaactcctgggtttgttgaagctgaactattttcgtcagtcttgcaaaggctgggagatcttgaagagaagttcctgatgcttcaagataagccttcagagatgccctgcgagaaagaagagttgcttaatgctgctgtccgccgtgtggatgcgctggaagctgaacttattgtaacaaagaaggccctacatgaggctcttatcaggcaagaggaactactagcctacatcgacagtaaggaggttgccaaggctcagaaaaagaagaaggcgatgttttgctattagcaccagccaaccaggagagggtacaccccctatcttgggattatactttctgacagccaaagacggcgtttgagaattgagatgttgtaatcggcagccccccctgctcgcttccctggttctcctgtaaaatgtgaaacgacagacgtcggatgtaaatcggcaaaattctgacataaataaatgtgtttttttgcaaaaaaaaaaaaaaaaaaaaaaaaaaaaaaa

SEQ ID NO: 48319 - DNA, 526 bp, Oryza sativa
  unsure (1)..(526): unsure at all n locations
  Clone ID: PAT_MRT4530_51004C.1
gttaccaatctgtaaatatgtgatacttcatcttaataatttagctctaaatatataattttgtttttttgaaatagttaaatatataattttgtgatacccgtcttaaatatataattttgtgatagtttgatccaaatatatgtagtgtgaaatttactcttcttattatgaactgtaatatggtaaaactcgatgaaacacacaccacaataccaaatagtcaatatggataagagaaatcctagaatcctaagaagaaaaataaaacactttggcccttaatcacaaggtcaggtatagaggtcaaaataggtaagagagatatttatttgtttacttatgcaaggccctccagactccaaggggaaaacataatcctataaattctcacacaaaacaaacatcatgtcttaatctcgatgccctaatacagaggtctggatctattagttaggttggagatatatttatatactaancaccatgaaaggcctttagagtcgatatgaaaaaaaaaaaaaaa

SEQ ID NO: 48320 - DNA, 103 bp, Oryza sativa
  Clone ID: PAT_MRT4530_51005C.1
gaccatctccacactttcctcatcccacggccgcccatgcccaccacctgttctgaccacctgacactgcctgccatgcctccctgccctcacctccaacccc

SEQ ID NO: 48321 - DNA, 208 bp, Oryza sativa
  Clone ID: PAT_MRT4530_51006C.1
acgcacgatgcacgcacacgtacgtcataggatgcctctttttttgagccgctctccttttttttttttttggactccaacagactacaaacatacagtaaatcaatgcttgaggttacacatgagacaaaatcgaagggaaagcggggccttaagactgcgggtcgccttgcaaacaaagtgaattctccttggccgtttttacaag

SEQ ID NO: 48322 - DNA, 462 bp, Oryza sativa
  unsure (1)..(462): unsure at all n locations
  Clone ID: PAT_MRT4530_51007C.1
gccacgtgctccttttcaatgaatgcccgtgaaacaaatacgcntnaataacacgctgaagcgactgaaaataacaacatcattaaaaaaatgcatctcaggacaaaataaaaaatactggtcaaatgcccgcaccataaacgcccaatttagtgtaaagtggtacctgcaacctcaaaatagctaatgttgacggctttgtatgtacaaaagacgattcaccatccttacagctaataagtggatggcaaagcaagctatgctaaatgcagttcttcaacaaagcgggaaacattcccacaattggaccatctgtcagccacatactaccggtgcaagttacaatatatggtactgacaagtccaaggggctatatggcactggcctgaaaatttgccaacgccagattaatgatgttcagcgcagcttatacctagctagcatgctggaaaattaaatat

SEQ ID NO: 48323 - DNA, 321 bp, Oryza sativa
  Clone ID: PAT_MRT4530_51008C.1
gcaaaacattccatgggggagggtttgttatgaaaagggcccggcgcatgcaacccagcagcggggagatcctactagctatgaggcaagccaggtcagcccagtgctggccggaggacaacatgctgaactgatggagctcaacccggcacattggacagaagcagacgggtgtacagtcttgccctggacagagtcacacggatcatccccagatgaaactgctgctagccacagtagccctgctgcagaaaccactggacgaaactccacagctgcgacggcgacccctaaggcgacaattactatgacaaagacgac

SEQ ID NO: 48324 - DNA, 1566 bp, Oryza sativa
  Clone ID: PAT_MRT4530_51009C.1
atgggggcagcggaggagcagctgaaggagctcggggagaagctggaggcggcgccgccggacccggccgacgacctcgccaagctgctcgaggtgaggacttgttactgctctttgggaggttggttctgtggtggattgacattttgtactgaagaagagaaaaatctgatttttggtcaccaatttaaggtacaagattttagaagagtgaatcagcaagctgcagaatgcctacatggagtagagcagtcaccaggtccctcagtgatggaaactatccaaccatgtctaaaggctgttgccagagatgaattcttgaaacaccacgatgaagatgtcaaagtactattggcaacatgcttctgtgaaattacaagaataactgctcctgaagctccatacagtgatgatgtcttaagggacatgtttcatctgattgtggatacatttagtggactcaatgatgttaatggtaaatcctttggcaggagagttgctattctggaaacagttgcgagataccgagcatgtgttgtcatgttagaccttgaatgcaatgatctaattgcagacatgttccgatcttttttagaaattatcagtgacaatcatgagccaaatattgtaaattcaatgcaatcagtaatggccctaattatagatgaaagcgaggatatagaggaaagccttctcaatgtacttctatcaactttaggccggaaaaaaactggtgtttctttgcctgcacgcaagcttgctcgccatgttatagagcactctgcaggaaaacttgaaccatacataaggaagattctgacatcatccttggatggggatggtacttctaccaataatagcattgaccatcacgaagtcatatttgatttgtaccagtgtgctccaaaggttcttaaagtggtggtaccttatataactggggaactgctggcagatgaagttgaaactcggtctaaagcagttgaaatacttggcgaacttttctctttacctggaatccctatcttggaatcatttaaatctcttttcgatgagttcctgaagagattgactgaccgagctgtagaaattcgtgtttctgtaattgagcatttgaaaaaatgtctgatgtcaaaccattcccgtcctgaagctcaagagattatcaaggcactttgtgacagattgttggattatgaggaaaatgtttctgtgaagtgctataccatggagagattggctgacatctacaagttctattgccagagtggttctgatagctcagtaaattctgatgattttgagtggattcctggaaaaatattaagatgcctctatgacaaagattttagaccagagtcaattgaatcaattttatgtggttcattgttcccaccagagtatccaacaaaggaaagagtgaaacattgggtaactgctgtcacacatttcgacaaagttgagatgaaagctctcgagcaaatttttctgcaaaaacagaggctacaacaagaaatgctgaagtacatgtcccttcgacagacaagccaggttggtgaatcttga

SEQ ID NO: 48325 - DNA, 798 bp, Oryza sativa
  unsure (1)..(798): unsure at all n locations
  Clone ID: PAT_MRT4530_5100C.1
atgccaacactgagtccagtgggcatggtgactgtcattgatggagacaagggggagaatgcccaggtgcagctctcagtggagcaggacaacggtgactttgttatccagaatggcacaggcaccatcctatccagcctgagctttgatcgagagcaacaaagcacctacaccttccagctgaaggcagtggatggtggcgtcccacctcgctcagcttacgttggtgtcaccatcaatgtgctggacgagaatgacaacgcaccctatatcactgccccttctaacacctctcacaagctgctgaccccccagacacgtcttggtgagacggtcagccaggtggcagccgaggactttgactctggtgtcaatgccgagctgatctacagcattgcaggtggcaacccttatggactcttccagattgggtcacattcaggtgccatcaccctggagaaggagattgagcggcgccaccatgggctacaccgcctggtggtgaaggtcagtgaccgcggcaagcccccacgctatggcacagccttggtccatctttatgtcaatgagactctggccaaccgcacgctgctggagaccctcctgggccacagcctggacacgccgctggatattgacattgctggggatccagaatatgagcgctccaagcagcgtggcaacattctctttggtgtggtggctggtgtggtggccgtggccttgctcatcgccctggcggttcttgtgcgctactgcagacagcgggaggccaaaagtggntaccaggcttggtaa

SEQ ID NO: 48326 - DNA, 759 bp, Oryza sativa
  Clone ID: PAT_MRT4530_51010C.1
cctcctctccacagcctcctcccgtcctctgcgctttcctccctctccacacctcccctttcctcccctccccacccaccacgatgcccaccagcggctgggcagaggggtggcgcaggcagcggggcgacgcaagcgaccaggcgagcggtcgggaggaggatgtgcaggcgacgcaagggacaagcgcaggtggccgacggcggaagcggcgcgggcgcaggtggccgatgccgggagcggcacgggctcagttggccgacggtggtcggacagtgaaggtagccaccggaaaacaagaaaggcacagcagattcaagcatgaaacttttgaagataatggattacccggccaggcagtcaagcgaagaaagaaaaagttctggcctcgaggttggcggcaaaagaggtgcgccaccaccaggctggcggcggcggctctgccgtctcgcgtaggggacgttgtggccccgcgcacggcagcgacgcgcgcggctgcagccggcgtccggcggcaacgccgggcacgcacgagaggcatcagccatcaggttggaagctcgtgaggtggcgcatccctgatgcgagcgaagacggaggaaggtcgtggcgtatcgctggcgtatcgtgatttatttatttttttggaaatcgcaaatatgtgggatacgtacgggatacgtatcggagcgtatccgatacgtatccgtatccgttgccgtatccgatacggatacgtgactatgcagccgtatcagg

SEQ ID NO: 48327 - DNA, 536 bp, Oryza sativa
  unsure (1)..(536): unsure at all n locations
  Clone ID: PAT_MRT4530_51011C.1
tctacttggtttccctatcttggaatcatttaaatctcttttcgatgagttcctgaagagattgactgaccgagctgtagaaattcgtgtttctgtaattgagcatttgaaaaaatgtctgatgtcaaaccattcccgtcctgaagctcaagagattatcaaggcactttgtgacagattgttggattatgaggaaaatgtgagaaagcaagtggtagctgctatttgtgatgtagcttgccattcacttggtgcagtcccagttgaaactatcaaacaagttgcggagcgtgtccgtgataaatcagtttctgtgaagtgctataccatggagagattggctgacatctacaagttctattgccagagtggttctgatagctcagtaaattctgatgattctgagtggattgctggaaaaatattaagatgcctctatgacaaagattttagaccagagtcaattgaatcagttctatgtggntcattgttncaccagagtattcaacaaggaaagagtgaaacattgggtaact

SEQ ID NO: 48328 - DNA, 381 bp, Oryza sativa
  Clone ID: PAT_MRT4530_51012C.1
tttttttttttttttttttttttttttttttttttttttttttttttttttttttttttttttttttttgggccccaaaatattaggacatagcccggtaaaaaaactaagccccatggggccaggggccaaaaacagggaaattggcatgagggggcaaaaaaactggttaaaggtccccaaaccaaagttaaaacatccggatggggggaaaaagctctttttttttttaagcccagggaaaataaaacaggtggctaggacacccaattttagaggggaaaaaacgggggggggaaaaaacaaagggggggacaaccggaggacggggaaaacttgaacccatgaacaaaggaaattttggtaaaaaactgtttttcc

SEQ ID NO: 48329 - DNA, 515 bp, Oryza sativa
  Clone ID: PAT_MRT4530_51013C.1
gtggagcaaatgcggtggcgatttggggtttggtgcgcgcgggcgaggtggtggtggaggcggagccggaggggggaatggagctgtctggttggggccgggtggtggagaaggaagacgcagccctcctccgcttcgaaaattttgaattaacaaagggttggggttggaggcgataccggattaaaaatggagcgccagtgttgggggaaatgcaagcccagatggatcttgtccacttctcgccgcgtgcgcggacggacgcggccgggtctctccttcgggagatcgcgcggtccccgtttcatgggatcccgcgcgtggagttcgtaaattcttctcgcccgctccgcctggccgccgtgcgatttatggtgcggcgcccaaacgcgcccgagcagacgcgtccggccgcggtggggtacgatacgacgcgacgcgatgcccacacgggagcgccgctgctgcggctacgaggctgcaggaaacagcaaatgaagcaggggctcggctag

SEQ ID NO: 48330 - DNA, 695 bp, Oryza sativa
  Clone ID: PAT_MRT4530_51014C.1
aatcagcccgccggttgagggccggtcagaccggcggtgtgtggccggtctgaccggcagggccgagtccgattgtgtttcatcgggtctcgaggtttccttgctcgggaaggcatgtttcgggtttcctttggtttctatcccgagttggacgtggaggagggcctgtagagggcaagatcaaccccgttcgccaccgctgcgagagtgcgacatctctttgtaggtacgtcacggtgaacgagacggcggagcgcgcgctgttctactaaaggcgaggccgacggcggctccactacgtcgtccaaggcgcccctcctcctctggctcaacggtggccttgtctgctcgtcaatccggtacggcgccatggaggagctcggcccgttccacgtcaagagcgacggcgagacgctcagcgcgaggatgaggtggccaccagtgttatcgcaccacgtcgtgctgacctcgccccacgcgcgccaggagcggcagatggcgcggaggcggacgtgcagcgatggctgctgcatcgcactgttcttgctggacagactgcgtggctcgccatcgtcgagggtgtcgctggccgtcgtgtcagccgaggatcgtagcgcgccatcactctccgataggtggcatgcggcgccaacgacagcgccggcggcgcttgggagccaggaggcggaccgcat

SEQ ID NO: 48331 - DNA, 571 bp, Oryza sativa
  Clone ID: PAT_MRT4530_51015C.1
aaggccggccggggaaaaaaaaaaaaaaaaaaaaaaaaaaaaaaaaaaaaaaaaaaaaaaaaaaaaaaaaaaaaaaaaaaaaaaaaaaaaaaaaaaaaaaaaataaaaaaaaaaaagcaccccctttgggttttttaaaacaaaaaaaaaaggggtcccaaaaaaccccccaaaaatttttccacccgggggtttatccctttgggaaagggttccccaccccaaaagttttttagccaaaaattttataaggggggaggcctcttgcggggaaaaacaaaaaaaaggggggttgaattgttgaaacgttttaaaccaattaagagggggggggcccaagggggaaaaaatgggtttttccaggccttaaagggaaaatttcaatggaccggattttttgttcgcccccaagttattcaaacaaaagggcctttaaacccccataaacaaaagggggcccccccaagaattttccccccgggggaaggtaaaaaggggccaactttcccagggtggcctgaggccaaacaaaaaaaagtcccaaaaaccgggaaaagccctttggcctaaa

SEQ ID NO: 48332 - DNA, 1134 bp, Oryza sativa
  Clone ID: PAT_MRT4530_51016C.1
cctgaattctatttgcattttttttttttttttttagacaaatatagtataacacgtagaaccaacgaagctaacaagttaatttcaatgcctgaagtaaaactgcttattcacgattggaggacagaatcacagtgacataagatcctttcacgcatgcttcttgttcttggcataccagttctcgatggtcatgaaccaattaaattggaagcaaattgctgcaaatcgcatgactccagcaccaataatctccaggaatgctgttagcggggaactctgtggggatagaccagcagtagctacagctaacattgctccctcgaaattgcagggtacaataaactttccggatttgatgccatctaaagccttcctagcaacatcatcagctttcatgccaccagatgatcctgctatgatattggtcaactctggcctccttttattctcttcagcgaaacccggtgtctctgtgtcaggagggaagatcaacgagacatgaatgttgtccgcaataacctcatgctgcaaggcctcacccaatccacgaagcgcaaatttgctcgctgagtaagcggtgtacccataaactccaacctggccggcctgtgaggacatgatggcgatggacgccgggaggcgcgtctcctttgtgcgttccttcatggcggggagcgccgccttgacgaggtggaaggtgcccatgaggttgatgtccaccatccacttgacctcctccatctcctgcttctccagctcctgcgggacgaacacgccgtggttgcagacgaggacgtcgacggggcccgcctcggcgagcgcgcgcgccacggcgtcggcgtcccgcacgtcggcggcgtggaccccgacgtcccgccccgtggcggcccggatggcgccgcgcgcctcctccagccttgcggcgttccgggccaggatggacacccgcgccccctccctcgccgccgccgtggccatggcgagcccgatgccgctggaccccccggtgatgagcacgtgccggcccttgagcgggatccgcgccgccctaggccgcgccaggaacgctagcgccgcgaggagcccgatgggcggcaccaggatgaggagcgagaggagcgcggcggccat

SEQ ID NO: 48333 - DNA, 686 bp, Oryza sativa
  Clone ID: PAT_MRT4530_51017C.1
tgatccccactagcccacccacccccaaaccctagccgccgccttccgtctcgcctcctcccactcgtccccatcctctcgctctcctgcctccgcctccgcctccccctcgcgccgccgcctccgtcccgcgcgaccacctccgcctccgcctccgcctacgcctctgccttcccctcgcgccgccgcgtccacctcatcgccgccgccgtcgcttcgtcgtctcccagcgcctcagcctccccattgcgtcgtcgccgccgctgtcgccccgtcgtctcccagcgcctcagcctccccatcgcatcgtcgccgtcggcgagcgcacccatctccgcctccactagcgtcgtcgcctcgcgccgccacttccaccttcgcctccctccgtccctgccgaccgccgtctccgggggacggggatctgacatcccccgtgcgccgggcagcatctccgcctccgtcaccaccgtcgtcgtcgccgagcgccgccacttccgccaccgcctcgccccgttgctgacgagcccgccgcccctgctgcgtgcttcgccgccgtcgccgacggtcggtgctccaccctccgttgcggctgccatcgaagaaacggcggtggtgacggagccggcgccaaggcctcctccgccggcgagggcgaccagcctgtactgcaggcttggaccgcc

SEQ ID NO: 48334 - DNA, 606 bp, Oryza sativa
  Clone ID: PAT_MRT4530_51018C.1
atgggggccctctacgtcgagatctcgcctgcccctccgcaccagccctcgcgactcatggatggtgtaggcactagacaacaggcatcgacgtcgatggccgagtccaccgaggccatccccaacctcgatcaaggattcaaggccctgaggtggtatggcgagccaggagaagcccacgccgcctcagcatccgcctccgcccccaccggcgccggaggtcgcgcctcgtgtgcgcgggttcggacgggcccaccgggcgacggcggaggtggttaccctaacccgccggacgcggcgatccccgacgccgcgacgctgcgggagcagtggctgttcgcggtgcggcagtacagcaggtggtactcccacgcctggggcaccgccatcctcgccggcgccgccttcttcggactcggctggctcgtcaagggctccaaccccctcccgtcccgcgctgagccccacgcctccaacgccaaggaggagggcttaccggtttgcaatgtcaactccttaaatctggttgttagcttccaaaagttccatattggaaatgccaacattgaatttggagaactatctgacaagagggatgagctatag

SEQ ID NO: 48335 - DNA, 608 bp, Oryza sativa
  Clone ID: PAT_MRT4530_51019C.1
cggcgtactcgaaatcgttcatatgccttgagaagagattaggtagtcccaaatgcacacaaaggtaagattatctgatcccaagtgaatacgttgattaaagggtggttgaaagcaaacaccggtaataaaaagtggtccaaatgaaatttactcttttttttcatttcctggcacaagatgaaaaattaagcgaccatgctcttgtttgcagcagtttcatggatgcagagctattggaatgtgcatctaaaacactggatccccatgaacgtcacgacttaaaagatgatgatgaaatttggtggagcttttggtgaagaaaaagccattggaggacgagaaggagggagtgattcccttgaatgtttgaaacatttattttggttttctgttttcagatttcttggaagcaatttaaccatagcatcacaatgcctagcccttcgatggaaatataaatgttttaatagtttaaagtgtagctatacctttttatcgtatttgatttgcgcaagtaccagaactacctgaacagtggaaaacccttttggtcatctagagaacccacagtggtgtggctttgaatccaaaaaaaaaaaaaaaaa

SEQ ID NO: 48336 - DNA, 1911 bp, Oryza sativa
  Clone ID: PAT_MRT4530_51020C.1
gccacatcactgttggttctctagatggccaaagggttttgtctatgattagtgaaaatcaatgttcattaatatctgtagcaaaagtcatcagacacaaactaccacatttgctagtagtgatagttatagcacaatcatttgtctttgggcataattacaacaaaactcctaataatgagagttccacttgttcaggtagttctggtacttgcgcaaatcaaatacaatgaaaaggtatagctgcactttaaactactaaaacatctaaatttccatcgaagggctaggcatttgtgatgctatggttaaatttgcttgcaagaaatctgaaaacagaaaaccaaaacaaatgcttcaaacattcgatggaatcattccctgcttctcgtcctccaattgctttttcttcaccaaaagctccaccaaatttcatcgtcatctgtgggtataatatgtcacagtcggtaccgtggagcttttaaagtcgtgacgttcattggggtccatgttttagtttgcaaattccaatagctctgcatccatgaaactgctgcacaagattggccctgtgatcaaccatattagacctcgactctaaaactttgatcagcagaatccgaacaaaccgatatctctgatgccttgtcaaggccattcgacttgtatggagcgacatgatttgaggctttgagtggaggggtagatcaattcattatgtattcattagtaccatgaaactgatccttgccgatctggctatccctacgcaggctgaacatgtcatcgacattaactggctcgcagtcggcgtggactcgcggcagccgcaactgtcatcgtccattggtcacagggacagcacggcccctccatggcgcccgcagtcccctacggcggtccaagcctgcagtacaggctggtcgccctcgccggcggaggaggctggatgaccctgcagctccttgaaggtgatgttcatgtttagccggttttgcagtaagctcactatttcaccagcacgtcgttggggcggttgggctgagacaaaacacaaaaaacatgcacagttcatgtcaagaaagttgcatatttggagcatattctgcgagaaagtaaaaatgggatcacggaggacatggtcggggtccttccaagaagttcctgatggccataatcttgctctccagcccaagctgctcggtgtcaagctcgtcggctagctcctgtgtgccaccggcttccacgtcactctgcaactccactcctctagagaaagccggagccgcctggcgacgtacggtcctcctcttctcgacgcaaccactgccttccttggcgccggctccgtcaccaccgccgtttcttcgatggcagccgcaacggagggtggagcaccgaccgtcggcgacggcggcgaagcacgcagcaggggcggcgggctcgtcagcaacggggcgaggcggtggcggaagtggcggcgctcggcgacgacgacggtggtgacggaggcggagatgctgcccggcgcacgggggatgtcagatccccgtcccccgaccacatgggggccagatccggacgctggtggccggagacggcggtcggcagggacggagggaggcgaaggtggaagtggcggcgcgaggcgacgacgctagtggaggcggagatgggtgcgctcgccgacggcgacgatgcgatggggaggctgaggcgctgggagacgacggggcgacagcggcggcgacgacgcaatggggaggctgaggcgctgggagacgacgaagcgacggcggcggcgatgaggtggacgcggcggcgcgaggggaaggcagaggcgtaggcggaggcggaggcggaggcggtcgcgcggaacgaagacggcggcgcgagggggaggcggaggcg

SEQ ID NO: 48337 - DNA, 217 bp, Oryza sativa
  Clone ID: PAT_MRT4530_51021C.1
gggaaaggaattttaacgggccaaataattgcttttttaaaaccatgttactccggtacgttgggaatccgggtaatttaaaaaacaaaaactggcgtactaaattaaggtcctaccccctgttgcatgacataacacaaaaaacccttcctcgatacatttattcattccaccctcagccattaaacggtaaaaatgccgcccccaataactgccg

SEQ ID NO: 48338 - DNA, 376 bp, Oryza sativa
  unsure (1)..(376): unsure at all n locations
  Clone ID: PAT_MRT4530_51022C.1
tgtgccgtgccgtgctccggaagatcggaatcgccctcctcccccgatcgatcgtgtccccccaattatagccccccccctntncccccccttcctccttttttccactttctcatcttcatatatcttctttccttcttcctacacttataaatctttatcaatgtttctacttacattactaccattcattccccaggcgattgacctcttatacgaccatgatccatcttattatgaatcctttttaatcgtactatgaacgtgattctatgaatgcatatcttaaatgccttttttacaaatactaatctttagacttcctcatggattaaattcactactatttaaggcattccaaacttctaacttttaa

SEQ ID NO: 48339 - DNA, 1141 bp, Oryza sativa
  Clone ID: PAT_MRT4530_51023C.1
atgggtggccgaaaggacgccggcgacgaagaggatggagaggccggcgcggcgacggcgttccggcgaaaccgaggagcagccggggtggagggcgacgccgcgacgtcgacgaaggagacggcgacgtcggccgacgctctgacgcggcgatcggggcgactgaaggcggtacagtggcggcaacgccactgttttgccggcgaggacgcgtctccggtgatttccccgcgaaacggaggcgaagccggggaagaggaggcagctgcgacgccgggagaggtgacggcgcagccggacggcgctcgggcgaggagggagaggcggctggaggcagccggcgcgaaggaaagagaagggcgacggcgggaacgtagctccgggggtctccgcgggaaatggagggcaagccgtgggagaggaggcggctgcgaggccgagggaggtggtggcgcggccagccaacgcacaggcaaggagacaggggcggctggaggcggccggcggcacgggagagagaggaaggtgatggggagggcaaggacggagtgccggacacgggagaggccgaaaacggcgccggaggaggtggccggcggcatcaatggtggaggaggcggcactgtgcacggcacggctggagagctcgggctctgcctgagctggaagaaggagcactgtagcgcgggggagggcatgattgctccaatcagggagaaattctcatctgaggacttcgaaagcttgtcgcatcttacacagaaggtgactttgcatgagcagaggtttgctgaagctaggaagaattctagaaaggttaatcatgtatgtccttatatgtatggatcggatgatgaagatgatgattctgaaatagctgcagccgaatgggtaaggagcaaaaaggttataccatgccaatgggtgaagagttctggaaaagaggagaggtatgactttgatatcaccaaggctgacaagatttttgacttgctactccgagagaagcagattcaacttcctgctggtcacacaattccatcggctgaagaatacggcaagaaaaggcagcagatccaagcggctatcgaaggagacaaaatcaaatttgatgattctaagaggccgatgaaggttgatg

SEQ ID NO: 48340 - DNA, 702 bp, Oryza sativa
  Clone ID: PAT_MRT4530_51024C.1
atgggtggccgaaaggacgccggcgacgaagaggatggagaggccggcgcggcgacggcgttccggcgaaaccgaggagcagccggggtggagggcgacgccgcgacgtcgacgaaggagacggcgacgtcggccgacgctctgacgcggcgatcggggcgactgaaggcggtacagtggcggcaacgccactgttttgccggcgaggacgcgtctccggtgatttccccgcgaaacggaggcgaagccggggaagaggaggcagctgcgacgccgggagaggtgacggcgcagccggacggcgctcgggcgaggagggagaggcggctggaggcagccggcgcgaaggaaagagaagggcgacggcgggaacgtagctccgggggtctccgcgggaaatggagggcaagccgtgggagaggaggcggctgcgaggccgagggaggtggtggcgcggccagccaacgcacaggcaaggagacaggggcggctggaggcggccggcggcacgggagagagaggaaggtgatggggaggtggctaggggcttgggagagagcaaaatggaccaaaggaaggaggagggcttcgttttatagggcaaggacggagtgccggacacgggagaggccgaaaacggcgccggaggaggtggccggcggcatcaatggtggtcaaagaagagggattaaatcccggtga

SEQ ID NO: 48341 - DNA, 262 bp, Oryza sativa
  Clone ID: PAT_MRT4530_51025C.1
tcaccggtccctaaacttgtaccgctgtgtcatctcggtccctaaactcgcaaatcgaccgttcaggtcctcaaacttgttcgactgtgtcatcccggtccctaaacttgtagatcactcgtttaggtcctccaacttgttcggttgtggcaccacgatccctaaacttggatttgaatatcatctggcttgcgatatcagagcatccatcaaattcaaccgaaaccagcaacctccaccagacctgaccactcttaaccgc

SEQ ID NO: 48342 - DNA, 2244 bp, Oryza sativa
  Clone ID: PAT_MRT4530_51026C.1
atggcggagcccgagtcctccacggccgcggccggcggcagccgcctccgcaacgcctgcgggggcgtgctgtgcgccttcaccctcctcctcatcggcgtcctcgcgttctcgatccgcctcttctccgtgattaagtacgagagcgtgatccacgagttcgacccctacttcaacttccgcgtcactcagtttttgtcgaagaatgggatctacgagttctggaactggtttgatgacaggacatggtatccccttggccgtgtgattggcggcactgtgtatcctggtttgacattgacagctggaaccatttggtggttgctaaattctctaaacattccgttgtcagtggagactgtttgtgtgttcactgctccaatattctcagcaaacgcttcctgggctacttaccttttaacaaaggaagccaaaggcactggggctggattgatggcagcagctattttggcaatggttccctcatacatctcaagatccgttgcaggaagctatgataatgaagccgtagcaatatttgctttgatattcacattttatctatatgtaaagacactgaacacaggatcactcttttatgcaacgctcaatgctctctcatatttctacatggtctgttcttggggaggttacacattcatcatcaaccttattccaattcatgtactgttgtgcattgtcactggtcgttattcttcacggctttacattgcttatgctccccttgttatactgggaacacttctggcagccttagtacccgtggttggttttaatgcagtgatgacgtctgagcactttgcatcatttctggtgttcataatccttcatgtggttgctcttgtgtattacataaaaggacttctaactcccaggctgttcaaagtagctatgactcttgtcataacagttggcttggctgtttgttttgcagtaatagctatactcatcgctttggtggcatctagccccacaaaaggatggagtgggcgcagtttgagtctacttgatccaacctatgcaagcaagtacatccctattattgctagtgtcagcgaacatcaaccccctacctggccctcctatttcatggatatcaacgtgttggccttcttgattcctgctgggatcatttcatgcttcttgcctttatctgatgcaagctccttcgtggtcttgtacttggtcaccgcagtatatttttctggagtaatggtgcggcttatgcttgtccttgctcctgctgcgtgcattttatctggaatcgctctttctgaggctttcgacgtcctcacaagatccgttaaatatcagctatcaaaattatttgatgacagccctgctgcttcaggggatagtagtgcagagagttctagcgctagtactgtctccacaaattcagcaaaaaatgagactagacctgaaaaaactgaaacagccccaaaggaaaaaccatcaaagaaaaaccggaagaaggaaaaggaagtggctgaaagtgttcctgtaaagcctaaaaaggaaaagaagcttttggtacttcctatggaggcatctgttttgggcattttgttgctgatcgtgttaggtggtttctatgtggtccattgtgtgtgggcagcagctgaggcgtactcagctccttcaattgtgttgacttctcgttcgcgtgatggattgcatgtttttgatgatttccgtgaagcctatgcatggctcagccataacacagatgttgatgacaagaacaaatcaataactagtggccccagatccctgacgttgggtgtttactttacaggtcttgttggctaccctagcgatgatattaacaagttcctttggatggttcgcataggaggtggtgtattccctcacatcaaggaacctgattatcttagggatggtaactatcgtgttgatgctcaaggcaccccaactatgctgaattgcctcatgtacaagctttgctattacaggttcgttgagaccgatggcaaaggttttgatagagtaagaggatatgaaataggaaagaagcatttcaaactaacacattttgaggaggttttcacaacccaccactggatggtccgtatatataaactgaaacctcaaaagaatagggttcggggcaagttgaagaagttgaaatctggctccaaagctagctcaacgaatgcggcgggccgaaagaagaacccatggcaataaaaatgagtaaat

SEQ ID NO: 48343 - DNA, 357 bp, Oryza sativa
  Clone ID: PAT_MRT4530_51027C.1
tcacctatcatcatccagccgacgaaggaagccatcagactcggcctgatctgcatctctggcgccaagaatcagatccaccgtagaatcgtcgcctaaactgaatttactgaacacgcgcagactcctcgccgctgtcgggccagactcgtcgacgacgtcgtagcggcggagcgacgcgccctcgggcggcgggggtgggggtgggcctcccggaggcggcggggcgggagcagtccttctgaaggcagcgggaccggtgacgggcctccctgtgggggtggacggcgcatcggcgaggagctgcctgaggagggtggcgagcgggcagcccttgagagcgacggaggaagccat

SEQ ID NO: 48344 - DNA, 987 bp, Oryza sativa
  unsure (1)..(987): unsure at all n locations
  Clone ID: PAT_MRT4530_51028C.1
atctggcaatgacccattttccatagacacacggaaaatatccttacagcaaagagaaaaaactgacagaactggtactctatccacttacacggttacaccaatcattcatgatactgagttttgagtatgaacagtgaagttgcatacgacaagttcacataaaacacgatgaagagcaggacagattcatgccttataaaccttgcagttgcagcgctttcatttctctacctttctctgagttcctccgatatacagaagtggctgctctatgtgctctttattctcttcagatgatttataaaaagattcatacagcagaagggaacccggtcaggactcaggagtcactcctgctaggcttgtttgaaactggaataacatttttactgccataccgtctctgaggatggtatccaatcatttgttgcagggttgctcatgcagcggataatgctgtcagatgagtaggcaacggttgtcacgttgaaggagctaccattgggtctttccacatcaataaaccctgtaccagtcgtgtagtcttgctggtcaatgccatagatcccgatgtagtattgggtctcgctatgtcactcgcagttcaagtccgggaagtacagctcctacttgtggggtctaggcgccagctaacatgtcntcgacaagcaagcgcaggtctgcccaaggaagggtggacgttccaggcgttgccgttgtggcacggactgtgatcgtcatggcctgcctcgttcgcgctcatcccagtcgtcatgtttggcaccacgtacctggtttggaaggtcggccccattcagttcacagagttgtaggctaggtactatcactcacacaatgagctcggtatatttgtgggtctttgggtgatgaaatcgcgttggatttgtagctgccttttgcggtgctttgatcagatactcgtgtgatattgtactgaactgccggctttggttttaagggtgg

SEQ ID NO: 48345 - DNA, 576 bp, Oryza sativa
  Clone ID: PAT_MRT4530_51029C.1
ccagcgtcttggctccagccgttcgggacggggcggaagttggaccacttggaggagtttgccttgccgaggatggtggcagcggcggcgcggaggccggccgtcacgctggcgtcacgacagacgacgaagccgagcagcgcgaacgacccggccgtcgttttcagccggtcccgcgtcacgatgttgtccttgaggatggggacgccatggagcggcccgcagtagcggtggctagaggcgcgctcgcggtgtcggcgcgcgccggctgctggagcgcgtcggagttgacctcgatgacggcgtggagaagcgcgttgaggcgcgtcaccctgccttgcatgcctgcaggtcgaggattgtgccgtcggccgcggcgggccccgccatccgctgtggagaagctgcgaaggccgcggcaaaatcagttcgtttctgtttttcaggcacaagagagctagattgatggaaatctgacagggtggacagcaatggcagcggctgacgacgctatctaggcacaaacatatagaggctacttgtacataaataaccagaaaaataaacaagcttgta

SEQ ID NO: 48346 - DNA, 243 bp, Oryza sativa
  Clone ID: PAT_MRT4530_5102C.1
atggaggccatggtggtgagctcgacggagggcgccgtgcgcatcctcctggggaagctggcggacgtcctcgccggcaggtacgcgctcctcctcggcgcgcgcgacgagatccaggagctcaaggacgagctcgagagcatgaacgcctgcctccgcgacctcgccgccgccggcgacgtcgacgaccgcaacgagcaggtgaatgcagccgcttctcgtctcgtgcgtgctgtagtttaa

SEQ ID NO: 48347 - DNA, 1182 bp, Oryza sativa
  Clone ID: PAT_MRT4530_51030C.1
atgtggccggagcgcaagagacaaagccgtgaccgtgagcatgcacactccctcccaactcgaagcacgcatgcctgcccgatcgatcgatcgatcatggatagatgggtacgtgaccaccacagtctggtgagtctggtcacgtacgtactggcgtacgtggaccacccggccacggccactgccatcgatcgatcgatcacgctcggctcggcgcttcttctcggcgtacgtctgccaccaacaccgcgccgttatatgtctcgtgcgctccgttacgttgttcgatcgccaagttctatttccaaaccgtcggataagagttgcaacaaatggctgatcgatcgatgcaggctccgtgcaccggggggattcgcggaatcgttcggtgaaaaggctattggtcactcaagagtcgagagaccctccacactcaagtgtagtactagtacttgccaagaacggcaaaggagcgacgacccttccttacgctgttacgcacgcaatctccgtgccctgctctcccctgttgcgagctactccacggagtatagagaaatggagaagaaaaagatatcatcatcgtctcaatcattcaccgttcgttgggacgtgacggggcggacagatgtaggagtacgacgtacacgcagagacgaggtcatctccgccggcggggcgcgcgcgatggtccacgctacatacgggcatacggctagcagctactccggccgcatgcgagcacgcaaattgcgaggcacacaaagccgtagtactagctgcatgcgctcggtggggccggtgttctgcgcttcgtcgcgtggggcgccgcgacagcttatagcctgcttgctcttatatgcctccatgagccagaggcggacgctagcggtcgcgtcgcgtgtgcttctcgagttgtccgtcgtgcgatcgacgggcgtacgttcttcgatccccggagatccggccgatccggccatggagctgatcgacatgagtgacatcatgtgcaagatgcatgacgacgctgcgccgtggcagttctattcaattcatgcgtgctttggcagtactaagcagctacgaggacggcaggaagatacacaggagctatgccgatgctgcaggtactgtctcctgtcgcaagtaggagtagcattttataacgacacagtcactaac

SEQ ID NO: 48348 - DNA, 458 bp, Oryza sativa
  Clone ID: PAT_MRT4530_51031C.1
atggaggagctcagccgtggggcagtagcggcggtggctggggatggcagcggtaggggtagcaacagcatcatgcggctggggcagtggcggcggtggctggggaacagcggcggcaagggggtggcagcagcatcaggctgcaggggcggcggcggcaagggagtagcagctgccgacggcgaccagcagcagcagcaacacgcgccaggagctgcaaggaaacagcaggagcaccatggaacggtctccccgggcccgcctcttgtcacttatggttacgtcacagatggttgccacgtggcggccaacatggcaggcggcccccttgccgtccttagggagggcggttttacactgttcgggggccgcctgcaacagggcgacgagggcggcccccttgccgcccttagggagggcggggacaagggcagccccagtttggagcccaacaaggg

SEQ ID NO: 48349 - DNA, 261 bp, Oryza sativa
  Clone ID: PAT_MRT4530_51032C.1
aaataggggattttatttagatttatatgacatcaagtttcaactggcacgcatgatgatgcatgactttatttttaacatttttttccttatacttttacaattcaggaccagacaccaccaacggggggaatgctcctcggagcaaagtattacttagggtagataccacatttgggtggccaggttaaggcccgacaagcttgggcttgggcttggggctgatcaaaggagacaccacccttttaaataggggggttt

SEQ ID NO: 48350 - DNA, 586 bp, Oryza sativa
  Clone ID: PAT_MRT4530_51033C.1
agattctattggtcaattgaagcagctgaggtatcttaatgcccctggggtacaagatcaaatgatccctaattgcatcaccaagcttataaagttaatgtacctcagccttcgtgggtcttctaaactattgtcactgccagagtcagttggagaaatggaggagctgatgtatcttgatttatcagattgttcaggaattcgggaactgccagagtcgtttggcaagcttaaaaaattgctgcatcttgatttctcagattgctcttgtatcagaagtttatcactgtgtctggggagcctcacggaactgcaatatttgaacctgtcatgcagttcagatctgtatctaccagaggtacaatttttgggtaatctaaccaaactggaatatttgaacctttcatgcagttcaaatctatttatacctggtgtgcaatttttgggcgccctcaccaaacttaattatctgaacttgtcatcacagcactcgaatctccagagtctaccggaagattttggtagcctcattgaactcaagtacttgagcttatcaggttgtgatatgatagtagaattaccaaga

SEQ ID NO: 48351 - DNA, 172 bp, Oryza sativa
  Clone ID: PAT_MRT4530_51034C.1
atggggtctggggagagcggcaaccaaaggggaggggatggggagagcagcgagccggcgagatccgaactcgagagcgcttctgcttgtgatgttcggcgacttggggtggagagggagcgcgtctacggctgtgcggcggcttggggtggggaggggaggtctggttggg

SEQ ID NO: 48352 - DNA, 432 bp, Oryza sativa
  unsure (1)..(432): unsure at all n locations
  Clone ID: PAT_MRT4530_51035C.1
tgccgtgtgcaattggggagaagccaagccaaggttggggaagggagaggagaggggctcgccgatcgatccctctccgcctccgccgtcgaaccgccgcgtcgagtcgagtcgaatctcagatcgagccgctcctccacatctcccactcgcggtcgccatcctccagcgtcgccgcgcgcggctgctccgcttcccgacgccgctcgccgctcctccagctcagctccccctcgcgcgcgtctccttctatctctctctccagcgaccagcggtggtggccgtctctagcgccggctgtcgttaggggagaagccgggtactcgtagtaggttcatgtgttggcacaggcaggctctgccattgtgatccccactggcatgttgcatcctaagttcctggttgcttgctcangctccaagttgtgcttat

SEQ ID NO: 48353 - DNA, 2039 bp, Oryza sativa
  Clone ID: PAT_MRT4530_51036C.1
ttttttttttttttttgttgcagaacaagaatatgcactatttttttttttttttgcatacagtgttttcctttatatactttacactaggtaatacaaaaaagtaacagtgtgtactgacaatttacatcacatatataaaacaaatgaagcaacggaatcattactagacagacacaacgaaagcacaatcctggaattctctcttttccttggacagaaactattgtgctctcaagacataaacttgaacaaagcaaagaatacattgggtcccatcatcagagaagaacagctgtcttgccgcaagtaatcaataactcaactctgtttcagattgagttcccaggcctagagaacaacctgctttaatcactgaagctgttcctactggtgaccaccagtgggctgtaaaaacaactgttgaagctggaggatcactgaccattgttagccaatggcacctccattgatgaaaaaatggctccttgatatgagctcaaaacaatggctattgttcaaacttattttcagcatagagctcagtattctgatattcctgatgatggagatggaacataaaccaactacaaattctaaaagtgatggaaatcttgacgtaggagtataggcgagaactgtatttatacgtgaagtaattctgcagctactgttcaggacagctcatttaaggatcaatggagccagtgaaagaactttcctgtgtcttgggagttggtggatcctcatcctccacaagaagagggtctaaatatccaattgccagtaccctttgcgcctcattgtaacgggcccaggtaacaaggtatagaccagcaatgataaagactcctccaataatgcttccaagatatattggggtaccaagaaatatagttgacaggatggtagaacatgctggttggagtggattgtagagggcaaccagagaaggaccaaggattttgtttgaccaagtcatgattgcgtaattcaagcaagatgcaacaattccagcatatagaatagcaatgatctcggtcgttgtcaatgcccattcatggagcccattggttgtaactacccctgtcagcaccatgaatacagtggcaaatgaataagagtaagctgttaaggataagctcgcgggatattttatcagcactggagcctgtatgaccagataagcgcccatcaggaagcagttcccaatgaggcagatgacaccaagattccatgtttctagaccgtattggagcatggccgatgtcaaccattggggcgtgtaagaattgctgctccatgtgccggccaggacattctcacccacaccattggagcctcctcctcctcctcctcccatgccaatcaaggatggacctctatagaacaccatcagcacggctccggagacgcacacagccgtgccaagaaccttgacgatgccgtccttggtgaagatattgatcacctcaacaccgacgattgcggctaggaggaatgtgaacaccggtatggctggctggaaggctgcggcgtaggaggcgttggtgaagctgaggcccagcaggaacaggagctggttcccgaagatcccggtgaagccgaggagagcgaaggaggcgaggaggtgaggggtgagggggcggcgggtgcggcgctcgcggaagaaggcggcgggggcgaggagggcgagggcgacgaggtcgcggtagacgcagaagacgatctggttcatgccgacgttgaggacggacttggtgaggacgtggtagccgccgtaggcgagctgggtgaacgccatggcggcgtgcgcgcgccacgccttgtccgcccacagcagccgcccgctcccgctcacgctccacaccgacgacgaccaccgctgcagcatcgtcatcccctcgccgccaccccgttccctccccatctccggcgaccccgccgccgcgattcctgcctcctcgccgccggttggtgtctcttgcttttgcaggagcttgtcagctatttcggctcctgactactgctgctgctag

SEQ ID NO: 48354 - DNA, 226 bp, Oryza sativa
  Clone ID: PAT_MRT4530_51037C.1
cttacttggtgataaggaggaggaggaggaggagggcaccgacatggccgcagccacggcgggcaccgtggcgctcctcggcgccacctgcgcgcgcgtccccgccgctccacgctccgccgagcttctgccgtgccgtggctgcttgctccaaccgctgtgccttcaggacgcgccgatactgtccctgctccgcgttatggccggcttcgacaacacctccatc

SEQ ID NO: 48355 - DNA, 280 bp, Oryza sativa
  Clone ID: PAT_MRT4530_51038C.1
aaaattctaaaagtaattatgatgaactaataccaaatctgttattttaattacacacaaaaaggccataaatacatgtaggtttaagaaaagttaaaagtcaataattggtaatagtatataaatagttgcccaaggacaaacaatttagatcattacgggaggcatccaccccaaattttcagacaaaagtggcatatcgcccactctatggatcaaaaattcataacaggcggtctgatatgattttcatggctgctagcccaagaaccaaatcaag

SEQ ID NO: 48356 - DNA, 375 bp, Oryza sativa
  Clone ID: PAT_MRT4530_51039C.1
atggcgtcatccactctgttgcttcctggtcgctgctacgccgccttcaccgttcgactctcgcgtcgctgcccccatcgctgcatcccgagaagagcctacctctggtggtgtcgttgtcgccagccgccatggccagatgtggaccgggatcgatcacaaatcattgttgccccggtggacgaagacgcagctgcctctttcaatgaattgttggtctttttttatgctaaggatggcttcagtagccataccaacatattggcttcaggtgtagccgtgcagcaatgccacatcttccttcaaaggtggagacaatgctatattatagcttgtgacggttggtttggtgtagtagatggagttgatcaatag

SEQ ID NO: 48357 - DNA, 473 bp, Oryza sativa
  unsure (1)..(473): unsure at all n locations
  Clone ID: PAT_MRT4530_5103C.1
gggctgcccgatattcggcacgagcgggcaccccatgttccgaaggtgttccgcgagctgccgcgagaagggggacttgggagtcgcgcggcggcgagcctcccggcgttctgcaacgtggacatccccaacggcggagagtggtgtctgctcactggctggcgagatatctggctactagctaggctactgtacctagctgtgcatgtttgtgcgtgtggttactaaataattagtgttttcctctttgtttggaaccatatgtgtgggtgaactaatatgatgaactccgatgttccncctctatttnaataaaaaaaaccctcccangggggcccgntacccattccccnanatgatccggggaatnnctgncgcctttacacgtcngaactggnaaaccctggcnttcccactnatcccttgngcaatcccctttcccnntggcgtntnncnaaaagccncncnatcnc

SEQ ID NO: 48358 - DNA, 954 bp, Oryza sativa
  Clone ID: PAT_MRT4530_51040C.1
atggcggccgacgcgctcgtcgtggcggggcaggcgaaggcgaggcacccgctgagccagatcgcggagagcgggacgcaccggctgctgctgaagcagtggctcaaggaggaggacctgctcgcccgccgcgtcgccctgcgggaggcccgcctcgacggcgcccgcaaggagatcgccttcctctactgcgccttcttcgccttccacgccgcctccatcctcctcctcttcctctccgcctccgcctccacctccgcggcgtgccggcgctcgtggatcccctgcctcgtgtcgctgctctcgtcgctggccatgctgtgggcgctgcggtacaaggcggacacggaggcggtgctggagcggctgctggcgcgggagcgggaggacgcgctgctgctcggcaagtgcgtcgccgagctcaagcggaaggggctcgagttcgacctcctcaaggaggtggacgcgctgcgccgcgccaagagcctgcgcgtcgaggccaagggcggcgccggcggcgagaggcccaagcgctgggcggccagggacctcgccgtcttcctcctcttcggcgccgcctgcggcgtcctcgtgctcaccaggtgcaagctgatcaaaggcccacgcgcagcctcatggctcgcggtggaccgcgcgcgcgagcggggccggaggaagcggctgaccggggtcagccgatccggtcgtgccgaggtggcaccgacgtggcgcctacgtggctgccacgcgggccggctggaggaagacgaaggcgccggctgcgaatggacggcgggcagcggcggtttctccgggacaccgtgcgacgacgaggggcgacggggaggaaacacgccgtgggaggccggcgatgagaggtggctaccggactcgggcggcgacggcggcgagcccactgcgagcgacggcagcagtcggggcggcgccagctag

SEQ ID NO: 48359 - DNA, 3706 bp, Oryza sativa
  Clone ID: PAT_MRT4530_51041C.1
ctagtcgacatctcgatcagggaggggcggcggcgctcgccgtgaggcgcgggagggggcgcgctcgcggtggtccacggtgaagtgcggcttgctcgccgtggggagtgcggtaaagagtggctcctcctcatctagcagtctctgctccagtcgtctggttccccccgccagccgccactcgcgcatttcgtcgaacgccttcgcctccatcccctcccaccaatcaatccacgtgctccagaaccctaaccctcgtgggggccgacgggggagaggttggcatctggcgatggcgtgttgctgcctccgtgccagcacggcgccccgcttcctcctcttccgcgccgccgcgcggcgagccccattgccggtcgcggtttccaggaagggtttctcggaacagtccgtattgccaatcacagacatgatcgagaattttcaaggaccatccatggagaacattccacgaattccattatatgatgatagcttgccctcaagcttgttgacaacttctccgaatcctagtgatagtgtagctcatgctgacccttcaaagagtagaataatgcttgttgatggaacctcagtaatgtacagatcctactacaagatattgggtaaatgtttcctgattctctttgttacatctgtattggtatattatgtttggcttctcctccttatcaagctgcagcatggtcaattggagcatgctgatggaaatggagactgggttttaactatatttaaagctctgtcactggttctagatatgctggagttcattccatctcatgcagcggtggtgtttgaccatgatggagtcccttatggtcattatactgccatgccatccaaagaatgtcacatggcaaaaggaatgacttttcgtcacatgttatacccttcctacaagagcaaccgcatcccgacaccagacaccattgtccagggcatgcaatacttgaaggcatctattaaagcgatgtcaatcaaagtgattgaggttcctggtgtcgaacctgatgatgttattggcacactagctgtcagcagtgtatctgcaggctacaaggtacggattgtctcccctgataaagacttcttccaaattctttcaccttctttacgtttgctgaggattgctcctcgtggttctgggatggtttcatttggagttgaagactttgtcaagagatatggagcactgaaaccatcacagtttgttgacgttgttgcgctttctggagataaagccgacaatataccaggagttgaagggattggagatattaatgcggtaaaactgataactaagtttggttccttggagaatctgttgaaatctgtggatgaagttgaggaagaacgaattaaacaggctttgatatctcaatctgaacaagcaatgctttgcaaaagcctggccacattacgttctgaccttccatcctatatggttccttttaagacatcggatcttgtgtttcagaagccaaaggatgatggagccaaattcataaaactcttgcgagctttggaagcatatgcagaaggctcgtcagcagacctaatcataagaagagccgcctatctttggaacaaacttaactcatgactatgctgatgtttccagcagtgacaacatacgaacttttcaagcacaaaagttccacctgagaagataggtgccttggtgctatgtttctgtcaaatttggtgcgagcggctcgctgtgctttctggcacaaaaggtggacggtgcatgtttagacaggctgtgcataccatgaaactgataattagttagttttgtagataaaagcacgtcatggctcatgcaatctacagaacatgatattttttacactctaatgaatggtggctgctggctggaaggtggaagaatggcatgtaggtacctgaaagcttaatcattcgattatgtgcaacttcgtagaaatattatctagtgacatgtcactattcatatgcacaatgataccaagttggtcacaaaagtatgtggagtacgtgtcttttcctcttagcaggtgacgggtacctagtacgtatactcccttcgtctcagaaaaaaaggcaaaccctgaattttcgtgtccaactttgactgtccgtctcatatgaaatttttttataattcgtattttcattgttgttagatgataaaacatgattaatattttatgcgtgacttgtctttttaatttttttcataattttttcaaataagacggacggtcaaacgttagacacggcaacccgggtttgtctttttttttggacggagggagtgtacctacgcagccatctacttgcggactaaagtcaccaggcaaagcaacactccaagccaaacaagccgacgcacggcggcgtcagctcgccgcgaaaccgcgcctgcggggatgtagcacgagctggtctgcggcacctgctgcccctgcgtcgtccccggcacgccggccgccgtcacacagtaccccgtcggcgtcatccctctgctcggctgcggcgtgttctgcaccgtaactggagtaacggtggccggagccgccgtgccgggagcggcggcgagcccgatgtcgtagttcgccgtgaggtcagtccggtagaggccgaacgaccgctcggactccggcccacccttgaggtcctcgtcgtagagcgcgaagaggtacgtgtccaccgatttgcctggcgtccgcggcgtgccgacctgcgacttgaggtgcgcgacgaggttgccgttgtacgccctggcgttgtccaccgtggcgccgccctcgtcggcgtcgcccttgtacggccacccggtctcggcgatgacgatgtccacgccgctgtaccccttggcgtccagcgccgcgcggatggcgtccagctgcgcgtcgaacatgttggtgtaggtgagccctgacccggcgtcgacgcgccccgggttcggctggaacaggcagaacgccagcgtctccggccgcgtgtcggaggcgtaggcgaagtacgggtacgggttgatcatgaacggcgcgccgttctgcttcaggaagtccagcaccgggtccaggctcccggcgaggtcggcgtggaacgcgcccgacgacggcgggtccgacgacgagagcaccgccatggaatgcacggtcgagatgtagagatgctgtgatgagatacgtgccttggtggttgagccggcggggagcgcggcgaggaggttctgcatggcggggaggagctgcggcgcgagggtgggatcgccggagttgagcagctcgttgccgacggagatggcggagacgggcaccgtggtcgggatgttcgcggcagcccaggccgacgctgccgccggggaggacgcgaggttggggacgtcgccgttcgggacgccgaggaggatggagatgttggagcccgcgagcgcggcgacgaggtccggctggggctcgtagaggcggaccttgccgatggacgtcgacttcagcaggttggccgtcgacgccggcggcgggaggttgtcggctatcgtcccatagttcactccgatgaacgactgcgacgcattccggaagctagaaaaggttcggtaactcggcacgaatgagtaacttgccaagtggaagaggagcgcttgcagcagcccagaggtgacagcagcatccagccacctcctcgcccccat

SEQ ID NO: 48360 - DNA, 186 bp, Oryza sativa
  Clone ID: PAT_MRT4530_51042C.1
atgtgcgtgcgggtactcaccggcgaggatgcggcggaagctgcaggaacgacggcggagccgctcggcgcagacggcggccaggcggactcaccagacgagaagggaaccgatggaggatcgcatcgactaggctcgaggctcgtccgagccgagcccgagcttgactgcaagctcgaaggttag

SEQ ID NO: 48361 - DNA, 780 bp, Oryza sativa
  Clone ID: PAT_MRT4530_51043C.1
atgtcgactgatggaggcgtaaacggtggacatgtcggtggcggtactggaggaggcgagaacgacaacatcaacggaggcaacaacaacaatagcaatatctcattctctggagcattctctagcaaaccgagtgaaccgcctctctctcctaaggaggaggctatgttcgagtctgcggattgcttgttccatggagcattgatcagtgtactagctgacaatatattggacgtttacatgcacatgccttcagcgaaggatatgtgggatgcagttgaggccaagttcggagtttccgatgctggcaagttcggtgttactgatctcattggctctttgggtgttgaggagaaggtgagggcaaaggacaaccccgataaaaagatcaagagaggttctagcgctaacttggtgcaaaagaagaaccctaatgcaccccacaacaataacaagaaagtcaaacgtgatgtcaaactaaaggcaacaaccaattttaagaagaaatgcaagggaaaggcgaagggcaactgctttgtgtgcggtaagtctgggcattgggccaaggattgtcctgatcacaacgacaaaaagtctgcaaacatggtcattagcgagggcgaaggaacatcggggtacggtaaatttttacctacagttctctctattttccactcacctgattggtgggttgatacttttcgacattttaggtcacgactacggtatttgcatggtttggagatcgttggtgccagggtatatgcgagattgaagtaa

SEQ ID NO: 48362 - DNA, 125 bp, Oryza sativa
  Clone ID: PAT_MRT4530_51044C.1
aacagaataatggcctcgtgtagtctgccactagccacatgagaaggatgataatttaacgtctatctttgaactaggcgggttcgatacggtcttgaagtaggcatgcgaattctctgaagacc

SEQ ID NO: 48363 - DNA, 2004 bp, Oryza sativa
  Clone ID: PAT_MRT4530_51045C.1
ttttttttttttttttttttttttttttttttaggaaagaaatatcacttttgtaaaaacaaaattatcaaaagcttcagtgcctctgtcctgaagttacaagaccataatttcaacatgaatacaacggaagatcatccccttatcatctaaccacagattcccaacagttcttgttccttccaaatgtcgaactagaaatcttatcttttaaatctaaatgaacctataagggaaagacaggcctttcccctcgaaaaaaaataatcagaatcaagctgcttcccgggaatgatcgagtcacttcctcttggactctggacagctctatatggcactcaaaagaacagcatgtgaccggcccaaaaaaaacaccactaccagcaactccctgctctgctgcaccaggggttaaaacacttctcaccgggagcagctaccaaaaatactgtcgctcttcttatcccctccttgtttatgcatagtacatgtacaagctgttcgcagcggcacaagcaattaaattttcggatgggtgccatgcgagatggagcaactttgtgctcagatcgtaggaatttccattggcctctattccggtgctttcagcacctcgtctaacaactcttgtcagagtgcttagagatctagcaggccttgtgggattctgaagttgcctcctagtagggtttcgagttgcttcaagtgtcgttgcctcattgctaccagtgccacaaccaaacacacgaaaaatgttgctgtaagaaccagttgctactcgcaatccatctccgctttgacagcactcaaacttatcaaaaatggaatcattttcatataaatcacatagcttgggccttaaatactcatgaacctggaatgttgcaactggaccagagttcatgttaatatcccaaagcttcagtgtcatgtaatcacgactgagaatatgtctcccatccttggaaaactttatgtctgaaatcgaggctataatctcagtaaagaatgatcttgaacctggggcctcatgctgctcaaagacttgggaatgagtgtcacaaagggctgactgcctcaggtcaacaagtcgaatggagccctttgagctactataagccaatgtattacagtgagtagggtggaactcagcagatgttatcacctcagtcaggtcctccatgtttgtaggtttaacatcaataatgttaaaactttggttgctaatttccaaattccaaagatttatccgcaaatcatctgctgatatgaaagtctcaccatcactgttatttgaaatagagtttatatggtagtcatgtgcatgcgtaaagactcttcggcaacttgcagaaagacttgtttcttggcttgtaaccaccacaggcaggcgaagcgaattgagtccaacaggttttgaaatgccaccatttgggagatatgcgctcgaaccactagcattactgccagcaggtctaccatttgcagatgcatttgaagggctcaaattcatctcagatacctttttgaccttcttttcttgaaccttccaaaactttattgtcttatcatttgtggacagaagaaacaatgctccatttgctgtttggcaccactttatcttgttaatcttctcttcaatttccaagctcttcagataatcaaactctggttcatggctttgaaactcagttttgtagcgaaattcaggatgcctgctaacggaataatcaactttctcagcctcttttctacaggcattatccttggcatctgtcctttcaaacaaaacaactcgcccccctctgtccccagtggcaagatgctgtcctgatttattgaattctattgccgatatgatgtccacatcctggacctcctccccagcgctgcgctcgccgaacacctgcgagaacctccactcgggcggcgaaggcgaagcctgtgccggggacgacgccgccgcggcgggctcgggtactaccgcctccccgttcatcgtgc

SEQ ID NO: 48364 - DNA, 505 bp, Oryza sativa
  Clone ID: PAT_MRT4530_51046C.1
tttgtttttttttttttttttttttttttttttttttttttttttttttttaattttttttttttttcaagagggaaaacttttgcgggtcaattccaacgggggggagtaaaaggacaggcattttcccagaaacgggtgggatgagagaaacgaagccccaaaaccattttttaacagccatcagggggggccgacctcctgctcgagcttgcccacccacccccagggcccggggaccacctccctggccggcccctgcagcggggggaccccggggggcggggccccctgcagcgagcccagcagtttgggctaccccttggcgcgggtgggcattgtcttgggcgccttgaaatccccgggggcgtaaaacttgcccttgaacaccgtgcccacaaagacggtgggctcctcgaggggctcctccttttggaaggcccgggagggcttgagcgccgcggggacctccttggtgtgggcgaacagccccccttcatcccct

SEQ ID NO: 48365 - DNA, 1143 bp, Oryza sativa
  Clone ID: PAT_MRT4530_51047C.1
atggcgtggccccagccaacgttcgactcatccatggcggctcatcaagcaccaccaattggaaccgcgcagccgaacactgtggcccaaccttacgcgcaagccgttacctcgcctttcgccacgccatatccgcaacaaggcgaaactgacacaaaagagttcctatccatctacgagtccgcgatcgaagccgctcatggcgacgagaataccaaggcgaaggacatcactgaggcatccgtcatcaacgctgcttcggccggactgctcgagggcgaactcacaagaaaaatcaccaacaaggagccacagacactcgagcacctgctccgcatcattgacggatacgcgaggggcgaagaggattccaagcgacggcaagtgatccaagtcgagtacgacaaggcctcagtcgccgctgtccaagcccaagtacaagcgcaagtatccgaaccggctcctctcgctgttcgccagtctcaaccaccggtccaaggacaaccgccaagactaggccaagctcctatgacttggaggaaattcagaactgaccgtgcaggcaaggcggtgatggctgtcgaagaagttcaagccctccgcaaggagttcgacgcccaacaagcaagcagccatcaacagcccgttcgcaagaagggccccgacgaagtgggaggtgtttcgaaggacctcatcatgcaccatctggcggtcaagccgggtgccaagccaaggaagcaaaagctgcgcaaaatgtccgctgatcgccaggaggcagcaaaggccgaagtacaaaaactgctcaaggcgggggtgatccaagagatcgatcacccagagtggttggcgaacccggttctggtgaggaagtcgaacggcaagtggcgcatgtgcgtcgacttcacagacctcaacaaggcttatctcgacgatatcgtcgtaaaaagccgcaagactctcgaccatgcgtccgacctacaggagaccttcaacaacttgcgcgtggctgccatcaagtcccaagtcctagcagacttcctggccgaatggacaccggcgttcgcccccgaacccgagtccgtcgaacagccttgggtaatgcactccgacggctcgtggtctcaaaagggggcgggcgcctag

SEQ ID NO: 48366 - DNA, 4329 bp, Oryza sativa
  Clone ID: PAT_MRT4530_51048C.1
atggccaccgaagagggtgtagagccttcggcgcccgtcgccgaggatggcggagcgccaccagcttcagcacccgcgccactgctgccgtcttcggctcctatcgcctcgctggggcaggtgccgaacacgcctgacacgatgaaggcggctgcagcagcaagggcactccaaaccagggcggagatcctttcgacaagccatctgctggcgccccaagccgctccatcacaaccggcaatggtctcgactgcgctcgtcgccgcacaagtaaaccctgaccccgaaacacaagccgaagccgacatggaagccatgcgacagaatatgacacgactccaaggcatgcttcgacagatgcaagaacagcaacaggcgtacgaggcagcgaggcgggccaaggccgcttcggccccaatcctccagtattcggcaggctatgtcccaccccaagtctacccacaagccacgcaagtgccagcatacttcgtcgggcagccttcgatcgcagcggtacatccggcccctcgcgggcagccgcaagctcagccggtcactgttcaagtacacccacaactgcccggccaagtgtcacaagcaatggcaaaaggggcttcgactcggcaggcacagcttcaagctttccttcagcaacttagccaacccagaacacaagtcagggtgcgcccagttggttgccgtcgaatcagccaggcaccagctgttcggccgcaagcaccaacgccaggcttcggggcgaaccaagcaccaaaccaggccgccatggcgtggccccagccaacgttcgactcatccatggcggctcatcaagcaccaccaattggaaccgcgcagccgaacactgtggcccaaccttacgcgcaagccgttacctcgcctttcgccacgccatatccgcaacaaggcgaaactgacacaaaagagttcctatccatctacgagtccgcgatcgaagccgctcatggcgacgagaataccaaggcgaaggacatcactgaggcatccgtcatcaacgctgcttcggccggactgctcgagggcgaactcacaagaaaaatcaccaacaaggagccacagacactcgagcacctgctccgcatcattgacggatacgcgaggggcgaagaggattccaagcgacggcaagtgatccaagtcgagtacgacaaggcctcagtcgccgctgtccaagcccaagtacaagcgcaagtatccgaaccggctcctctcgctgttcgccagtctcaaccaccggtccaaggacaaccgccaagactaggccaagctcctatgacttggaggaaattcagaactgaccgtgcaggcaaggcggtgatggctgtcgaagaagttcaagccctccgcaaggagttcgacgcccaacaagcaagcagccatcaacagcccgttcgcaagaagatctctttcgagccagaggatgccgaaggggtgctgttcccacatcaagaccccttggtgatctcggccgaggtagctggcttcgaagtccggcgaatcctggttgacggggggagtttggccgatgtcatctttgccgaagcatatgccaagatggggttgccaaccctagccctcacccaggctccagccttgcttcgtggttttggcggcgaagtagttcaggtattgggccaagtacaactggtggtagctttcggcataagtgaaaacaggcgcgaagagcagatactgttcgacatcgtcgacatcccatacaattacaatgccatcttcagtcgtgcaaccttgaacaagttcgaagccatctcccaccataactatctcaagctcacgatgccgggcccaattggtgtgatcgtcgtcaaggggcttcaaccttcgaccttatcaaagggcgatctggtagcaagcaggacagtggacaatgttgaggccgaaccacatgaccatgctaaacgcatgccgaagcctgcacctcacggcaaggtgatcaagatgcaagtcgacgacgccgatcccacaaagtttgtcctgctagggggcgatctaggcgaagaggaagctgaggatatcctgaagggccccgacgaagtgggaggtgtttcgaaggacctcatcatgcaccatctggcggtcaagccgggtgccaagccaaggaagcaaaagctgcgcaaaatgtccgctgatcgccaggaggcagcaaaggccgaagtacaaaaactgctcaaggcgggggtgatccaagagatcgatcacccagagtggttggcgaacccggttctggtgaggaagtcgaacggcaagtggcgcatgtgcgtcgacttcacagacctcaacaaggtatgcccgaaagatgacttccccctaccacggatcgaccagcttgtcgactcgacagctggttgcgaactcatgagctttttggatgcgtactccagctatcaccagatccacatgaatccggccgacatccccaagacagccttcatcacgtcgttcggcacgttctgccacctcagaatgcctttcggcctgaggaacgccggagcaacattcgccaaaatggtgtataaggcttatctcgacgatatcgtcgtaaaaagccgcaagactctcgaccatgcgtccgacctacaggagaccttcaacaacttgcgcgtggctggtatgaaactaaaccctgagaagtgtgtttttggtgttcgcgcgggcaagttgttgggttttcttgtttctgaaaggggtattgaggcgaaccccgagaaaatcgacgccattcggcaaatgaagcctccgtcgagcgtacgcgaagtacaaaagctcgcaggccgaattgcggcgatcagtcgatttctctcgaaggcagccgaaagaggtttgcccttcttcaagaccctccggggcgcgggaaagtttagctggacacccgaatgccaagtcgcgttcgatgagctaaagcagtatctgcaaaacccacccaccttggtcagcccaacaccaggaagcgaaatgctgctttatctagcagcttcgccggtggcgtatcctttgggcgaagtactatggggcaaggaaatcaccggccggctcagcaagtgggcggcagagttatcacccttcgacctacattttgtcactcgcacagccatcaagtcccaagtcctagcagacttcgtggccgaatggacaccggcgttcgcccccgaacccgagtccgtcgaacagccttgggtaatgcactccgacggctcgtggtcgcaaaagggggcgggcgccgcggcagtactcacttcgccagggggcgtgccgattcaatatgccgcaaggttgcagtttggcacgaccaacaacatggccgaatacgaagctgtactattgggcctaagaaaagcaaaagaattgggggttcggtgcttgctcattcgaacagactccaaactagtggcaagtcatgttgacaagtcttttgaagtaaaagaagaaggaatgaagaaatatctggaggccgttcggtctatggaaaagtgcttcgctggcataacggtcgaacacttacctagaggccagaatgaggaagcagacgccctggcgagatccgccgcctgtggaggcccgcattcgccaggcatcttttttgaagtcctatacgcaccaagtgtgcccgcagaaagcctagtcatcctggcaatcgaccaggcagaactgggcgaagatgcagaggactggcgaacaccgttcgtcaagtacctcaagaacggctggctcccggaggatgaagcagaagcgaagcgcttacagctcagagccacaaaatacaagcttatctctggccagctgtatcgctctggggtgctccaacccttacttcactgcatctctttcgccgaaggagaggaaatggcgaaagagatacaccaggggctgtgcggtgcacatcaagccgcaagaacggtcgcctccaaagtgtttcgccagggagtctattggcccactgtgctgaaagtttgtgtcgagcaagccaagaagtgcgaaagctgccagcggcatggccgaagccaaactgcacctcagtacgagctacaacctatcgcaccagtatggcctttcgccagatgggggctagacatcgttggcccattccctgtggcgagaaatgggtacaagttcgcaattgtagccatcgaatacttctcccgctggattgaggccgaaccactcggtccgatcacttcagcagctgtgcagaagttcgtatggaaaaacattgtctgccgtttcggagtgcctaaggagttcatcactgacaacggcaagcaattcgactga

SEQ ID NO: 48367 - DNA, 241 bp, Oryza sativa
  unsure (1)..(241): unsure at all n locations
  Clone ID: PAT_MRT4530_51049C.1
ccggccgggnagttctgaagtgctctctctctctctctctctcggagtttctacttcccccttttttttcttcaattcttgcctcgacattctgcgcaaagggttttttgccccctgcgatattaggcctgacacccagaatgtgggagagctctccgcgtgaaagtcccagacaatgcaggtcctatacgtggaaaatattttagaattttctgagtgtgatgtatcaatgtgacaccag

SEQ ID NO: 48368 - DNA, 482 bp, Oryza sativa
  unsure (1)..(482): unsure at all n locations
  Clone ID: PAT_MRT4530_5104C.1
atattgaagaatgtgtccacgtgttgtgagcgccaaagcactagtgcaagtcgagtggggcccatctcgtgttgcatttgttggacccagggatgatgccgctgattggctncgtcncatggggatctcncattgtcaggtgcttgtccggactgacaactggttgcaggcgccggactctatcatggctgccgttgactgagactgctgccaccgatggtgatctgatggtgttgacatgtgctgcacaaggcacagatgaaattggcctgctttttggcatgcacntgatgattnatgggcctgcgtgccatggcacttggtggtggtgcactggaggaatttttttgagcaccattntccttttttctttgtccaaaccaacaaacttcaataatgatagcaaattcaantgactggcttacttgagttccacccgttntttctacgatgaatcgttacccctaaaaaaaaaaaaaaaa

SEQ ID NO: 48369 - DNA, 397 bp, Oryza sativa
  unsure (1)..(397): unsure at all n locations
  Clone ID: PAT_MRT4530_51050C.1
ggcggcggcagcagcngggcagctttcctcttcctcggtcagggcaggcggagctctccttgcgatcgcgggaaggggcgagatgccgatgatgccagtgcggtcagggccgccgatgcagtatccggggcctcctccactggctcgcgcgcgccgcgatcccgtcgatcgcgagatgatctgcccgctcctgcntccggttttcaataggttggtggccntccccnnnntgatgagcttgccgtgaggggatnggatgccaatgatgnggcgcngatttgcncgtggaagganngccctctccgngagctcatctgatcttnggatatgnggttgcctcttgcagctngatatncatnntgcaaggcntttcttttgctttcctggtnccctgata

SEQ ID NO: 48370 - DNA, 750 bp, Oryza sativa
  Clone ID: PAT_MRT4530_51051C.1
atgccgtcgtcgtcgtcgtcgacggcggtgccggaggagatcgagcaatggttggtgctcgggaagcaggcgctgtgggtggaggacttctcggggacgtgccagcgggagtgcttctgcgccagctgcttccacgccttctgcacccactgctgctggttccaccacgagcccaccatccacatggtcttccccgtcgccgccgacgccgccggccggggagtctacgccacgcacggcccggacggctgccgggttcacccggacttcgtcgaggacgtcctcgccgcgcaggactacgccacgcgcctcccctgggacgccttctgcctcctgtgcggcaccgccttcgccgccgccgcgtgcccggaccaccaccgccaccaccacgacccgagcttgcccgacgccgtcctccgcgtcgagcggcgcggcgggcgccactgcgtgcgctgcacggggtccgagtggtggttcccctacgtggaacagatcctggacgacccggtggaggacgacggcgacgagcagcttctcccggtgatgacgaggagaccgggcagctgcaagcagtgcggcgacccggacaccggctacttgatcgccgtctgctccagcagctgcagcgagagctaccgaagggacctcgccggacgaaggcagcgacgggaggtcaggcaggctgcgcgcgcagccgcaggcgaccaagcaaagcaactaatcgatgggttaaggataagtaattattag

SEQ ID NO: 48371 - DNA, 329 bp, Oryza sativa
  Clone ID: PAT_MRT4530_51052C.1
accaacgggaaaatagtggcttcttgatatctttgcagaaacagcacccgagcagtgcatatcatctattggtcaaccgccactaagtgcaacgagagggaaaacgctacctaaacctcatgtacactgtactcatccggggctaaagcacaaaatgaaaatgccaaatttaacggaccttattttgctaacgaaaaaaatatcttcctaagagacccaaggacactaaggtatttgccttattttttgctacccaaaaccagggcatggaaaattatcacacaaactaccagaggtttgctgtttcacaagacaagacctaaaagtgg

SEQ ID NO: 48372 - DNA, 414 bp, Oryza sativa
  Clone ID: PAT_MRT4530_51053C.1
ccgggcggagagctaactcatgatgagactacaatgatagggggtgccttggacttgactgactagactgctacggaggctatgacacctatggagcgaactttctcattagatgacgactacaagttggatggtcaagcaatcggcaaagtgcttgctcgggggcatagcctggagcgctgatactctggaaacactaagaacattatttgcctcatggtgctaaaaggctttcgacagatcgtgatgagacagagacaccaattagagctgtttacattacaaggattgcaagggttcctggacatatgcctttatatgacatactgaatgtgtttcagaaaggaagtagctatatggctgctgatgtgaggctaagcccaaaaatgtaccacttcctgacaaaactgaacc

SEQ ID NO: 48373 - DNA, 2184 bp, Oryza sativa
  Clone ID: PAT_MRT4530_51054C.1
atggaggtgggacccaccactccggctccctcccggagttctccgctcccgccgccgcggctgttgagcacgccgagggcgaagatctccggcaccgcgtcgtcgttgaggattgacttggtccaagtgtgtgacgataccattgttgcagatgagtctattgcctcaccagagaaacgaaagggctcatgttatcaacaagatgacagtcctcgcagtggcaaaaagatgagatattcaggtccataccttcctgaggaaatgtggcagcatatacattcccttatgccaatgaaagacgctgcccgtgctgcctgcttgtcttctgcctttctatactcatggagaaaccgtcccaaactctcctttagtactgaaacgatgggtatcgttgaaggtacaacggatttcatcagaaaaattgatcgcgttatggaaaaacactcaggcattggtgtgaaggctcttacgattgagttcaatggtctcttcagtaccaaagcacgcagttacctcgaaagatggcttcaaattgctgttacaccaaggatcgaagagctcagcctctcgatgtccaagggaaaagcatattatgactttccttgctcacttctatctgatgggagtggaagctcgattcggcttcttgatctttactgctgtacctttcaccccactgcggagattggttgctttcaaagcttgacgaggctgcatctggagtatgtgagaatcacgggggatgaattggggtgcgttttttccgcttcgtttgctttggagtggttgaaactccggctttgccgtcatataaaatacatgaagttgccttgtgtgctacagcggctgacctatgtggaagtgcgtggatgctccaggctgcgagtaatagagaacaaagctccaaaccttcacagtttgcacattttttatcaagcttatcaccctatacaactctcctttggagagtcatctctggtgaagaacctaagcgtccggtattcctctgttctcaatcatgcttgcgcggagctaccatatatttttccaaacctcgaaactcttaccatacgctcgttgggtgagatggtcagtacaccaatggtgcctaacactttcctccttctcaagtacttgtgcattactctttctgcagtaactctctctccatcatatgattatttgtctctggtttcctttctcgatgcctgcccttccttggacactttcatcgtggatgtatctgcaaaacacccgaagaacgattcaattttcgagaacccctcacatctaaggcagttgccagagcaacgccatgacaacctccggaatgtgaagatcactggattccgctccgcaaagagcttgttcgagctaacatatcatattctcgagaatacatcagttgaatgtcttacattggacaccagttttgagtctttcagatgttctcccggcaaacttggtagatgctcgcgaacgccaaaggatgatcccatggaagcctctaaagcactcttcgctatcagaacatacatcgagggaaaagttccctccacgcggcgctgggaggcggaaggcggcgcggggaggcgggaggcgggaggcggacgaggtgggaggcggcggtcgacaacctcgacagcgccgcggtcgacgacctcgacgacgaccccgacgacgacctcgacgacggcgcccccgacgacgacgacggtggcctcggcagtggggcggaggtgcggtgctggcggaggttgggcactggcgcggcggaggccggaggggcggcgtggggaggcggcaaggaagcggtgggaggcggcggggaaaggcaggagacggggggaggcgcggggaggcgggaggcggacgaggtgggaggcgccgctcgacgacctcgacgacgaccccgacgacgacctcgacgacgacgatggcggccccgacgacctcgatgacgacgaccccgacaacggcgacctcaacgacgacgacgatggcgcccccgacgacgacgacgatggcctcggcactggccactgggggcagagggttgtgttggcgggagggtggggaaaacgcgtggggcccatgattggagaggcgcttttggctggccaaagttggccagcgcggggagaagtttggctagccagatggcttggccagtcacttagctag

SEQ ID NO: 48374 - DNA, 461 bp, Oryza sativa
  Clone ID: PAT_MRT4530_51055C.1
cccacgcgtccgcggacgcgtgggcggacgcgtgggcgcggccgcgccgttcgacgtctccgggttcgacctcgggatcgcctgcggcggcgttggcggcggcggcgacgtggtgtcgtttcttggcggcgggaacgcgtcgaacaccgcgctgctccccgtcgggaacgcggggttcctcggcacgttcggcgggttcggcaccgcggcgtcccaaatgccggagttcggcgggctcgccgggttcgacatgttcgacgcgggcgccgtgaacaccgggggcagctcctcctcctcgtcggcggcggcggcggcggcgtccgcctcggcgcacgtgagcaacaccgcgccgttctccgggcgcggcaaggcggcggtgctgcggccgctggatatcgtcccgcccgtgggcgcgcagccgacgctgttccagaagcgcgcgctccgtcgcaacgccggcg

SEQ ID NO: 48375 - DNA, 393 bp, Oryza sativa
  Clone ID: PAT_MRT4530_51056C.1
cacatccatttcatgccctatgattagagcactttggccgctattccaataatttttattaaccatggcttcaccgaacagacatgataaatgctactgaaaacacatgtttccatacacaaaaaacgatcagagccagacaaaaccgaatgtagtggctgtgcgagaaattaaagaggggatgaacattccgggtgcacaccaaacagggcgggcgacatcatagaatgagcgctgacacaggtaagcctggctgtatatgacgcgcaccatttagacgccatcatagtccgtctactccttgaccttggacgcgaccaatctgacgagctgctcctgcctgacgttgacgaagcagaatttccggacgaatggctcatggaaccccttctt

SEQ ID NO: 48376 - DNA, 192 bp, Oryza sativa
  Clone ID: PAT_MRT4530_51057C.1
atggcgtggacgtcggtgttgcggagggacaaggcggtggccatggacgtgggcacatgcaatgacctcggcaacgagttttcctcctcccgctgccacgtagcactatcgtccctcgccgccggtgcgcctcctgctttgggcgacgtctccccgttctcctctcctcagttgctgccgcaagtggagtga

SEQ ID NO: 48377 - DNA, 402 bp, Oryza sativa
  Clone ID: PAT_MRT4530_51058C.1
actagtggatccccgggctgcaggctcctccgtcgccgccaccgcagctagctgtgaagcccccatctccagtgaggtccatcttgggtggccgcgagcggagcttgtgggattgagggcctcggatccaggcaagaggactgacggcgacgaccatctcgcagctcctccacgcccgtggcagctttcgatgccctcctgccggtggcacctggtgacacactggacatggctctccgctccaggcctgaggatccacgaggatgaaaacactttccctaagagaagatcaaagtcggcaatagccaataggggaagctactgccgactatccttgagctgcctccgcagtgtcagggagtccctcaccacctagcccagttagcttgggttgctatcttc

SEQ ID NO: 48378 - DNA, 1493 bp, Oryza sativa
  Clone ID: PAT_MRT4530_51059C.1
gttttgcgcccactcgtccaccgccgctctcctccacgcgtccgcccttccctttccctcccggcgtgtggtggtcggaggttgccattcattggccgcccccaccaccgcacccgccggtgaggagggacaccgccatcacattcttgctatatccaacgacctccattgattaactacgtgcgtgtgagaaactaatcaaccggccggcgtgctggctttcctcatcttcaagatgcaccggtggttcattgccagctgcggagacatacgtgcggcggcggcgcgctcatcccgccgccgaggaggcgatgcgattgcgcccaagtcggcgccgccgtcgccgtcgccgccgccgaggctgaggaagacggtgtcggagacggcggcggtgatgctggccgtgcccaaggacgtggaggagttccggaccatgccggcgtacgggaccaacctcgagctgttcacctacgaccagctcagggccgccaccgccgacttcagccccgaacagatcgtcggcgagggcggcttcggcgtcgtctacaagggcctcatccatggcgccgtcgtcgccgtcaagcagctcaaccccttaggccaccagggcgacagggaatggctgacggaagtgagctacctggggcagtacaaccatccgaatctggtggagctcatcggctactgctgcgaggacgatcaccggctgctggtctacgagtacatggccaatggcagcctcgagaaccacctcttccgacgttcatgcaacctctcatggacgacccggatgaagatcgccttggacgtggcgaggggcctcgccttcctccacggcggcgaccggccgatcatctaccgcgacttcaagacctccaacattttgcttgacacagatatgaaggcgaagctgtcggatttcgggctggcgaaggaggggccgcggggagggaagacgcacgtgtcgacgagggtgatggggacgtacggctacgcggcgccggagtacgtcgccacgggccacctcaccgcgatgagcgacgtctacggcttcggcgtcgtcctgctcgagatgctcgtcggccgccgcgcgctcgagccgccggccgccggctgcagcaagtgcaacctcgtcgactgggcccgccccatcctcatccggcccaagaagctggagaggatcgtcgaccgccggatggcgctgccggcgccggcggcggactacggcggcggcgtcgacgccgccgtcgagcgggtggcgcgcctcgcctacgactgcctcagccagaaccccaaggtcaggcccaccatgggcagggtcgtgcacgtcctcgaggccgtcctcgccgaccaccaccaccacgccggtgctgctgccgccgctgcacggccggcagccgccgccgccgccgccaccgccaccgccggccggttatatgtatagatgtacatgtttgggaattaattaatttcatcattgattacgtaatatt

SEQ ID NO: 48379 - DNA, 436 bp, Oryza sativa
  Clone ID: PAT_MRT4530_5105C.1
ccaccgaagtaaatagcaatatctcacaagatgcacgtaaaccacacgagtttggcagcagctgcaaggtcgcaggttgggcaagcgcgagctgatgtacaacatagtggatcaagagggaacacacgaacggagagagctagcgggtgtgccgggagcaaagttcatgaggctcgcttactagaaccggctgcgactaggtgctgcatgaggctggccacgcatatatagggtgaaaccactgagctcgcagagattcagatggacaggctattaccattagcaaactgtcaaagttggctcatcgaatgattgcatgtggaccgaccagggaaacgcagctgtctagctaccagctaaaaagagggattagaacgaggtggatccatctgattgaaccagggcttttcatcatgtaccacaataggacatgggc

SEQ ID NO: 48380 - DNA, 135 bp, Oryza sativa
  Clone ID: PAT_MRT4530_51060C.1
atgttgagacaggcccaacaagccctacttcataagatcaaaggcaaggatagagcttgtgcaacttgtggtgataaaattgattcaggaaatgtaatacgttgtcagtgcaagaaatctccagagcatgcgtag

SEQ ID NO: 48381 - DNA, 198 bp, Oryza sativa
  Clone ID: PAT_MRT4530_51061C.1
atgggcgggggtgtcctgaggacttggcctaccccgaggatacagggtaacccgagcacaacggccatctggagatatgttttcgaccactcggggaaccaaactctacttagaagccccgagggcaccccgggctctccttggaggggtggctatcacatctggtcagctgacttgaagggacaacgacaagactaa

SEQ ID NO: 48382 - DNA, 288 bp, Oryza sativa
  Clone ID: PAT_MRT4530_51062C.1
atggcggtgtgggcagagatcacgctaaagccttgggggcaacatggggagcttgggactggaaagactcatgtggaggtcgatgttaggcgacgtgagcaaaggggagctcgtgtatgtccaggcaacccagattacttagcagataagcctcctctttctcctgatcccggttcgaatcacccactctaccacgtggccccgctctcctccctccaggacccccgtgtgccgctgcccttcatcagtggtcatgccctctcccttccttacttcggctcctattag

SEQ ID NO: 48383 - DNA, 1569 bp, Oryza sativa
  Clone ID: PAT_MRT4530_51063C.1
gaaaaaggggctgctgaacaagtggtcactaataccagcaaccagttgtgcagcaatgaaccaagacttgcagtaccatctaaatgttctgttgatggagacggagagagctccctcaggaaaatttcaaaggtcaaaatctgttccagtctcatcagcagcctttgacagcctgaggttagatgatggatgctcaaatcctgaacatgaagaacccacatcatcaaaagaggagatcaaacccaagaatggcaagtcatctctcaagggaaagatttcaagtttcttcctgaaacgcaagaaatcaggaaaagataagcttgccccatcccccttgggggccttggggcgtggggttccgttggccagtaatgcatcaatagttagctcagatgtatcacagactgaatggactagcttacaagatgatgttgcttcagaaaatttagagaagtttgatattgcaccaacagtagttccggtcaatgaacctgaagcaacttcttcatctaagcctcccataattactcttgagaaagcactctcgtttgagatccgaaattcccactttgatcagcccagccctacatcagttcttgatgcatcatttgaggatgctagtgagaagtcacccaattcatccgagcacgcaattatcgctaaacaagaacctctatcaagatctcttcctattggatcaatcgcgcggactttatcatgggatgattcttcacaagaggctacattgtgttcagccaaaggagatagccacgaacaagatcaacacgaatttgtcgaaaagattctatcttctgttgggttcgacaacgaaaagaccagcgatattttcgtgcggtggcattcgcatgatttccctctaggcaccggcgtgcttgaccagttcttggaacgcaaggtggaggatgccaagtgcagggagaggcggtcaaaccagaggctcctcatcgattccgtcaatgctgccctactagacatcggccaaagcaagctttggggagcttacccttgcactgacccacaagttaacaatgcacggagagttgccacaggcgaggtgctggttgttgatgaggtatggaggttagtgaaaggctggctctcggacgatgatggcgagaaacatatggtcaatgcggaggacaatgcggggttagtggctgattgggttgtcggcaaggagattcaaggcaggtcatggcccgaagcactgcggttggaggtggatgaaatcagcacggagatatgtggggaggtcctggacgagttggttggggaggcattttcagaactagttgggtgtcattgaagctgaattttattttccctgcctgtggtgtccacctattgcttttatttccaatctggtggagaccaaggctcatgtgcactcccctgaggctcttactcttgtgtatattgccctcattactgctctgtatgctcaagatgttcccactccctctctgttaaatgtcactgccattcatacattctacagcaataacgtttatgaatcgatacagctgcattccaaaaaaaaaaaaaaaa

SEQ ID NO: 48384 - DNA, 413 bp, Oryza sativa
  Clone ID: PAT_MRT4530_51064C.1
gttgacggtcattatcgatcagtttcgaccgtcaatattactaaaatagaggagaactagtgatgcttgcaatgcatatacctgttagaataataatattccactagtattaggtataataaccgtttgcagagaatgataataaagtggaggagaatcgacatcaactcagacgataaaccaatcgaacggtgtcaagaaccagacttatgtatgaatgggccaagaactcagaaataacatgacacattgggccaaaattcacaagtctacggaggaggacaacaaaagaggccgctagctgaagatgggttgggttaggccagcccatgggtttggccgaacctctcgtggcgccgataatgcagggtttggatggacggccggggttgatccccaatgacggttggagg

SEQ ID NO: 48385 - DNA, 313 bp, Oryza sativa
  Clone ID: PAT_MRT4530_51065C.1
acgacacatactcgtggtcgtacaccactcggggcgagcacatacacgtgctactacacacaaaggagacagatggaggaggcttcggcggaaacccaagacggccaccgacgacgcgccagaggctaccaccggcgggggatcaagaagccccaccgattaacactgggtggacataacttcgttggaccgatgaactatatcgcgatccaccgtggtgccaaagttgcgaaagattttatatgacaaaagaacctatctagctgacgaatatgtatgacaaaggaagctagctagcttacgagcctgaggc

SEQ ID NO: 48386 - DNA, 280 bp, Oryza sativa
  unsure (1)..(280): unsure at all n locations
  Clone ID: PAT_MRT4530_51066C.1
atcgaagaggcatatggttcttaagagactgagaggaaaggagaagagaggcagaaattnctgcagtcgagcgaggncaagaaagccacccgantcccnttcctcccatagatccagctcnngcattctnattgatgatggagttaggagattncntnaaccnatggagacattnccaacccgtggaaggagcaacacgatgaaggtnaaggcgagtnggggnancacggattaggcganncagctnttaggcgaagggcttntccttttaactcaccgg

SEQ ID NO: 48387 - DNA, 332 bp, Oryza sativa
  Clone ID: PAT_MRT4530_51067C.1
aataaaaaagggggttttttttaaatttatttgacatcaagtttcaactggcacatttgaggatttttgggcttttttttaacttccgaaccccttttctgttaaaacttattacaagacacccccaagggggggaatgggcctgggggccccatagtccctgggggggataccatttttagaggggccgttaaaagccaacaaagcttgggtttgagccaaattccgatcaaaggggagatcaccaaactggtggggttttaccttctgccctttggcctgaaaaatgttaatgtgccttattgggagaaggggggcccaccaaaaggagg

SEQ ID NO: 48388 - DNA, 1011 bp, Oryza sativa
  Clone ID: PAT_MRT4530_51068C.1
atggcggcggaggcggaggcggcggcgctgccgcagctgcagctgcagcttctctcgctcgtctccgagcaccggctcctccgcggttttgggtcgaatttgctgatgcgtggtgggggttttggtgtggaatttgagcagagatggaaggaggcggaggaggggcaccgtcgggagacgcgggagctgcgtgcggaggtggcggcgagggacgacgcgctccgtcggctcgagtccaggataaaatgccttgaaaatgaaaatgagcagctggagaaaaacgaaaaggagttaaaagataacatggagggactgcttcaatcaaaggaggctttcataaaacattacgaggcagaaaagctgaatgctcatctggctttatttagttcagtaggaaaggaagtcgctgcggtgaaacaagtactcggtaatgtgaaatgtctagttggcgacaaggaaaatgtagtttctgacttgaagggtaaagtagagaagatttctgtgcttgagaaagattttgttgaaaaacttaggtttttcgaagaaaaaattaatgattaccagcttgaactccggaatagggcgaggttgatatatgaattgagggaacgccttgaggctgagaaactcaacaccaaatttcagcccaaactagaagaaatatccatttctactgagttaaaagcaatgcttatggagcttcacaacatggagattgctttacataaatttcaagacatatttgacagtattgggcatgaggtaataaaaagaagctcacctgtttctaatagtcaggatgtaacagaagatgtgaatagagaaaaactagaaagcattccaggtagtcagtgtgaaccagctaatgagcataccgtgatacctgtttttgatgaagcaggatcttgcatcaagattcatgttgctgtatatccaacttacactttcgctacttcttgttgggatcaaatccctcttgcacggaaaatggagcgatccattagagcatga

SEQ ID NO: 48389 - DNA, 1152 bp, Oryza sativa
  Clone ID: PAT_MRT4530_51069C.1
atggcggcggaggcggaggcggcggcgctgccgcagctgcagctgcagcttctctcgctcgtctccgagcaccggctcctccgcggttttgggtcgaatttgctgatgcgtggtgggggttttggtgtggaatttgagcagagatggaaggaggcggaggaggggcaccgtcgggagacgcgggagctgcgtgcggaggtggcggcgagggacgacgcgctccgtcggctcgagtccaggataaaatgccttgaaaatgaaaatgagcagctggagaaaaacgaaaaggagttaaaagataacatggagggactgcttcaatcaaaggaggctttcataaaacattacgaggcagaaaagctgaatgctcatctggctttatttagttcagtaggaaaggaagtcgctgcggtgaaacaagtactcggtaatgtgaaatgtctagttggcgacaaggaaaatgtagtttctgacttgaagggtaaagtagagaagatttctgtgcttgagaaagattttgttgaaaaacttaggtttttcgaagaaaaaattaatgattaccagcttgaactccggaatagggcgaggttgatatatgaattgagggaacgccttgaggctgagaaactcaacaccaaatttcagcccaaactagaagaaatatccatttctactgagttaaaagcaatgcttatggagcttcacaacatggagattgctttacataaatttcaagacatatttgacagtattgggcatgaggtaataaaaagaagctcacctgtttctaatagtcaggatgtaacagaagatgtgaatagagaaaaactagaaagcattccaggtagtcagtgtgaaccagctaatgagcataccgtgatacctgtttttgatgaagcagcaactactccgaacatagaaggtcagtcggaaattgacccaggcagaaaacaacattctgctttgccgtctccagagccagcaaatgcaaatgccgaaacagctgactgcctacatggatccgaagatattgacatggatcttgcatcaagattcatgttgctgtatatccaacttacactttcgctacttcttgttgggatcaaatccctcttgcacggaaaatggagcgatccattagagcatgattaa

SEQ ID NO: 48390 - DNA, 412 bp, Oryza sativa
  unsure (1)..(412): unsure at all n locations
  Clone ID: PAT_MRT4530_5106C.1
ctgtcggacatcagatcgccgtggctcatgtcgcgcgacaatgcgctcgccagggacagccggtgagcttcgtcgcgcagggtgaacaggaggtctccctgagctccagaatgtggagtccggagaggtggacctggagctggaggtggattgctctcaaccagtagagacttctggctacatcagtgtgatcttcccccttttgtntaaaattatttttcgtacaaaattaaccctcttagcgtctcaaccaactatgaatgccaactaaaatttgncttttatcccgatgtatgttactggattttggtttaccctttgtttactgaaattttttaccctggtgatgttcttcctggactgtggtgtccaaatgccaaaccatctgaactttctcaaaaaaaaaaaaaaa

SEQ ID NO: 48391 - DNA, 1425 bp, Oryza sativa
  Clone ID: PAT_MRT4530_51070C.1
atgccggagcgcttcgatcctgccggccgccggcgcaggggcattctcccgccgcccgtcggcgcaggggcatcgacgggcctccgacgccggcctcctgacgtccatatcgccggcacaggcgcatcggcggaacggtcggagcccgcgctgtcgcctcctgaccgacagatcgagttttgtggtggtcttaacactccagaaaattgtgctataattcaaggtagagctaacagaaattgtgctataattcaaagtagagctaacagaagggatgatattctagacgagatggaagttgctgctttagcttctagaatcaattggacagagtatcagttagcttcaattgaagctgctgcgattggtaacataattagggatggaaaggtcattgaaattgctccaaactcgaaaggaggacctctacaggatgtgctgagaagtttgcttgaaaaaaatgaattgatgataaataaactgtgtgatgaggatgctccactggaaagtaccgcttcaaggccgctctcaggcttctttttcaacacattatgtaaggagcctgggtatctcgcatttgacaccatacgctgcggcaagcttctttaccctgagtcacgctttgctgcattaccagagcccgtatctttccttgcatccacgcgtggccttgtctgcgtctgtggaaagacaacaggcttgtactatgtaaccaacacgaccaccttcaagtgggttcagctaccacgccacagttgtgatcatggagaaccagcagttgtcatcacattcgaggaacccctgacatcctgcttcgacggtgctgttgagcattatcatgtcgtcgctgccttccacctcaagggcagcgtctggacatctgagtcatactcctccaggactgggaggtggactattgctaaagatgcccctcctgctgtggaggtgaaggcggagtctggtgttggtacactgggctgcgccttctggcgcacttcccttgggtctatcctctgctatgacccggggaaggacctccttaaagtcatccctgcccctcgagtggtaaaccaagataccgtatgggagcttgggcaaatggagggagatcttactgtgacctgcttcaaggatgttgacggtttcctcacattgggcgtgcttaaaataaacaagcgactgtttgatgataaggttgctgcactctggacagttgtcggctcattctccggggagaaggttggcaaaagggctatgttgctccgctcacaaggcgccgcagaggtcgttgtctgggaacccttggaggagcgcgtcgtcgccatggaccttgaaggcctcgttactggcaactttgggcccctaaccaatgaagggtgtactccatgttttgttccttacgttccatcgtctgtgagtatttga

SEQ ID NO: 48392 - DNA, 240 bp, Oryza sativa
  Clone ID: PAT_MRT4530_51071C.1
accataaaacttcaccacacagtctctacttcttagcccacataaataacaacacctaaatacacaccacctcccaaggcaccaacaaggatgacaaatactaaaccttctctaacggatgaatcttaaaacattcccaaggagccataaactcacacttacgtaccttccacacatgaagtaaactcacacaaatcaaaccaagcctttctttctttaactaccactttctgggcctaa

SEQ ID NO: 48393 - DNA, 3686 bp, Oryza sativa
  Clone ID: PAT_MRT4530_51072C.1
aaggtcaatgctaagttttttagatgagaaatatttccacaaaaaagagggaaactaaatacagaagctcataactgggtcgacttcgcgtccggccgggtaaactccaaatgggccggctggccggtgtccccttccttcccatcggagccgccgccgcgctgccgtctcctccgctcgccgcagattcgagcgaaggcctccaccggcggcgggagcaagccgcatctgagggtgcacctgcatcaacattgtccaggcaggagaccacttcttggatggttggcctcttgcaaggattatggctgatacacttgcaagccacatcaagcaccttcagcatttgctcttcatggcctcttcctctcagtgctggatccaacacctcagtatcctttccatgagatctcatctcccgggtccattggacaagttccttcgacttggacaagacctggactggcctcttccctgtgagcagctcaagcagcaccactccaaaactgtatatatcgcctcttagtgtagccacccatgcctggctgtactcaggtggaatatatcccagagtgccaattaattcagttgtaacatgtgtgtcatagggaaggatcaatctggcaaggccaaaatccgcaacacaagctctgaattctctgtcgagaaggatattgctggatttgatgtcacggtgaacaatgtgaggcttgcagatattatggatatatgaaaggccccggcttgctccttgtgcaatcttgagccttgttggccagtcgagaagtggcctgccattgtctctgttgtgaagccagtcatctagactgccgttctccatgtaagaatatatgaggagccttgagtttccttggatgcagtaaccccatagtggcacaagattgtcatgttgtgccatagagagtgcttctacctctgcggtaaattctctctccatcagacacatttcaccgttgagcttcttgattgcaagcttggatccattgggtagctcagccttgtagactagaccattacctccacatccgataatgttctgctggtcaaagttattagtggccttcaagatatccttgaatttgagattatttgatcctcccttgccttgaggtaccatcaccaaaatggttccttttatcatgtcgtgcaagtgctctgaaacagaactcaatgaagctgcttctatgtccccattgttgctgctcttgttttggtggacagagcttgttcttctgatggatataagaaaacgtcccagcaagaaaaggatggcaatccctccaaagaacacacctaatgcaagtgcaataatggccttcttgttgcgctgtttcatggaggatgcatgtgttggtactgaatcacacaggttgctgagcatagggccacatagctttggattcccactatagctagaattgagaaatgtatcaaactgtcttccagttggaactggcccttctagttcattgttagaaacattgaatttagaaaggaagtgcagattagtcagtgcggccggtagttcacctgtgagctgattgcttgataaatctagcaattgcaggtttgtgaggttgcatatctgctgtggtatttctccagataacctgttaaagctgacattgaagccatcaagcattttcaactgaccaatctcagggggaatcactcctgtgaaactattgttacctagattcaatgcgttaggaaaagcattgagcaagcggtattgacgtgatggtgtccaataaacaggcaattcaagaaaatttgggtccaactgggcagcattcttccctgattgtagcatcggcaagttcatcaacgcaactgggatatcccctgtaagactgttgtttgttatgtctaaatagaaaagaacaggcatatctctaatccaaaatggtatttctccgatgagcatattgtttgataaatccaacacttccagttttttgagctttgatatccaaggagggatttgccccattgctccacaagagtctatggtcagtacccgaagattctcaaaaccatcaactgtttcatcttgtggtatggtttcacccttgaaattggttccaataagcagtgacgtaaggttcttgcagctcctgagtatctgaagtgcatttgtgatatttgtgaaatggttatcacttattgaaaagaaggacagggacttgagagtacccattcttggtgacaactggccatgaaacttgttgaaagccagccgcaacgcaattagattgctgcatgagaatatgctttctggaactgtaccagtgaagttattaattgagaaatctgcgattctcaaattcaaccaggtaaaattgactttgctaagatctcccacaaatttattgtttctgaggctgagatatctcagatttgtgcagttacctagggctgatggcagctcaccagacatgttgttgttgtccaaccggagctcctccaatgtgcttagttggccaatagaatctgggatgttgccactgagcccagtcgatccgagatcaaggactgtcagcttgacgagttttactatgtgggaaccatcaagaactccttgtaaatcattattaggaagagataggtgctccaatgaggtagcactgaagagttcttcagggagagctccactaaagttgttgtatccagccttgaactctctcatcttggagcaatttccgagccctgaggaaatactgccactgaattggttgtaacaaaggtcaaggatagcaaatgatggggagttgatgcatatagaaggtggtatctgtcctgtaaagctgttgttgcttacattaagagcgacaatattcttcatcacttcccattgtttcgatgagaactgccctgtaaatgaattgctcgagatattcagtacctggagaggagaaccaccactaggggactccaactctggcagagaaccatccaggcggttgaagctgacgtcaagaacgatgatacttctggagaacaacaattccattggtaggtagccattgagtaagttgtgagacaggttgaggtgcaacagcccagtaagattgccgagagatggcgagatgcgcccttggaggcccttggaagccaacgagacatctgtgaccgtgccatcgctgctgcagttgatgccttcccatttgcagcagtctatgcccttcacccatgacgtgctgaggctgccgttgtggcctggcaagagaccctctagaaagccgatgagggagctctcctcttgctctgtgcaggagctggtcggagaggcaaacgagagcaggaggataacaagaagccgaaagaaagccacagataacttggtggtggtggtggtggtggtgctgctgctgctgctgcatggcaaattgggcagctgcatggttctctcatgaaactcgcctgctgcaagaatgttttatttggattctgattggctaaagaaccaaatggttttttcaacaatagcctgctatggtgggaaggaagaagctgctttctgtttctgtattgttggtctttcctccttgtgctcctttgaagaagatgaccaaaggtttgatgctatagacacatccagatcgggttttttacacgtttgccactaccgtactgtcaataagagggaaaaaaacaaatatttttgt

SEQ ID NO: 48394 - DNA, 849 bp, Oryza sativa
  Clone ID: PAT_MRT4530_51073C.1
accgacgacgttatcccggacttggccgatcgggagtcccttgacgccctctgaaaaaccccacgtcgctgacgctgccgatgtcgtcgtgccgaagtcgccatcgccatcgcgtcggaatccgccgccgtcgtcgtcgcttgagcagggcggagaggcggcgggatccgcacgaggaggagaggctaccggatccgtccctcccgtcatcgccgccgacggatccgcgcgcatcggtggcggagagacggcgggatctgcgcgggagggggaaaggccgccggatccgcgcgtatggtgggcagcctgcttggagatggcgacggccttatggcgcagaagcccgacgaggttgaggcagagcagcgtggtggaggacgggatgcgctgtggcgtcgcgccgtggttgcggtggtgcagcgtggaggacgggagcacgcggcgtgatacggaggctgcggctgtggcggcggggaggcgaggagcgtgcttggcattcagtccgagcgtgtaaggaacctcttgtttaagggtgctgccgctgccatcggttagatgcgttcctcctccaagcgctgcctccctcctccaccgagcgccagattctccgccgctgccgccgggcgcgcgactcctcccttccccaccagtccgcgcgacgctctcgcttcctcccaggcgcgggcccgccgtcgaccgctctcgcttccttccccagtcacgcacgcgcgaggcgcgggcccgccaccggccactctcgcatccccgcgccgcttctcctccaaccccctccccccggcgcttctcctccccccggcacttcaaaaccgctgccaccgcaggcttcat

SEQ ID NO: 48395 - DNA, 1341 bp, Oryza sativa
  Clone ID: PAT_MRT4530_51074C.1
atggctttcagtttagattggaatatgcatttgaagtttacttttagcaagatgaaaaattcaactcgatctagttttggtcctagtcaaaggaaaaattgtagatcaaagaggagcaaagggtttaagtctaaagtaatgaatgggattgcgaatgatgtgaggaaatcccaattttattaccggcaacccaacaaaagaggaaatgtcaatggtgatagaagaaatgatgataggaataaggctcaaacacatggagtgacttctactgtggcttcaaaggaaatacccaagaaatcaaataggaaggaaagtctctcttctagcaaaccgtacaatgcaacgacaaacacttctagcaaattaagtaaggtattgacatcgcccccttctagattgcccatgctttctccatcaaaaggtgtacgaagtgtaccttcaacaaggagagaagagagaagaaaggaagaagcaacacaaggttgtcgtgatcattcatggaagaatgctcgccaagtgagaactgaacaatcaacaacgagagaagatagaggaaaggaaaaaaatagacatgatcgtcatgaccattcgaggaagaatgcccaccaaattagtagggaaccttcaactcggagagaagagagtggaaataaaaaagtgacgcatgaccatcagatccatctgggggagaatgagaatgcccatcaaatgagaagtgaaccttcaactaggagagaagagagaggaaacaaggaagtggcgaaagaacatcccaaccttttgcagaagaatgctcgcccaatgtgtagtgaggacttgttgagagatggaaaggatggtggactacgcataagcgatgagtgcagtgaacattctactgttgatcatgtgaacgaattcaaactcgtcaaaaggaaattggagggatgtatccaaggaagaattccaaatgtgttgggtagggaggaagatgatattggcaatgtggagtccactaaaggaagaaacggacaaatgggaaaaaagcacaagaaaaatcttgatgtcagtgaagagtcaagacatttggcttcaaatggttctatacttcagacgcaatgtagaggatctgaagcttatgaagacggtcaagattctagattagtgaaagatggtatttctggagtctcaataccaactattttaggagctatcaagggccattgctccttacccgtcgatgaacctatctggaggtacaatatattctttcgcttaaaatttgtgtgcggtccttttttgtggatcgcttttagaaccttactctttgtggacctcttaccatatgaaggaaaaatctag

SEQ ID NO: 48396 - DNA, 180 bp, Oryza sativa
  unsure (1)..(180): unsure at all n locations
  Clone ID: PAT_MRT4530_51075C.1
ctgcatcnccccaagctttgaggggaccatggtttatgaaaccaccccgggccaaaaccactttggtaattcctttctcccatccagaattggccatcacttcaccaatcttttgtgcctcttccgctgttggccctgccgagtattccaagtcctttgaaaaaaacttgtgccttttgg

SEQ ID NO: 48397 - DNA, 514 bp, Oryza sativa
  Clone ID: PAT_MRT4530_51076C.1
ttcatccccctcccgactgatccgcgacctcggcgccgcgttcccgcgcatcaacctcgacagccctcgttcccccggcgccgcaaccgcatccgctggtggtgagggaggagcgccgtcccgtcgtctggtgcggggctgctgtggaggaggctagggaggagcgccgtcgcctcgctgtggcgggctgacggtggaggaggcgaggaaggtttcgggcgacacagatggagacagcacgggcgaggcgtcggcacgggcaccgtgccatatgccgagttcctccggctctgctgtgacgcctccggcgcggagtccggcgcctccgtcacgtgtgcgctcgacgagtccggatccgtcatcgtgctcggcaagaccgtcttcctcaggcccgagatggtctggaggattgttgcacaccacatgttattttgttgcagcagtgttcttgtgatgttgcaatctgtcttttctaaatgtttctttaaatcagtactggaaaaaaaaaaaaaaa

SEQ ID NO: 48398 - DNA, 496 bp, Oryza sativa
  unsure (1)..(496): unsure at all n locations
  Clone ID: PAT_MRT4530_51077C.1
gtacgttttagttctatttataaacttttttttttttttggcatggtgtggttatgttagaaatcaacgtaaccgcggctaccagttccgccgagctctattgaacgacacaataaagttagtgtgaaattaggaacgctgaccttttcctcaacatccattgacctcgcttactacttcgcatatattaatctgctttgttcaacgctgccttgcttaatttgtgccttttatgggtgtaggtagtgaaataatgagtactcctatgcaaagaatgaatagttaatgtgttgaaaccctttgtnaaaaaaaaaaaaaaaaaaaaaaaaaaaaaaaaaaaaaaaaaaaaaaaaaaaaaaaaaaaaaaaaagaaaaaaaaaaaaaaagaaaaaaaaaaaaaaaaaaaaaaaaaaaaaaaaaaaaaaaagggggggggccgttttaaaggacacaactttgctccccggggtttcggaggaaaaacttttttaatggg

SEQ ID NO: 48399 - DNA, 477 bp, Oryza sativa
  Clone ID: PAT_MRT4530_51078C.1
atggacacgtacgaggaggtgcggagcatcgggtcaggcaacttcggggtgacacggctgatgtgcaaccgcgacaccggggagctcgtcgccgtcaagaccatcccacgcggcaatcaccggattaacaagagcgcgtaccgggagatcatcaaccaccgttcgctgcggcacccaaacatcatccagttcatagaggcgatcctaactcatacacatcttgcaatcgtgatggagtatgcatctggtggagaactctttgatcggattgtcgatcttgagcgatttagtgaggatgaggccagatatttcttccagcaattgatttggggtgtaagctattgccatcacatgtcatcaatgttgcattcaaggcccaaatcagcagttgggactccggcatatattgcaccagagatactaaacctccaggagtatgatgggaagcaaaaacctggaactggaagtacaagttga

SEQ ID NO: 48400 - DNA, 2817 bp, Oryza sativa
  Clone ID: PAT_MRT4530_51079C.1
atgagccaattacagtattttcttattgatgccgaacaaaggaggtcagaagagtcagcggttaacatatggcttggtgagctgaaagacgctacatatgaagctgaagatattctggacttggcaagttttgaaggaaacaaattgctatcacagaatccattgccatcttcatcatcaagaaactccactggatgtactggtttttcttttttctgttgccttccaaatatccacaggcgtcatgagatcgctgtccgaatcagaaacttcaactttgaacttgaaaagattttcaagatgggtgaactctatttaaagcttcaaaatatgcagcccacggtacaagttccagcagcgaagccaataaaaacatgccaacttctggaacctaatcttgtgggcaaggaaattttgcatggttgcacaagattggtgaaacttgtgcttgcacataaggataaaagggcatacaggtttggtattgttgggacgggcgggattgggaagacaacaatggctcaaaaaatatataacgatcacagaataaaaggaatctttagcaaacgagcatggatttgtgtttctcaggattactctgatgttaatcttttgagagaagttcttcgaaattttgcggtatatcaagaacaaggagaaactgtcacggaactcaagagcaagctggcagcaactgttaaaggtgagagtttttttctagtgttggatgatgtttggaagcatgaggtgtggacctatcttcttggaactccattgcttgctgcttcaactggaattgtagtgataactactcgacatgacacagttgctcgggaaattggtgtggaacatatgcatcaagttgaatttatgtcagcagcagtaggatgggagctgctttggaagagcatgaatattgagagagagaaagaagtgcaacatttacgtgaaatagggatagagattgttcgtaaatgtggtggccttcctcttgcaatcaaggtcattgctagagttctaagcactaaagagaaatctgagaacgactggagaaaggttataaataaaagtgcttggtctaggggcatgcttcctactgatctcagaggagctctatatttgagttatgaagaactaccacgacatttgaagcgatgcttcctttattgtgccttacatccagaagattggttcatccttcgcgatgatcttatcgggtattggattgctgaaggttttgtggaagagcaagaagaacaacttctagaagaaacagctgaagaatattactacgagttaatatataggaatctccttcaaccagagcatacatattttaacaatattatgtgcagagtccatgatcttctaaggcagcttgcttggcatttatcaggagatgaaattttttatggagaaccagagtcattgggggctaaaactttgtcaaaactacgacgtgcttcaatttatactaagaaggattctgtggtgctccctgatatggacaacgaacacactagagtaaggactctgaatattcaatgtagccttcctatgacaattactcaattgtgcaatttaagacgtcttggtctttgccatacaccaataaatgaggttccaaaagggataaacagattgaaatttctcaatgatttaggagggtttcctattagtagtgggagcaataataatactgaaatacaagatggatggaacctggacgaattgggttctctttcacagatgaggcggctagatattatcaaattggaaagagcaacacctttatacagtacaacttccttgctaacatacaagaagcatcttaaagttttatatctttgctgtagtggatggactagtgaagcatattctgatgaagatgttagcaataatgagaggatctttgaacaactaacccctccaaacaacttagaagatctatctatttaccattttgtcttccctaaaacacctagaactcttagatgcaaatcctgcatgcatctgccaccaattgggcagctaccatgcttgaagtatatgaaaattttggggaccaacattacaaagataggacctgaatttgttggctttggggtgcataaactagaatccgtagaggtagctgctttcccgaagcttgaatgtttggtcttcagtgatatgcccaactgggaggagtggacctttaatgaaacagcttcagtgtctgtagaagcttctacacctctaacattgaagtttctaccttgtctggagaagttgtacatatatggctgccccaagctaagggctctcccactagaaattggacaagggaccactagactaagggagctccacataagaggagcaaactgcctgagggtggtggacgacatcccattcctttctgactgtctttcaatacgtcaatgtgaaggccttgagagggtctcgaaccttccacaactgaggaagttgtacctaggtgtttgcccaaatttgaggaatgttgaagacttgaatagtttggaattgctgctgcagactacggatatgcaggagatgtcttcacagtgggtgcctcagcttcgtgaccagcatcgccatcttcaccatgaagacctggatgtctacacgtggcgttgggatcgagagaagcccattttcatgacaaaattgtcacaagaaaaagaatatgaggtgaagagaacgaggcaaaccgtatattccgcgtctgagggctatgtacaagatctaaaagaggatgtatgcggagacaaaggtttagacatgtataggacctcccgacgagaggtgtattga

SEQ ID NO: 48401 - DNA, 198 bp, Oryza sativa
  Clone ID: PAT_MRT4530_5107C.1
atgacgaagcccccgtcatccaaggcggaggtggaaccgtccaatgtgataccaattacattggaggagctcgatagggaagcgcgcaagtccatggaggagtaccttaaggaggtcacacatgaggcattgatgagggcgtgcactagggactcggcaagggtgatcgtcaagcctggaccgcgcattaagccttaa

SEQ ID NO: 48402 - DNA, 175 bp, Oryza sativa
  Clone ID: PAT_MRT4530_51080C.1
cgacgccaaggcatggaccgtcgactacaaggccatcacggcgccgagtgagccacatacctcgtgcggcgcgtactggctgctcgtagcttgcggcggcgaggccaagtgccagtgccttaccaacagcaccgggaccttcccaccgggcagtggcgaggaaaccaccgttttt

SEQ ID NO: 48403 - DNA, 709 bp, Oryza sativa
  Clone ID: PAT_MRT4530_51081C.1
gcacgaggatttgaccaccacctcttcttccccttctcctcctcctaaatggcgacatcttctccaaatccctcacctttatttcctcctcgtctcctcctcctccgctctctcctcccgcgtctaaaccctaaccctaccgcagccgccctccatggccgccgactaccgcacacccgaccgcctcctctccgccgccgcccccggcgaggagcaggcgcaggatccgcccaagccggtgctcgccgtcgccgcgacccatgacggcctccggttctggcagtacatgctcgccggctccgtcgccggcgtcgtcgagcacaccgcgatgttccccgtcgacacgctcaagacgcacatgcaggccggggcgccgccctgccgcccggtcctgtcgctgggggcggtgctgcgcgccgccgtgtccggcgagggcggcgtcagggcgctgtaccgcggcctccccgcgatggcgctcggcgccggccccgcccacgccgtctacttctccgtctacgagttcgccaagtcgcggctctccgaacgcctgggccccaacaaccccgccgcgcacgccgcatcgggggtgctcgccaccatcgccagcgacgccgtgttcaccccgatggacaccgtcaagcagcggctgcagctcacgagcagcccgtacacgggcgtctcgcactgcgtccggaccgtgctccgtgac

SEQ ID NO: 48404 - DNA, 370 bp, Oryza sativa
  unsure (1)..(370): unsure at all n locations
  Clone ID: PAT_MRT4530_51082C.1
atttacanagccacanggggtggccnacggaaagacccncaaccaganggngtacaaaaancgtcctnnttgcccggntgacccagggttgtgtancaccggattnggggtggccagtgttgnggtttttggattaggcacagggtttatttnccagtggagggcccaaattgcanggancatgaatgttgccagtttgatnccatgggctttncgtaagtncaattancttgtttatagtgaacttctggaacacaaattggggttgttcctntgattcctgtgtgnttttgtntaaanttgatctgganttttnttttaaaaaaaaaaaaaaaaaaaaaaaaaaaaaaaaaaaaaaaaaaaaaaaaan

SEQ ID NO: 48405 - DNA, 1138 bp, Oryza sativa
  Clone ID: PAT_MRT4530_51083C.1
ggctgcaggaattcggcacgaggctgactccgattcggatcccccaccggcgagatggcacgcggatccgccgccgcggcgatcgccggagttgtgtgggtgcttctcctcctcgtgggggtggcgtcgggggcgcgtcttccgggcgggagcgggggtaaccgggggcgggagccgcgcgggggagcggcggcggcggcggtggccacggagacggcggtgttcgcgctgggaagcttctggaggtcggaggccgcgttcgggtgcctccccggcgtgatccgcacctccgtcggctacgccggcgggtccaaggcccgccctgagtaccgcaacctcggcgaccacgccgagtgcgtcaaggttgaatatgatccccggttgattcagtacaagaaacttctagaggtcttctgggcaagtcatgatccacgagaggtctttgggcaaggaccagatgttggcaaccaatacagatccatcatcttcacaaatggatccgtggaagctagattggctggtcttagcaaagaaaaagaacaagctaaggatcgccgcagtgtcattaccacacagatccaaccaataggtgcattttatccggctgaaccggaacatcagaaatttgagctgaagcgcaagccgtttctcctgcaactgattgggaacctgcccgaggaggagctcctgacctcaacactagctgcaaagttgaatgcatacgctgctgagctctgctccccaaatacccagaacagaataaactccaagattgatgagattgctaagaaaggatggcccatcctaagagacatttagctcggtgttcctgggttttacatattaatatatcattatccaattgtgcatgattttgccgcaaatcttgtccagatgactggttgtggtcattccttggtcgcagcaatcactaattagcgttcatgtcctcctctgctcattttgagatctctctaatagaatctgcatgtatatccaaactttcgagttgtgtgatgtgacctgaaatcctgaatttatgattggttcttacagaacaggtgccgaaattgtatattgttactctggctcttttatgtgtaaaaatatatgatgtggattcattacattcttaatc

SEQ ID NO: 48406 - DNA, 3255 bp, Oryza sativa
  Clone ID: PAT_MRT4530_51084C.1
gggcgacgcgttatcattgcccaggcctgctgccccttctcccctccttctccttggtgaatcgtcggcgatggatatcgctcttgcttctgcggcggcgacatggctgatcaacaagctcctggaccggctgagcgactatgccatcaagaagctgctgggctcggagggcctggacgcggaggccagctccctcagggatgcgctgcggcgagccacgctcgtcctcggcgccgtgcccgccggtgccgccgcaggggtcaggattgggaacgaccagctacttccgcagatcgacctggttcagcggctagccaccgatttggccaggcacctcgacgagctcgagtactacgacgtcaagaaaaaggtaaagaagaaccagaagagcagcaatccattatccaaaatgaatttaccccttactcaagctgggcaatcaaagccgaagtacaatagaacagacataaaacagattagagatactgtgggatatttgcatagcatttgtgatgatgttcacaaggctctcttgctagataaacttgatgcaattaaacaagctgctcaagatgcaagtacagacaaacgtgagactgtggataacttcactgaaaatcctagaaataaggtgttcccaagggaagaaatgaaagatattatagaactaattaatagtgctgcatcgagtgatcaagaacttttagttgttccaatagttggtgctggtggtgttgggaagacaacacttgctcgattggtgtaccatgacccagaagtaaaagataaatttgacatcatgctctggatctacgtatctgctaactttgatgaagttaagcttacacaagggattctggaacaaatacctgaatgtgagttcaaaagcgccaagaatctcactgtgcttcagcgtggtatcaacaaatatttgaccaaaagatttctgcttgttctggatgacatgtgggaagagagtgagggtcgttgggacaagttattggccccacttagatccgcacaggctaagggtaacgtactcttggtaactactcggaagttatcggtggctaggataactagcaacacagaagcacacattgacttggatggtatgaaaaaagatgacttctggttattcttcaaaagatgcatatttggtgatgaaaactatcaaggccaaaggaagctacagaatattgctaagaaaatagccaccagactgaatggcaatccattggcagcaaaaagtgttggtacacttttgagaagaaatattaatgaggattactggacaagaattctagatagcaatgaatggaagttacaagaaagtattgatgacattatacctgcactaaagctcagttacaatcagcttccctatcgtcttcagctactcttcagttactgtgctatgtttccaaagggttacaattttgacaaaggacagttgatatgtacatggattgctctgggatttgtcatgaatgagagaaagaaattggaggatgaaggaagtgactgttttgatgatttggtagaccgaagctttttccagaaatatggagtgtcacagtattatactgtgcatgatttaatgcatgatgttgcacaagaagtctccattaacaaatgccttattattgatgggtcagatcttcgaacagttccgtcgtccatttgtcaccttagcatctggactgagccggtgtacaatgagcaaagcatagaacggaatgataactttgaagagaagttagatgcagtccaggataatgtcttgggaagcttggagtgtttaattcttgcaggtgtatatgatgagaactactctgctaagtttgtgaagactcttgagcgagtacgttatgtccggatgctccagttaacagcaatgccattcaattctgacattctactatccagtataaagaagttaatccatcttcgctacttagaactgaggtgtacgtcggataagcccaaatctttgcctgaggctatatgtaagctctaccacctacaagtactagatgttcaacattggagtggtctaaatgatttgccaaaggatatgagtaatcttgtgaacctacgccatctgtttgttccggggtcaggatcattgcactccaagatatccagagttggggaacttaagtttctacaagaactgaaagaatttcaggttcaagaagccgatggctttgagatttcacaactcgggaacataaatgaaatcagaggatcacttagtatccttggccttgagactgtcaaaaagaagggagatgcaactcgtgcaaggcttaaagacaaaaaacacctgaggacactttcactaacatgggggagtgcaagcggaagtactactaccgtccagaaagaagtgatggagggtcttaaaccacatgaaaatctttcccatcttcttgtctacaattattctggtgctactccatcatggttattaggagatagtttctcacttggcaatttagaaagcctccatctccaggattgtgcagcagtgaagatccttccaccatttgaggagatgccattcctgaagaagctgtccttggtttgtatgccctgtctgaaaagtatcaggattgacttcaactctgccgatgaggaggatgaacttgagttaagcgaaattgaaatatccaaatgtttagctttaacatccataagactacattcctgcaaggcgttgactatgttaagcatcaatgattgtgaggcactaggttccttagagggcttgtcattttctgaaaaactgaagcagtgtgttgtccaaggatgcccaaaacttccgtcaggtttcatcgcaaactgatgatttggtggcaaactctatcaaactagctgccaaagaagaggaagtaacctatatgaggcccatctcgcttcagtggaaaaaggcttgatatagcttttgtcaagggtggctgttaggactctcactagatcgtgctgtatcgatgtggtttttgctgttgtattcactattattttcgtatactttattgtcattttattcacactaccatatatggaaatgttgtgcctgatgtgtaatatttcggtaggcacaccggctaaaacattaaatggtcttaaataccatgggaacacatctgcccttctatgttacccagataaatacattgttattttgtgattataattgtaaggccgcaaatgaagatttgtgcttaaaaaaaaaaaaaaaaaaaaaaa

SEQ ID NO: 48407 - DNA, 1472 bp, Oryza sativa
  Clone ID: PAT_MRT4530_51085C.1
atggcgcaggtctttcgggcgcggcggcgaggcggaggcggcagggaggagccgatcgccctggtgaaaaaggatctggcccatcgccttttccgtgtgcatatgggacacgagcagaaggtgttcgtgcaaatgcggcagacagcacaggcagacagttcttgttttggatgtgttgggatcagagtactggcgttttacaagtttgctgatgccgcacgattgcagtcaacaagatccggccaccagctggcgacgggctcggcttccgcgacggagacgacgacgaggactggcgatgaccaccagccggcgacgggctcggctttcgcgtctgccacctcgacgccaccacgccagctcaccatatctgcccgcctcgcagccggatctgcctcctccagctgccgccgacactggaaccgacgctggaaccacttcggtgacgacggcgggacgcggctggcggagggaggaggaaggcagctgctagagggggtgaggagggaggcgccgcggcggctggggagggcgagggggaaggccgcggcggcgggaaccgccggcgacacgcctcgcgctcgacacgaccggcgtcgcctttgtggaggagccaaggcggcgaaagaaagagctggggtaaggtgcatcatcagatatctcctcatccttgctgaattcctgactgcgcaagctgatttgaaggtctgtcaaaggaatcaatcagatatgattatagaggtgtgttgctgcctggggtttgctgcgaatgtagcgcagctggctggcctggacgtggccagtctggtaaaggaaatcaaggagcgtgtccagacagtgagccagaacaaggaggactgtgagctgctcgccgaacgtgcggaattgatccttgatctgctcggtcggttgcagaaatccaaggtcatagaggaccctgacatgtggaaaccaacagagaggctcaggtcaactcttcgtagggcatgcgaggtcatcgaattctgtcgggagaggagctgcacgtaccgcttctgcaagagcgaccataccgccaaagagttgcgcaagactccagatgttgttcagctgcaggatggcgtacaagtacctgctctagggttgcctgctcaacacttcaaatataatgaccgcaatgataggggagaaacactgggtatttcagggaaagctcaactggtaacagagccttcctctgttaacgagccaggtgaacgagcaacaaaagaaccattggattggcctaagcgctcccaaatagttagagggatagctcagggagctgtatatctacacaagctatgcgaaccacgtattattcacggggatttgaaaccaggcaacatactcctggatgcttctctgaaaccgaagatttgtgacttcggcatttcaaaagcacttaaggcagatgcggataaagactgcactggcgtcgtggtgggctcacg

SEQ ID NO: 48408 - DNA, 1124 bp, Oryza sativa
  Clone ID: PAT_MRT4530_51086C.1
aacaaaaggatgcatcatgcatggcaagtagacatcgacaaaataagaaggaaatttctctgggcgggaagaaaaaacatttatggggaaatgcaaggtcaactgaaaaagaatctgcaggcccaaagacctgggatggctgagagtaatagacctttagcgcttcgcatccgcattgcggcttaggtggctatggtatgaatggacggccccggagaaatcttgggtgggaacggcagtctgtgcaatcaggaagacagggagcttttttcagttgtaacaaccataacaatcagcaacggtagaaccgcttgtttctgcgactccaaatggctagagaaccaaactcctcgaaaaattgctccagacatctatgtagcctcaaaacgaaagaatagatcagtccatgatgcactacaagaaagcaactgggtcagagacatcgacatcctccatatcactcagggggatcacgtgcaacaattcgtccgtttatggactatgatcagaagaatgaacccccgactgaagaccaagataatattcgctggaatttgatagctaatggacaatactcagcaaaatctgcatataggctccaatttatgggggccacgagatctgccttcaatcaaatgatctggaaagcgtgggccctgccaaaatgcaaattcttctcctggctcgctatccaaaacaggctctggacaactgacagacttgagaaaagaggatgacaaaaccagaagatatgcccattgtgctgcataatcgacgagtcaacacttcacctgctggcacactgcagagttacaaagaaggtctagacagaaatacaaaggtggactcaaaccgacctccaaatgaacaaatggagtaattgcgactcggtagaactatggtggagccttgtggtagactctcccaacaacccccgcattcccacgcgaacgttggtcatcttggtttcttgggaaatttggtgcgagcgaaatacaagaatctttcgaaacactgcctcactgccggcttccatcctcgctaagatcaaggaggaaggtcgggcatgggtaaaagcaggagcctcgaagcttcaagagtttggaattttaggtgatatcact

SEQ ID NO: 48409 - DNA, 374 bp, Oryza sativa
  Clone ID: PAT_MRT4530_51087C.1
ggggaaacgaaaaaaaacattattggaaaaacaacatcttcttcttcatcttcttaggggaccccacccccacccgatcataattttggggcactaaacccattttccccaacccaaaaaccacgaacccgctggccccaaatccctccaaccccaattaacccctggtaagctacgggcccccactttacttgccggggaccaaattgggggggtccccccaagcctttttgttgaccgggcccgcgagggggcccgccagggtcccgagggggcccctgccggggaccatggcccggaccaaaaaacccaacctggagaacatggggagggggccggtcctgaaccccctcaccctgagccccccgaacccc

SEQ ID NO: 48410 - DNA, 1440 bp, Oryza sativa
  Clone ID: PAT_MRT4530_51088C.1
atgattatagaggtgtgttgctgcctggggtttgctgcgaatgtagcgcagctggctggcctggacgtggccagtctggtaaaggaaatcaaggagcgtgtccagacagtgagccagaacaaggaggactgtgagctgctcgccgaacgtgcggaattgatccttgatctgctcggtcggttgcagaaatccaaggtcatagaggaccctgacatgtggaaaccaacagagaggctcaggtcaactcttcgtagggcatgcgaggtcatcgaattctgtcgggagaggagctgcacgtaccgcttctgcaagagcgaccataccgccaaagagttgcgcaagcagactccagatgttgttcagctgcaggatggcgtacaagtacctgctctagggttgcctgctcaacacttcaaatataatgaccgcaatgataggggagaaacactgggtatttcagggaaagctcaactggtaacagagccttcctctgttaacgagccaggccttaaaaggttcgctttctctcaattggaggttgctacagacaacttctctctggaaaaccaaatcggtgtaggtgctttcagcattgtttaccaggggcgactaaatgaaggacttgaagttgccgtgaaaagagcatcatatgttgacaaaattccatttcaccagcttgagaatgagcttgatctaatcccaaagctccagcatacaaatatagttaaacttctaggatattgcacgagaaagagggagaggatactggtcttcgaatatatgcctaacagaagcttggattcattcataactggtgaacgagcaacaaaagaaccattggattggcctaagcgctcccaaatagttagagggatagctcagggagctgtatatctacacaagctatgcgaaccacgtattattcacggggatttgaaaccaggcaacatactcctggatgcttctctgaaaccgaagatttgtgacttcggcatttcaaaagcacttaaggcagatgcggataaagactgcactggcgtcgtggtgggctcacgtgggtttatggcccctgaatataaacagggaggctgtctctctctccagacagatgtgtatagctttggcgctacgcttcttcagatcattagaggaaaacacatctctccatcttcactggcgctttctgatgaatctcacaactacgggcctctaaataagtgggcgtggaacttgtggaaagacggaaacctgatggaattgatcgatccgtcgctgcacgatgagaatcatgcttctgagataaagagatgggttcagatagcgctgctgtgcgttcagcagagtcccgaggagcggccaagcatgtgggatgttcttctgatgctgagctgcgacagtgtaatcttaccagaaccaaaactaccagcttactactactaa

SEQ ID NO: 48411 - DNA, 198 bp, Oryza sativa
  Clone ID: PAT_MRT4530_51089C.1
gttatttccagcgcactaagcttgcacctggtatgggacattcacacacctgggcgagcactatctcacctgcctgccatggtatatacttgcatgctgattgagatgatgcacacagttggctgcgcctacggcgcctgagccgagaatacaaccggggctggaaagatgcactaggactcgattaacatatctacc

SEQ ID NO: 48412 - DNA, 593 bp, Oryza sativa
  Clone ID: PAT_MRT4530_5108C.1
gggcgcaaatgcatgggccggctttttttttgcactaacgagctctacaatatattcatatatatacttcctatattcataaactgtagtccagatttaccacttattcaaactgtcgtacacaattacagattttgctaactatcagttgtaaataaaaggaaaaaaaagagagataacatcactgcatctcctcaaatgggagtcacgtagcaatagcagcaggataccagtatgaacagatgagatgagcccctagaaccgtgacattgcaccatcagccatggcggccagagacaaaccctgacgagctcttgttgataaatattcatagggttcaaagatccctccgtgatacttggaccaatccttcagtctgtcgtaaatgtatttcgcgccaaacgaatcggcccaaaacatcactccgcccctgtaggaaagggaagcccctccccataatggatgctacatcaagatcagatgctttcatagcaaccccctcgtcaagcagtcgacaggcctcattcaccacggggaagagcatcatctccacgatttcatcatctgttaatttcggcagcttaggatcttgt

SEQ ID NO: 48413 - DNA, 388 bp, Oryza sativa
  Clone ID: PAT_MRT4530_51090C.1
catttaaaagcgtggtattgacagccactcggcctatccattttgcgtccaataactcaaaacggcgaatcacatcctcctcaactgtgagttcgctcgccaagtctgacaccggattctgtctctacctgactggtctgacctcactctgctccgtggctcctctcttcaggtctagtggcctacttctagggcctgcctgcctaagcattgtcataagtgcttcgactctttagtcctcctctcctcgcagctatgaaaggagcggaactccagagtgttcgattactctctctcgtcggtttcggtggttctgaagtccattctacatgaaggtttcccatggtcatttactggcgtcgcgtcttttggggatatattgggagtg

SEQ ID NO: 48414 - DNA, 4477 bp, Oryza sativa
  Clone ID: PAT_MRT4530_51091C.1
aaaatgaacaagaggttattacataataatgtatacaagatttgatttactggctatggaaaaacagatcacacatcagattgaagcattttttgtgtgtgcacactttaaatttggttcctatgccaaaaaataaataaataaagatcacatatattgaattttttttctaagtagtgtacaaatctccagttgcacagtactgattctacgcatgatttacagaattgatgaacatctcatcatttaacctttcgtacatctgatcacttcagcaaggaaatgtttgtggatttactctgttaagcatttgcagaacacccatggacagaagttgcaccatatattgctcaaaatttcaggtaacaactagatgacgaaacacattttccgacaatacctggctgaggcactgtcttcttttcagaccccaaatagatgaaaattcctcttgagtatggatacagatttctgactgcctctgttaactcctagcaagatgctgcagcatgtgagtgcatattttcacctaaatatttccattcgatgcgtatgaccagtactccttgacaagatctcggaagagagatccttcagtttccatgagcttcataggtttgtcatactccaccattttcccatcgctcattgcaaggaccatagtgcagtccataactgttggtatacggtgcgcaacagtaataacagtgcaatctttgaattcagttctgattgttttctgaaggatagcatcagttgcattgtctatggaggctgttgcctcatcaagaactaagatgcgacaccgtctcaaaagtgcacgtcctaaacagaacagctgcctttgacccatgctccagttcgacccatcttccacaacaagtgaatccaatccatgttccttctcttggacagtctcaagaagttggcatttgtcaagaacctcccatatttgttgatccgagaattgcccaagagggtctagattgtatcttacagtaccctggaaaagtgttggatcttgcggaataatgcccaaccgtgatcgcaggtcatgtaagcctattgtggtgatgtccgcagaatctatgattattttccctccagctggttcaacaagacgaaacaaagcaccaatcaaagttgtcttgccacttcctgtccgaccaactataccaatcttgtctccaccttcaaatgtgcaagtaattccatgcagtacaagaggagcatcttgcctgtacttaatcttcaaatctctaagctccaccttgccaacttggggccaatctggtgctggccgattttctttgataacttctgctgcttcacttgtaatgtccatgtactggttaaccctttccacagaaatgatttgattcgcaaggttgcattggttttgaatagagaaaactaaagacatgttcagggatagaccataggataatgccattcctacaaaaccagggctaaaagttcctggaggaagaatcgccatgacaaaagcagaaaaggaaagaactgcagcactcatcatttccaggcgttgaatcagccattcagttgcagcaaaattgtagaagcatgggccagcattcctgtccacaagctccaaatttttagcaaagaaacgatcttcttcctcaaaggcccttattgttatggcccctgaaatcgattcacctaagtgattagctagagcagatttggtagtaccattgatccgcatcaattccttagccgaagctaaatagtacctctgcaacctaatcgctaaaattatcattggcaccgagacaaacaaaacttgccatgtgacaacagccaatacccccagattgctatatgcatttaagctggcgttcatgctaaacatgaagaagaatggaacatcaaggtcagcaatactcaaatctgaagagacccggctcaatacccttcctagaggagtagaatcatagaatgacataggtgcacggaacagtgagttaagtagctgggaaaataaggatcttgaagtctgcatcccaaggactacgatggataaagacctagatagcaagaagaacaatgtgcaaactccgatagcaatatacacgactattaacttcagtgtactaacactaggattttcgacgttagcagccatccatgaattttgtgatatttgcccacatatgaaaattatgtgggaaataatggcgagagatgcgtataaaaatcctttgttctggcgcaggtacagtgtataaggcttaagacctgtatcacctatttctctttcctctatctttatcagctgatctgcttgtgatggcttcacagactccccatatctgcttccatgaatatcatctgtctcctttgttgatatttcctttgctctgtggaggggcatgttattaatatctgacactcctatagtatctttgtgggcatttacaaggtcctgaaattcttcgcagcatgccaacagatcttgataaggtgctgactgaataatctcaccatctgacattaacagaatggaatcaaacacaggcagaaaatccacttggtgggtcaccaaaagaacagtcttgtctgacaaagcccccatgacgtattcattgaaaagacttgatgctgtatgtgcatcaacagcactgaaaggatcatcaagaagatagatgtctgcattttggtatagtgcacgagcaagctgaacacgctgcttctgaccaccactaagatttactcctctctccccaatttgagtacaatctccatgtgtcaacattgcaaggtccttttccaaagagcacctcacaagtgtttctttgtatctttgcttatccatcgaagatccaaagagaatattgtcttgcacagttcctgtttggatccatgcattctgagaaacatatgctattctcccacaaacttgaatcgtgccttcggttttgggtacttctcctagtactgcagctaaaagtgttgattttcctgatcctacctcaccgcagattgcaaccttctccccaactttgaccgctaaatttatattcctcagagtttgttttgatggattctcgtcccacgagaagctgcaggagtttagtgctatgggatactccgcacccgctctatatttattcctacgttgcccgttcagctcaggagcatcaagaaattttacaacccgggtgaaagcaactttagcttgaatcacaactccaataacatctggtatctgtcggattggttcttgcacgagacgtagagttgccacaaaggtgaatacatttctagcatccagaggaacttttaaaagatagcatgtcagaaatgttgctgcagaaaccaaaacaggtgacgaccagaacaggaaaccgttgtatgccctcctaagctggaatgctgacaaccacttgtactcaacctccctcaacccctcaatgaccttcttgaaatgagtttcccaagcatataatttcaagaccttcatatgaactaaagactcagtcatcgccttcagtctcacatcttgtgcttccataagtttagtctgaaacttgtgttgcagttttgccagtggagcattgcagattacagtgataatgatgacaaccaatgacgatatcattgcaagaccaactgcattgtacaggattgccagagcaatgcagagctggacacttgttgtccatgtttggtggaaccaatatgggaactccccaatgcggtaggcatcgacagtcacgtaattcattatttctccagaagagtgcttcatttttgctaagttcgatagcttctgttgtttcttaaaaatagctgctgacagaaatgacctcacctgaaggcctaacctccgagtgcggaaataccactgtctctgcgacaaagattcacagcatttgcaaaagaatattgtcacagccagaacaattccttcatatttgaaggtccctttccccagtgttacattgatgaatgccttgagaagtaatgggcctgaggataaggtgagaaccttgagcaatgcaaagaaacctgagatcagaatcccactcttatggcaggaaacaatagtccaaaagactgatggtgtggcatgtggctccgactgcttcttgctattcagctcatccaagaacatcaagtactggttctgtgctcgatctgtggagcctaaacgcggtatatctttatcttcaaggggcttctcataacccatcttcatcaaagggttaagccaccaaaatgacatcacactgaaaaacccagctttagcaaaaggagttacatggatctctgaatcagccgtgtcatgatccttctctgtattcaggggcttgtataaagcatttgcatttgtttcataaccctcttcatcatggctgtgccgaatggcataaagaagaaggataagggctcccggtagcaaaagaacatctaaggaagctttaaaggtgatctccttctcttcaaccat

SEQ ID NO: 48415 - DNA, 549 bp, Oryza sativa
  Clone ID: PAT_MRT4530_51092C.1
atggatcccctctcggcctctcctcgtcctcgccgccgccgtatggatcccaccgctcacctagggaggcatcatgccagtgatcttgccacacctcacccacctaccacccccacctccccatcaaacactaacaatatccatatccacccattcacgcgagcgactaatcaattcggtgagagtcaacggcggcggaggaggaggtggaggaagaggaggagagtagatctggcgggcggcagcgatgatgaagttgttgttgccgcaaagccagctgtggcaatcggcggcaactttggcagtgcagtcttcgggaagaggcatggcgtccggcggcgtcaatggggctggctccaacagtggcgcatggatgatggtcaacaacaaaacatcgttggtggcgagatgataccagtcgctggcggtgagaaaggcggggtgcttggtcaggcggtggagcacacgcacatgtcgtcgtcgtcgggtgcagcggcggcgaacatgggcgccgccctggcgcgtgtgcgtcgtcatcgtcatcgttag

SEQ ID NO: 48416 - DNA, 294 bp, Oryza sativa
  Clone ID: PAT_MRT4530_51093C.1
gtacgctcacagatcggcagcgcgaggactcatgacatgaatcatgacctactacagctccagataccatgataggggcggcactcactgcacaaaacatcttacctcttaccatgcgcatgacctcaacagcaacggcaacaacgtccacaatgggctataatacttatatcgcagctaggatagtctcctggatggatcttggggataatgatccctggctactgattccctcatccagggggtaggcttgggtgcctcccggggtgaaagaatgcaaatcttatagcggtg

SEQ ID NO: 48417 - DNA, 272 bp, Oryza sativa
  Clone ID: PAT_MRT4530_51094C.1
tagttggggtacttaaaaacacacctgccttttactcctcgaatcgtaatggcattgatcccaattacgacccttttaagaagtacatcaacctcgccgacgccgtcgacatgctattctggcctccccgagcgaacggagaagccaggtggctggctcgattaggcgggctggatccctcactaccaattagacgccattcctaacaaggacctccaggacggcgcgcagatgcagctcaaggctcgaggcggcagatgcccacctaacct

SEQ ID NO: 48418 - DNA, 643 bp, Oryza sativa
  Clone ID: PAT_MRT4530_51095C.1
atggagtgctgcttccgcgtgtacggtctggccatcgccaacgcggtgtccatcggcggcacgagcctgctcgtctaccagctcgtcaggctggcgcggacgccggggagcaagggcggcgtcgtggcgctcgccatcttcctcgtgttctgggtcagcatcaacgccgtcgcctactcggtcttctgcggcatgctcttcccgtggtccgcgctgaggcggtgcctcgcgccgctcccgagcgccgcccggtggctgctctgcctgccgtgccggtgcgcgcggcggcggcggcggcgtccggcgacgagcacctcctcgtccgcttctgctctgccaccgcacatgtacgtgctggaacgcgagccgccggtgaggtggggggcgcgggttgcgacggcggacgacatccccgcgtacgagcagccggcggcgagcgagggcggcgcggcggcggcggcggcggagtgcgcggtgtgccctgggcgaggtggagaagggggagatggtgaagcggctgccggtgtgcctgcacatgttccaccggcggtgcatcgatccgtggctgcgcgaccactccacctgcccagtctgccggtgcgacgccttcgccgcgccgccattgccggcccaaatggtgtga

SEQ ID NO: 48419 - DNA, 377 bp, Oryza sativa
  Clone ID: PAT_MRT4530_51096C.1
tttttttttttttttttttttttttttttttttttttttttatttgtgtatatggtcaactaatattgagcgtgacgtttctccaggaacactggaaataaaggcgcagtttggtactactgacaaagaaaggctaaggaaaaaatgcaaaagttttgaaattttcccctaaagcacaagcttctaaccatcctgaaagtgacatttcaatagttccagccgaataaaagggaggggcaaagattgtatgatttgaagctgttatatccttcaggacccttcttgcttgaaaggaacggtttgaattcagtgaacaccaaatcccctatcgcgatggacttgcgtgcgagaattggttgcacacatcctctaaaaac

SEQ ID NO: 48420 - DNA, 318 bp, Oryza sativa
  Clone ID: PAT_MRT4530_51097C.1
tcttgtcacacaaagcaaggaaaaaagtcgtttctttctccgggcagatgggccaccgccgcatcattctcctctttgccttctccgccgtcgtcgcaacctcaaccgaatccgccgccatgtgggagtgcatctacacccacatgatccagtccggcatggaccacgccaactcctggctggagctaaactgcattcgagcatgtcatccgaacctgatgagtcagatgccctttgacaggtactgcgcaggaagggaaagaggtaccaacaccctgttgaaggagactggcgcttgcagaactgttccagagctgt

SEQ ID NO: 48421 - DNA, 1174 bp, Oryza sativa
  unsure (1)..(1174): unsure at all n locations
  Clone ID: PAT_MRT4530_51098C.1
ccggccgggagccgggaaatccaaccgggcccatttaccccgaatctcaccctccacccccaactccggcgaccacctcgccgccatggccgcccgccggagccccgccgcggcccaccactgcctcttcctcctcctcctcctcttctcggccctcctcgcccccctcgcgtccgcctaccgccccggcgacatcgtccccatgctccgctccggccagtaccacggctcgaggtcggtgtggttcgatgtggtgggacgccactgcccgtccttcgcggtcaaccatgaggttatgatgccgatccccaagccgactgggttcaccggtgcagatccttacaagataacatttcaaattggtcacgaaaagttccaccttccttggctttatgtcataaatcgcaaaagctctgaagttccaatgattgatttccatttgaaatactctggaaatgatttacttggtgtcacagctaaagtagtggacatgcctcacatttatgttgaacatcatcctgacataaggaagaatttctgggatcaacagaattggccaaaatatgttctggtcagatatacatgggaggagcaatcggagatagatgttcctggaggtttctatgtgttgtttggatctgggcttgttctatccttcatccttgcaatctacgtcctgcaatcatctcaggaaaagttgacaagatttgtgcgagaagcagttaatgacagtagtctaccggaaggagggtttgcaaaggttgagtgatctttctacaaggagctggaaaattatacactagtctgtccattgatcagaaaactgtcagtagataccgagttgtcagtcaaatttcatgggcgagctttcaacttcaaacaagagccagtggattgtcttgtataaatacatacattgcaaacgatttagctattatgacatgaaaagaggaaagagaaatggacattaggttttcccttggcagaatggtatttttagcaaactattgtccgactgtcactaactcacttcagttgatgtattgcgtgatgattttgtctgatgcaaaaaaaaaaaaaaaaaaaaaaaaaactcgagggggggcccggtacccaattcgccctatagtgagtcgtatacaattcnnnnnnnncttttttttttttttcttnt

SEQ ID NO: 48422 - DNA, 637 bp, Oryza sativa
  Clone ID: PAT_MRT4530_51099C.1
aggaattcggcacgagggaacggtagaggttaccatctaccagttgacatttggagtttgggatgtactattattgaaatggcaacggcaaaacctccttggcataaatacgagggggtagctgctatatttaagatcgcaaacagtaaagagatacctgaaatcccagacagcttttctgaggaaggaaaaagcttcttgcagatgtgcttaaaacgtgatcctgcatctcgcttcactgcaactcagttgatggatcacccttttgttcaggaccatccagcagtaagagctgcgaaatctggtgcactgagaaatgcgtttgcaccagcagatgggacgcatacaacgtccaacagggagttctcaaggaaaagtatcactcccctaaaggatataggagtgagtgcaagagattttaccggattttccacagccgttccttcaccacacaccgacagtcctatttccgttgtgagaacaaacatgtctctaccggtgtccccatgctcaagcccattgcggcagtttaagcaatccaactggagctgcctgccatccccaccacacccaacattttccaatggtgctacttcctataatctatcaagctacatgatgaacgagacaagacgaa

SEQ ID NO: 48423 - DNA, 306 bp, Oryza sativa
  Clone ID: PAT_MRT4530_5109C.1
gagcctcccggccatggctgaacccgaggtggtggttgccgcaggtggggaggcgatggaagcccaggcggcggagccggctgcggcgaatcccagtcagaagagggagagggaggagggggatgactcccccccccgcgctgctggcgaggaggccgcggagggagcttcggcccaaaagcaaaaagtggagggggagggggaggccaaaggagccgaggatgaggccaagggggaggaaaaggagggccccaaggaagaagaggccaagcccgtgaaacttggacccaaggaattcgccacggg

SEQ ID NO: 48424 - DNA, 107 bp, Oryza sativa
  Clone ID: PAT_MRT4530_510C.1
ggagggaacttttcacagttgtgttggcaatgtgcacagcaagatacatcatcacagtatggagtttggcatcagtgtatcgatatgtggctcctttacctttatca

SEQ ID NO: 48425 - DNA, 477 bp, Oryza sativa
  Clone ID: PAT_MRT4530_51100C.1
gcacgaggctctccagtctccaccaaatcggcaaatcttcccccatcttctcggccatggcgtccgcggcggcggagaaggggaaggctccggccgacacagagcagacggcggcggcgaccgccgcgcggctcgcggcggagtggaccacgtgggcgatgaagaacgcgaaggtagtggcccactacggattcatcccgctcgtcatcctcatcggcatgaactccgagcccaagccccgcctcgcccagctcctctccccaatctaggggtcctagctcaattctcgccagctgctattcggctgttcctcaccacgacccgcgtggatgcgcgtctattggatacggcaacctgtattgcatttcttctacataattttagttcctttctgtttgaatgtttgttaatttgggtctccccgaatagctactgatgagagttaagactttgagttgcaattaattacaaatactg

SEQ ID NO: 48426 - DNA, 421 bp, Oryza sativa
  Clone ID: PAT_MRT4530_51101C.1
gatccccgggctgcaggaattcggcacgaggcctcgtgccgaattcggcacgaggacatcttactggaggtgatgtgtgagacatcagcgatgtcagaggtgtctaccgaaccctagcttgccccagccgccatgccgtgccatagccagcagccacacctccattttgtctgcatctagacatgatcttggcaaagaacgtgcgccgtacgcgcgcggcgtagtcgatcgcccgtgggccctttgaacttttgttctgtttttttctctaaatgatactgttttgtaatccatagaccagcaatgcctcatgctccattttgatagaagaaagtaggtatgtcgtctaatcaaacgtagttgtagttggtttttcattttgagataatgaaatgtacttgtttgtgccatgtgttttatg

SEQ ID NO: 48427 - DNA, 510 bp, Oryza sativa
  unsure (1)..(510): unsure at all n locations
  Clone ID: PAT_MRT4530_51102C.1
cggctcgagggaaccgggncgcncgttctncnggttcctcatggnggganactanacgtngnaaataccctcaatggngttanatctctctctcacgtcctantnggntnattngtgtgtctganttannngcaaaggcggccgctaccntngngctnagcacctcntncgccgncgccgccgctgctgctggtggcgcgncatggcntagtgtcgtctcngctggccgccccgcgcctcnccggcgtgtcncgctcgtcctcngggcccantccgaaccggaagtggagcccacgaaggangagacggtcacgtcgtcctcgtccccntctccggcgacgaccccgactccgagccccncggcggcggcgcccaangcgaaccggnggtgagcaccaatctgtgggacctgctggcgttcaacgggccngccccgaacngatcnaccggcagatngcnatggtgggggttcntntccgcnctggccctngaagctctcccggcggcggg

SEQ ID NO: 48428 - DNA, 789 bp, Oryza sativa
  Clone ID: PAT_MRT4530_51103C.1
caatacatcagcaacattagaactatccaagagtacctctgcagccgagccgacaagtacctagttcccaaggtgaacaacactaatgttgatcggagtgtggcttctatccatgccactgtctttagctgcctccgtaggagagctgctggtgatcagttatatgaccctgctacaaacacagtggcagttgtaaacgaggaatacaaaaaccaatgtgtggccaactccatgagttccaaggggatgttcaaatggctgcaggggttcggctcctcgagaaagctcatggccattgtcaatgtggatggatctgtttcaaaggcttggccggttgagtccagcagcggggatggaaaaggcggttcggaaaatggcagtaagaaatatgtaggcgatccaatatacgggcctctaaatattggaagggcagagtcagtcaatctccagtttggcgctttcggaataagtgcctggcctactgatgcaggctgtacaagtcaagctggaagtgtcaacgagtcatgggacaatgctaatgaaggcactggaagccatgttccttcttcttctggttctcctaagaagttggatggacattgtaaagagattaaagaatcagcagcggcatctggaagtgatgatgacgaagaagaagaagaagaagcggctgatgttccacctaattcagggagtgaggaggacctaagtgaagaagacataagggcgatccatgaggagatggaaggttccgtcgatgaagattgcaataggtctgatgaggaatat

SEQ ID NO: 48429 - DNA, 1687 bp, Oryza sativa
  Clone ID: PAT_MRT4530_51104C.1
caccctcgcgagccaagctaccattctcctcctcggcggcggcggcggcggcggcggcggcgatgcagatggcggcgaccaccaccaccaccgactcctcccaggcggccgtgccgcctcaccaccctcaccctcacgcccacccgcacccgcacgcgcacccgcacccgcaccaccccatggcgcaggcgcggtgggtcgtcctgccttacccgcctccgccgccgcccatggtggccgctccgccgcccccgccgccgcagtacgccaagcacttcgcggcggggccgccccccgccgcggcggccgggcggcgcacgccgaccccgcccgcccccgccggatccggcgggaacgggtgcgaggagaacaagacgatctgggttggcgacctccagtattggatggacgagaactacctccacagctgtttcggacccagcggcgaggtagtgacgataaaagttatccgcaatagacaaactggacaatccgagggatatggttttgtagagttctactctcacggatcggcagagaaggctcttcagaattttactggtcatgtgatgcctaacactgatcgacctttcaagttaaactgggcttcatatagcatgggtgaaaagcgatctgaagttgcttctgactactcaattttcgttggtgatctagctgctgatgttactgatgaaatgttgatggagctttttgctaataagtaccgctctgtgaaaggagctaaagttattattgatgcaaacacaggccgttctaggggctatgggtttgttagatttggagatgacaatgacaaatcccatgcaatgactgaaatgaatggtgcgtattgctctactaggccaattcgtattggacctgcaactcccagaaggtcttcaggtgattctggctcctcaacacctgggcattcagatggcgattctactaacagaacggtatatgttggtgggctcgatccaaatgtcagcgaagatgagctgaggaaggcatttgccaaatatggtgatgttgcctctgtaaaaattcctctagggaagcaatgtggctttgttcaattcgtcagcagaactgatgcggaagaagcactgcaaggattgaatggatcagtcattggaaagcaggcagttcgcctttcatggggccgcagcccatcacataaacagtctagggctgattctggcagccgaagaaacaatatgtactatgggacgccattctacggtggatacggttatgcctcccccgtcccgcaccctaacatgtatgctgctgcatatggagcctaccctgtctatggcagtcagcagctagtgagctagagaagagagagagagagagagcttcattccattccctccaatggaaaacaaggttttggtccggtcagcatggtagcgccagatgtgaggttatagaacgtcctaaaagcgagtgaaacaggtaaaatgaatgtatggtatctgtagtgttgtctgtgttgcaagaagtataactcaaggcttgtagacacaagtgagtcgatggtattctttcaagaaattttgacttgctaataaattaaactattgtttgtgtgtcaaaaaaaaaaaaaaaaaaaaaacagaaaaaaaaataagctgagaagaaaaaaaaaaaaaaatagaaacacaacaaagaacgaaat

SEQ ID NO: 48430 - DNA, 216 bp, Oryza sativa
  Clone ID: PAT_MRT4530_51105C.1
atggtgcgaagttctattgatagagtaggaacaaattacaagattacaaccctagagggtcataacacggaaaaaggaaaaaatatacaacccccacacaccgacagcgccaacacacacgaccaggaggaggctagcaccggaccggccgctgctgagcgtgaccggtcgccgctagatcaacaaaggaacaaagacgagatcgcactacgctag

SEQ ID NO: 48431 - DNA, 681 bp, Oryza sativa
  Clone ID: PAT_MRT4530_51106C.1
ctaggggagggagaggcggtggcggtggtagccggagccgggaaagggagaagcggcgatggctagagccacggggagggagggaggacggtagtggtcgtcgacattggcgtcaggtatgtctagtgtcggtgatatgagcccgggggtatcaggtttagagggaggaggctgccccccgacgccacgtggccctcccccgaagggagtcaggcccgaggtagggtggcggccactccttccccaaagactagtcggaggaggctgccccccgatgccacgtggccctcccacgaggggagtcaggcccgaggtggggcggtggccactccttcccagagactggatggaggagtctgccctccaatgccacgtggccctcccccgaggggggtcgggcccgaggtcaccacgtacggtgggttaggtgtccgcctccaggtgcccacctacccatatttatggcgacccgagcggtcgcgccacgccgcatttaatgcgtccgtgctcgacaaggccagctccggcttcgacttcgcgcccagggcatcgttgatgggcagaaaatgccgaaaggtctccacgttcgagtcatcgagctcctcggatcttgacaagtttcagagaaaattacagagtcaaatgcccgttgctcctttatttccaaccaaaaagatctga

SEQ ID NO: 48432 - DNA, 420 bp, Oryza sativa
  Clone ID: PAT_MRT4530_51107C.1
atggcgggctcgggagccggccgcggcgaaggcaggctcaagagcggcggcagcgggagcggcgatgatgaccacgaggagcacggcataagcacccgcacgaaaaactcccgccgccgctgcccccccgcacgaggcccgccgccgtcatccccgcagtcgcccacgacggatccaaacgcccgaggctgggagaccactgctgccaccgccgtcgtcatcgccgccctgcctgaggcccgcgccatcgtccccacggtcgccagcgacagatctgcccttcccgcggcgcgacgacggatccgctccgccgccaccaccctagccgatgccgccaccatcaatgccgccaccgctctcaccgatgctgccgccaccgccgccctagccgaggctgccaccatcgccgggagtgggtag

SEQ ID NO: 48433 - DNA, 1791 bp, Oryza sativa
  Clone ID: PAT_MRT4530_51108C.1
ccaacctggagactagcaagccaaaaattttgctgatcatgtcacaacaagcaaaaccagaaaccgagattatagtgtacataacatgcgaaatactacaatttattgaacctgggctatgatccgggcaagagtagatgactatcaggcaggaaggcatgtggaaccgtgtcgaatgagtaacagaagaaatgcagagcattgcagaatggcaagcccttgaaaaatgcttatgcattctccacaccaggcgcaacgtcctcatcaggcacagcgtcgtctgcattctcatcaggctcacctgccctccgatctacaaagtcgtaaccatattcctcctctgaaagattcacctccacagatctgccataaatgaatggtctttggcccattgttgtgaaaggcaatagccccaatgcacgggcggttttaatctctcttgcaaccttacgctgagctttcgcacttatacgagtctgactcctcttgattataatgccagcttctgtaagaaagttggccagaaatctaacattcctaaaatcggctttctttaatttttttttttttttttttatttttaacatcaacttttattcaacgatatattgtaagacggacaactagctagtcgatcaatcaccaagctagcacacagaagcatgcatgcagtacactggtatagtcgactagaagcatagctgcacaggacccaaattaagtacatacgagtaacatatataagtaattacgcaagcagcacaatatataattacgatttaagggtagagtacgcgcgtagtgcatgcatgctttattagctagagccagatcgcgatcagctaggctctgctgcagttgacagtcaagaggtccaggggagctttgttgcagatcttgaggatgctacctgtgacattattgctcgcggttataccgattgatagtccggtggccctgagagcggcgcacacgcatctggcggcgacgttgttggggagctccgagatcgccgggcagcagaactgctcgggattggggcgtccgaacaatatcgcagtgatgcacctcgtgtagttcgcgagatctgatatgactcctccggggcactgcgtgttcggaggcggtggtgggggtggggcattggtggtctggccgctggcgaaagccagcaggagaagagccgtggcgaggaagaacgacgctatggagagcttggagggggccatggttaaaacgcgagtgatgattaattaattgtatagcttttgatgacgcccggcggtgagcctcgcctgaaagtcacatctggcctgtaatcatagtcatcgtcctcatactcctccgtcacatgaaaggtgcgggacgcctcatccaacttctcatccaaaccatcttctaaggaatcgaagcccgtgcacaattcagccaagatgctgctagagttacccctgttacggaacccacccctccaaccccagtcagatcctccacggcgattctcaagcccatcatccaagccactcagcatcctcttctcaaattcttccacgctctctcccaccccgtcaccgccaccggacaggaaggagcggcggaaggtcgcggcggcggcggcggaggcgggggacgggggaggggggctcgaagggaggaggcgtcggagggatcgcctcagcgccgagctcgccatctcgccgcgaggtggtgcgccgcgccgccacccgagccaccagcgagaggaggaggaggaggaggtggggactggggagcgggtgatttaggggtttg

SEQ ID NO: 48434 - DNA, 543 bp, Oryza sativa
  Clone ID: PAT_MRT4530_51109C.1
ctgcaggaattcggcacgaggcctcttctctctccccctctcctggaggagagagaggagaagaggagggggggccgcgccaagagccacgcgcgctacagtctccttcccacccgcgaccgcgagcaatggagatggccagtggaggaggcgccgccgccgccgccggcggcggagtaggcggcagcggcggcggtggtggtggaggggacgagcaccgccagctgcacggtctcaagttcggcaagaagatctacttcgaggacgccgccgcggcagcaggcggcggcggcactggcagtggcagtggcagcgcgagcgccgcgccgccgtcctcgtcttccaaggcggcgggtggtggacgcggcggagggggcaagaacaaggggaagggcgtggccgcggcggcgccaccgccgccgccgccgccgccgcggtgccaggtggaggggtgcggcgcggatctgagcgggatcaagaactactactggcgccacaaggtgtgcttcatgcattccaaggctccccgcgtcgtcgtcgccg

SEQ ID NO: 48435 - DNA, 293 bp, Oryza sativa
  unsure (1)..(293): unsure at all n locations
  Clone ID: PAT_MRT4530_5110C.1
aaaaaaaccnnnaaaggatacctggtttcaacaacaaaaaaaccccaaggtgaaaacattacattacacaataaccctacacacaggggacccaaataggatttttttggtcaaatttacccctggtgaattaaaccaacccgtcatgcctacccaaaaatttttttccctttttttcctttttaaaaaaaaaaaaaccgggggcctaatgggtttgggtcggaaacataaaaaaaccttgaaaccggccggttccttgttaaataacgggggtgggaacggcttccggcccc

SEQ ID NO: 48436 - DNA, 798 bp, Oryza sativa
  Clone ID: PAT_MRT4530_51110C.1
atggcgatctgcgctgctgcagctgaccactcccgcgcatccccaagctccgcggcaacgcaaccaacaaccatctgctggagacccagcaaggtcaaggaggaagtagaagaagacggaatggttgtcgatcccccggacgacgccagcgaggcgtccgataatctgcgcgcgacaggtttccaggacacgccgacggtgggcgagctcgtcctgcgccacctccgcccgcgtctccgcggcttccactgcgccgacggcgacgtccccgtcatcggcgtcagggacgaccccgccgccgcggcgccgctggacctcgtcgcgcggcacgggggcgccgccgacaggcgccgcggcgaggcgttctacttcgtgcggcggaggcgctgccgccggccgaacgtgcggcggaccgtcgccgagggaggcggaggcggtggcggtgcgggcgggctgtggaagaagagctggaccgggtccggcaagtcggtgaccgacctcggcgtcgtcgtgccgtggagcaagacgtgctactgcttctaccggcgcgacgagggcggccggctgagcaccttcgggggagggtgggtcttggcggagtacgagatcacggaacccggtacgtaccggcgcgccgacgaggaggaagacgacgacgactactgggtactttgccacgtcaggaagacggcaagcaagaagaggaagcggaatcgctgcgatgaggccgtggctgcacgggctgtagccggtacggagtctaagtcgtatctcctatgtgggctgacagcgaattga

SEQ ID NO: 48437 - DNA, 543 bp, Oryza sativa
  Clone ID: PAT_MRT4530_51111C.1
atgtccccgcccgccatagccgtcctctacgaccaccacggcccgcccgacaaagtcctcagggtggctgagctgccgccggcggagatcggcaaccgcgatgtgtgcgtgcggatgctggccgcccccatcaacccctccgacctcaaccgcgtcgagggcgtctaccccgttcgccctcccctccccgccgtcgttgcaggctacgagggggtcggccaggtccacgccctcgacgccgccgtcgattccccgctcctctccccccgcgactgggtcatcccttccccgctccgatgtgcctccccaatacgccgccaccatcaccctcaatccactcaccgcgcccaggatgctccaagactcgacgctgccatggcgttcaatccgctcagctcgacgccgccatggctctcgcggacatggccggcgccacaaccggacaacacgaggcctcgccgcctccgcatgctacgcaggaggcggcggcgagggcgagcaggaggacaaggcggagatggcgaccacgaggctgagccttga

SEQ ID NO: 48438 - DNA, 492 bp, Oryza sativa
  Clone ID: PAT_MRT4530_51112C.1
cgctcacctctcgattaagactcagttcggtcatattaccgcggcaagaaatggcccgttgaaccaacgaacgaatgacctttctatttaatacaggttggaacgacacgagcagatgagtcaacctggtaaaattatgcgaagtcaggattaactgatgtctaatcttctttaaaagacaatcttcaaaatcttttattcaactgatgtctaatcttctttaaagacaatcttcaaaattttttattcaatgggatgcacaattctaaagatgtaaattgatttggttttaaaagttaggggacttgtgcacgggtgtacgattgatggatgcgaatgaaacttaaggggacttttcctccaaaaaatcgagcaaggagcttgtcagagtcgtggcccattacgctgggaggcccatttacatagctcagtaagggaggatcgtttacgaatgaaataagttcatcccaggtctcttaactttataccgaa

SEQ ID NO: 48439 - DNA, 1735 bp, Oryza sativa
  unsure (1)..(1735): unsure at all n locations
  Clone ID: PAT_MRT4530_51113C.1
ggttgatcaatctttggaacttttctgagctgctacgagatcaatccagaaaagtctgtccacaatggcaacatcaaggagggaacctgatgctaggaacaacaggaccatccgggctatgtccacaggaatcaaacccactgatcctgcaaaggggcttcgacgagcgaggtctgtcccaagctctcccgatcgcaaattatccccatcccatgatgcaagctcatccaacgcctatcggccttcatcatcgttcagcacccgcacaggaacatcccggtcgacatttggctcagcttcttcatccattcacagcagcaaggcaccgcagacttcatcgtccacgactactgcaaagccagccaacacaacgaaaggaaaagctgacaagtctggtggctcatccgtgtggcctccagcccttacagcacgtaaccgttcatctaaggatatgaacaggacagcaaaatcatcatccgctatgcaaaagagtaacctctcttcaaggccaggtgttgataagatggcagcatcatctgcaaagcagagaacacagaaagcaaccccaggagctctggcaggtggaaaaactcaagcggtgccttcggttcgtgctcctggcacaacaacgaagaaaacaatgggggtagcaaattctgttccttctatccagagaacaagtataccatcaagaccgatagaggcacccaaagtcaatgagcaagaagttgagttgttaatggaatttgatgagatggaaagcataagcacgccttccatagaggaacacttgcaagaacggctccctgaccctgtcgagctgaaacaggttgatgtcattgcgtatttactatttggagataatccaagtgagccagcctctaaccaacaggaagacaaaaatgaagaagttgtagagcttatttcagaagagaaacatcaagtgccagacaacaacagttttaacggcagggataatgctgatattggcatcaatagcaaagtacaggccgtgaaggaagccattgataacagtgagttgaaggaggctgccaatgaaacagagttaaaagaagctgttgatgaaaccgaactaaatgaagttgtcagtgaatctgagttatacaaagatgtcaatacaacgaagtatacagaagatgcccttgaacctatgctaatagaaaaggaagaggctgaagaaaatgtggagatggtagtgccaccaaagaagacactaaagccagttcagggatggagcaaggatgatggaaagagcaatgaaatgaaagaggagggtaggagcaaacctacagaggagagaaagagcaaggtcatggccttgatagggagatttgagacggccatgtcaggttgagantgagaatgaggttgagaaactgacacaacagtagcaaccagccttcttttcatcttttgcgaagtncctnccattttgattcctgaatatgtatgcatgcaatcatgaattattgtggactggactagttccaattgttgtgtgcattgaaaaatgagaacttttcaagctagtatctgcagttttcgtcaaaaaagttagtctttgcagctcatgcaagcttaaagtcaactgtacatcagtacatgcatatctgcaaaagaaaacaggtggtttcctggacaaatatattgagctaaaccctgccatattcaataaaatattttcttgcctaaaaaaaaaaaaaaaaaaaaaaaa

SEQ ID NO: 48440 - DNA, 2820 bp, Oryza sativa
  Clone ID: PAT_MRT4530_51114C.1
atggtttcaaaatcttattcaaatctgttagaaatgagttgtggagatggagttgactttcggcaaccttttaaatctcttcctcgtgtggtaacctctcctggcattatatctgatcctgattgggacactagaagtgatggcgattcagttggttcagcatcttctgttgagaggaaaataattgttgccaacttccttccactgaactgtacaaaagatgaagctgggcaatggtccttctcaagggatgatgatgcactgctcatgcaacttaaagatggtttttcaaatgagactgatgtcatttatgtgggtagtttgaaggttcaggtagatcccagtgagcaggatcaagttgcacagaagcttcttagagattaccgatgcatacctacttttctccctcctgacctccagcagcagttctatcatggcttctgtaaacagcaattgtggccacttttccactatatgcttcccatttgtcttgacaaaggtgagctctttgatcgctccctgtttcaagcctatgtccgagctaacaaactctttgccgacaaagttatggaagctattaatacggatgatgatcatgtctgggttcatgattatcacctcatgcttctcccaacatttctgaggaagaggttacaccgaataaagctaggattttttctccacagtccatttccctcctcagaaatctacaggtcactgcctgtaagggatgagatcctgaagtcattgcttaatgctgatcttattggtttccaaacatttgactatgcccgccacttcctttcttgttgcagcagattattgggtctgcattatgaatcaaagcgcggttacattggaatagattactttggaagaacagtgagcctgaagatcctcgcagtgggtgtacatgttggccgtcttgagtccatgctaaagttgcctgctacagtaaagaaggttcaagaaattgaacaaaggtataaaggcaagatgctcatgttaggtgtagatgacatggacatcttcaaaggaatcagtctaaaactgcttgggttggagctacttctagataggaacccgaaactcagagggaaggttgtccttgtacagattgtcaatccagcaagaagcacagggaaagacgtggaggaagcaataacagaatctgtctctgtagctgaaagaatcaaccttaagtatggctctgtagattacaagcctgttgtccttattgatcatcgcataccattttatgaaaagattgcattctatgctgcatctgattgctgtattgtaaatgctctgagggatggtatgaacttggtaccatatgagtacactgtttgccggcagggaaatgaggagatagataatgccagaggcagtgacacaaattgccatcacacaagcacactaattgtgtctgagtttgttggttgctcaccatctcttagtggtgctttcagggtaaatccttggagtgttgacgatgtggctgatgccttacaccatgcaacagacttgactgaatccgagaaaaggctacggcatgaaaagcactaccgttatgttagatctcatagtgttgcttactgggctcatagctttgctcaagatctggaaagggcatgcaaagatcactacagccgaaggtgctgggctattggttttggtctgaacttcagagttattgctctttctcctggctttagaaagctctctttggaacactttgcttcttcttacaacaaggctaccagaagggcaatatttcttgactatgatggcactcttgtaccccagtcatcaatcaataaagctccaagcgatgaacttattactattctcaacagcttgtgtgatgacccgaagaatgatgtattcatagtcagtggaagagcgcgtagtttgcttgatgagtggtttgctccatgtcagaagcttggtattgcagcagaacatggctattttgtcagatggaacaaagcagctgaatgggaatcaagctatccaaaccatgattttgagtggaagcacatcgctgaaccggtcatgcaagtttacaccgaaacaactgatgggtcctccatagagccaaaggaaagtgctctagtatggcattatttggatgcagaccatgacttcggttcctgccaagcaaaggaactactgggtcatcttgaaagggtgctatcaaatgaacctgttgttgtgaagtgtggtcattacattgttgaagtcaaaccacagggagttagcaagggtcttgttgtggacaaggtaattcacagattgatgaacaacgggaagacgcctgatttcgtagtgtgcatcggtaacgatcgatctgatgaggacatgttcaaaagcatcgacagcatgacctccagctccgcattccctgcagttccagaagtctttgcctgttcagttggtcagaaacccagcaaggcaaagtactatgtcgacgatgctggtgaagtagtaagattgctcaagaatgtagctggcatttcgtcgcaccgggaggccgtcagccatggacgtgtgaccttcagggatgtgatggattatgtggagtgaaccacctaatctttgtaacatccaaacttgtgtacattccaatgtcttcatctagatttggccaaaagcatgaatcatcaccaccattaggacaactacaggagtgcaagcggaagctctgcatttttagtttaggtgatgtatactcatatgtaggcaattttgatagttgatgaggttcttgctggagaactgcactgtgaaagaaaagccccctggctttgaatagcc

SEQ ID NO: 48441 - DNA, 1666 bp, Oryza sativa
  Clone ID: PAT_MRT4530_51115C.1
tcttgccccaacttgcatccatatcttgagttgagcccaatgaacaagggcaacttccttgaatgccaggcacccatttgttgtcgccggcagcggcagcggcattgtcaaagacaaaggaaagagggcactcctgtggctgcagcactattggtgctaatgaaagaagcagtggctgctcatctcgacctggtgaagagagccctgctgctggccttgctctccaacttgcatcaccaccatgttaatgtggctgctgccatcctgagcaaagcctgtgggtcctcctcctagtccttggagtgaaatgcctgtactccccatttggcccatgcactgcaccatctcatgtggcatctttgcaagctgtcgaagaacatctgggtgcatatcaatgcccggtccaaactcatacatcaaagggctaagggaggcaagcttcatggacagaaactcaacttggttctgcagagattgcacatagctgatgatctcatctagcatgagggctttccctgtgaccttgtcacaaccaggaaccaggctttgcagcatcttcatcctctcactgatcttctcccttctcaccctctcagcaaggctgtggctgtctgttgcttggcctctccttgccctcacatgaatgtacccagctggtggctccccacctgctgcctccttggccttcttcttcacatcatcatcatgttgatgtagtaccacccttcttgcctttttctcctcaagtcccttcaagcccacattgctcctcttgtgctttctactcttgccccaacttgcatccatatcttgagttgagcccaatgaacaagggcaacttccttgaatgccaggcacccatttgttgtcgccggcagcggcagcggcattgtcaaagacaaaggaaagagggcactcctgtggctgcagcactattggtgagtacaccattggcattgaggtggggtcaagggagctgcagctgctgctctcatactcataggccgccatggctgctgctgccttctcttcaaggttgctgcagccggcagggaagcctgggacaggaagaggctcgacaaaggaaacaacggagaccagcgacccatatttccccacaagtctcttagccaattcaaacttctgttggggaggtctctcagcaagaatatcaagtggaaacatgggcgttgagtaagcctcctgaagtgcggcctttgtgggaacacggtatgtgataatggcaggagagccctgaaacttgccctgcactttggtctccaagatgaagttgtgggaagcagtagcaccaggatcaagtttttccacaatctttgatgtggttccagagataagttgaaaagcctcctgtggccaagagtcgtcgttcaagctaacatcataggcggtcgcggaaccctggttgtagaggttgagggtgacggcgaggcgctccacgcctggacccgggcgggacagcgcaaccttcttctgtgctaccacgaacggcgcatcctgcccggcggcggcggcgaagggcacgaggaggaggaggaggaggaagaggagagatcgccactgctgcgccatcaccgctcacggagattgctttgcttcttcccccggccggcgaccgaggctattgttacattacatgtgtgttcaa

SEQ ID NO: 48442 - DNA, 1191 bp, Oryza sativa
  Clone ID: PAT_MRT4530_51116C.1
atggggaggtcgccgtgctgcgacaaggcgagcgtgaagcgggggccgtggtcggaggaggaggacgccatactcaggagcttcgtcgagaggttcggcaatgccggcaactggatcgcgctgccccacaaagcagggcttaaacggtgcggcaagagctgccgcctccggtggctcaactacctccgcccggcgatccggcacggcggcttcaccgacgaggaggacaacctcatcctgtcgctctacggcgaaatgggaagcaagtggtcggtgatcgcgtccaagctccccggccggacggacaacgacgtcaagaactactggaacaccaagctcaagaagaggtacttggccgcggccgcaacagaagcaaccactcctcctcctcctgccgccggcgacgatgacaacaacccaacgacacaagcctccagccaacccgctcctcctactcctccggcgcccctcgtcaacctcgacgcggccggcctcgacggcgccgtgggcgacaacgacgagctcctgctgcacaagtcggagcagctgtacgccgagctgatgggcctcatcgagcagcagcagtactccacgatcaccgccgccgccgtcgacgcggcgacgacgacgacgtcgtggtcgtcgccgtcgacgggaacgacaagtccgaccgctagcagcagtactgacggcagcagcagcagcagcaacctgccgtggccggccgtggacgtgcacgacagtacgatgatgccgccgttgtcggagtccagcggcagcagcagcggcttgttcttcggctctcacgcgttcggtagtggctcgttccaagacctgctcggctctgcagcttccttcgacgatgtcatgctgtcgcaagagatgcttgataatttcaaaaatggcgcaacgcctggcggagatggtgatctctccccgacggacgcctgcctcacggtgatggagctggtgaacatgatctccgtccttatggcgctcaccgctgccatccgccttgacgtcccagccaagctctgggctagaggtgccaatgccccgttccccacgggacaccctaacccctttgtcctcgagcgcctcctccgcctgctcacctcctgcagtgtcttctgcgagcacaagggctccccgcgccacttcgcgctcaccaccggcgatgatgaatcctag

SEQ ID NO: 48443 - DNA, 216 bp, Oryza sativa
  Clone ID: PAT_MRT4530_51117C.1
aacaattttcttttgccaatagtggatgttgatacccgccaatagctttgaggttggatatttgcccactcgactgtgggtgatgataatattgacgcacttctctgttcctacggagtcatgaattgtgttcatgtgttgcccattgttttttagcttttaatgggaccaaaaaaaatgccctctgtttttttccaaaaaaaaaaaaaaaaaaaa

SEQ ID NO: 48444 - DNA, 2925 bp, Oryza sativa
  Clone ID: PAT_MRT4530_51118C.1
ctatctgggttggtctaacagtctgtgctgatcatttcttttcctttgcaaatatgaccaaatcttgtgaattgcagcaaagcctagtgcacctataacaaacacgacgaaatatccagaagactgcaacctcattcttgagccagccatgtaggctagtaggaggccaagtaagtccaacacaatcgttatgttcatcacattaagtgaccatgcctcccccagcagtttctctggtagcaacaggatgataacaacaatggatgccacaaatgaagtagagttgctgtaaaagaagatgagataacggtatctttttttgtcatgcataactgggttacctgctgcatgatcattactatttccctgccacacaccgccgggtgggttgagaccggcctggtaagtaacacttgcagccaagactcctagcagcatcaagtatttgcgtgtggcatgtttcttttttgatttgtcctctttcttgggagactctgtggctgtttcttgttttgctctctcaatagaatgttctaatctattttgtttggcttcaccctcatcttctatttcagaggactttcctgtgctgtcattttcttttaacttagtggacttcgctgttatgtcatcttcttccatttctacatcagattttgtcccagtaggcttcactgttttactgtcttgttttgtgatatcctcattttgtgtgccaggggactttcctttttctgtatcttctttgttatgtgacatgattcttttctgtctccaataggaatatattaggagtacgatcataatgaagaataccaacagcaccaaaccaaagatatagatggatgttttcaggtgctgagtgcttccagcagcataggcacacaaaagcgcaaacatgcctaccgcagtgcaaactgagagagcataacttcgtatggctggcctgtacaggttcggattcacaaggagtataattagggcaatcgatgacatgaagctcattgaattgcagtagaagaaagccttataacggcgtggatagttgtaaaagaggacagggtcacctgcatggtgcccaaactcatcatccatcagccaaaatccgcctggtggggtcaacccagcttggtaagtaagtgtcacacacaagacagcaaaaaggagcaacctcttgcgtctcttgtcctcaagtttccggtccttctccctgccttcctttcgtatgtcttcatcttcgagcgtgacaaacagaacatgaataaccacatagattaggacagctccagccaaggcaatgacataaatggatgtggttacatctcggcagctcccagaagagtatgcaccaatgaggccaaacagatccaatatcatggcaaactggagtacgcggagcttgagtataggcttatactggaccaagatgatgatgaccaaggacgctgcgaaggctattgagttgcagtaaaagaataccctgtaacgttctggttgcatggataggagtattgaatcgccagcctcatgtccgttccagttgtcctgccaaacaccaccaggagggaccagtcctgcttggtatgcgacggttgctacaagggttgaaagcagtacaacaagagattgagccttatccataaaatctgcatttcttgtgttcttctgtgctccagcattgcttgtcttcgtctcttcaccaccattggttgtggttggctgtgctctagcattgcttgagacagactctgcaccaccattgcttgagacagactctgcaccaccattgcttgagagagactctgcaccaccattgcttgtgtttatctgtgctctacaattgcctgtgctcgtctgttcttcaacattgtttgacctgtcatttgaatatgtctgacaggatataatcgccttgaggacaataatgcatgcaagaacggcaagaaccagactgcccacatagatggtagtgtcacattctcggctgcttccggtggcataggcccccgcaagaccgacaaaagcgataaagatgtatgctttgagcacaaaggtccgtactgggctggttttgttctgattcttgcccttgagtagtgggatgacgagctgcttgtctaagagcagcataatgatgagcagggacatgacaaatgcaatagcattaaaggtgaagaatgccttcaggcggatagaatggtgttcccgcatgactgggtcacctgcaatgtggccctccttgctgctgtcccagtagccaccaggcgcgctcaacccagccaggtatgtgatgctcatcacaaatgtagcaagaagtagcaggagcttgcggcgtcgctctttttcctcctctttgtttatctcccctttgccatcagctgattccagttgcccctttgcttccttctttttgctatcacctgtgcatctgaacaattgtgatttctcagagaatgaagtcagcacaacttgaacagccatatagacaaaaatggcgactaacacgcaggcattcttggcttttagcacaccccggctggtcccagcagcataggcccccacgaggccaagcagatccagcatcatggccacccgcagtgggatcatggagatccatagctcttccttctcgtgtacgacggcaaggatgaggatgaggatgatgaccacaatggacaaagcaaatgcagccgcattgcagtagaagaaaacaaggtaccggggatagtacgtatctcggatgatggactcaccggcgaggtgcccggcctcggtattctgccagacaccccccggcgggttgaaccccgcagcatatgtcaccgtggccaccataatggccagcagcaagaggtacttccgcaagcaatactccaatggtctgtgttcatctttggattcctctaacaactgctgattcgccat

SEQ ID NO: 48445 - DNA, 227 bp, Oryza sativa
  Clone ID: PAT_MRT4530_51119C.1
gtaaataccccaccctcgacccctctttctgctcgattccggcgacctcgtctacggtggcaggtagggagaggggtcgtccatccttcaccattgtaattacagcagccaagctagactggttaggtctggtaactacacagtatctttcttgatagagagcagatggaagttgtagatggcgttacatacccaattgtgaccagctgacggcagaggagacaagg

SEQ ID NO: 48446 - DNA, 346 bp, Oryza sativa
  Clone ID: PAT_MRT4530_5111C.1
cccttgcataggctcaagcttgttgaaaaggctattggggatcatctcttcactgagtattactactgttaatacgctgcctgtactacagaaagttgacagatgcttagatctgtcactgtgaacaacattggttacacacatgctgctgttcaatcaggattaatcacgcatatgcttcactgatgatcagaactgcatatgacgatgggctactaccttgaggaatttgggcagtcatttaacagtgcatcttatagttgtgaagcgggcattgggctaccaaaggcgtgtattctctacggagtaattggagtaagtggctatattgcatatattctgaaag

SEQ ID NO: 48447 - DNA, 594 bp, Oryza sativa
  Clone ID: PAT_MRT4530_51120C.1
atggccgccgcagccggagaggtgccaggccctcccgaggccgaccccctcgagggtatcataacgtttactctcaaccttgcggacgtggacaaagaacaacttacactgattttgtatccgagttgcgccaatactctgttgagagggcaccatttacttgtagaaattgccccaccacacccgtcgatgtcttcagaggaaacaaaaatcgaagcaagttatcataaattgattcccagtggaagatattgctttggccccaatgagtggtactttggctttgggtactacggtgatgaacaattagatattgctttggccccaatgagtggttcattcctaattgtttcaggaatcatgtattattgtgtaggttcatttcttagtgtttcaggaatcaggtttccgaaagactcacggaaggggcagatgcatgttgagcaaggaattcagtcacaggacatgatgagggttttaagctcagaaaaggttctgaagatgcaggagacacacaatgtcacaggacatggtgagggttttaagctcagaaaaggttctgaagatgcaggagacacacaatataaatattga

SEQ ID NO: 48448 - DNA, 512 bp, Oryza sativa
  unsure (1)..(512): unsure at all n locations
  Clone ID: PAT_MRT4530_51121C.1
ctcttatacgactactatgaggaaagctggcgcgcctgcagagtcccggtcctgtattgcggggtcgactccatgtcgttcgtccacgcgtgcgtggacacgtgggcggaattacaaacaaattcctggtgttgtggggttctgctttcgctgatgcaatttaccagcttaagatgatgcccctcctcatgctttttgggcagctttgcccctctggagtcgaagggacaccgctcgctctcggaatgtccatcaacaacttcggctcgactttacgcttattcttgggagcgggtctggcgtcagctttaagcatctcatcaccacactgaaaaaatatgacgctcggcttaagtgtgcatccgattggctctctcctaccgcgtggatttttgtttgtgataccaaacagaattacacggctnacgtcataggaagagggatgcacatccctgaccatcattttattttttacggattggtgtgaaatcctaaatgctggagccattccc

SEQ ID NO: 48449 - DNA, 198 bp, Oryza sativa
  Clone ID: PAT_MRT4530_51122C.1
acggccttcgacttcttcctctcctcgatctccctattcggcgtagcctcctgcctcgttcgctccgcccgcaaccatgttggcctactgcggtaagatcaaggacgagctcatcaagaacaggtgtcttacattggcacttcctggccaagggtataccttgcctgccggagtgatgttcacctggcacccatttgg

SEQ ID NO: 48450 - DNA, 1542 bp, Oryza sativa
  Clone ID: PAT_MRT4530_51123C.1
atggcgtcggcggcgtgctcctcgtcggcttccgccctcgtccgcctcaccggcccgatccatctgtgcagcgccccgccccgtgggtccgcgcggcggcgccacgcttccgtgcggtgctcgttcgcgccggtggagacggcgaggataaaggtcgtgggcgtcggcggcggcgggaacaacgctgtcaaccgcatgatcggcagcggcctccagggcatcgaattttatgccataaacacagattcccaggcgcttttgaattcgcaagcgcaatacccgctacaaattggagagcagttaactcgtggactaggtactggtggaaatcctaatttgggagagcaagctgctgaggaatcaaaagaagccatagccaatgccctgaaggattctgaccttgtcttcataacggctggaatgggagggggtactggatctggtgctgctccagttgttgctcagatatcaaaggaagccgctaatttatctggtctttctccatttcaggcgttggaagcattagagaagctggaaaggagtgtagacacacttattgttattccaaatgatcgattattagatgttgttgatgaaaacacgcccttgcaagatgcgtttcttcttgcagatgatgttcttcgtcaaggtgtccaaggaatatcagatattattacaatacctggacttgtcaatgttgattttgctgatgtgaaagctgttatgaaaaactctggaactgcaatgcttggtgttggtgtttcttccagcaaaaatcgggcccaagaagctgcagagcaggcaacacttgctcctttaatcgggtcgtctattgaggcggctactggtgttgtgtacaatatcactggtggaaaggacataaccttgcaagaagtaaacaaagtctctcagattgtgacaagcttggccgatccttctgcaaatataattttcggggctgttgttgatgaccggtacactggtgagattcatgtgacgatcattgccacagggtttccacaatcctttcagaagtcccttttggccgatcccaagggtgcaagaataatggaggccaaagaaaaggcagcgaacctcacctataaagcagtggcagcggcgacggagagttcctttgtcccaggaacagggctcttctgcactctactctacagtgcagctgcagttcatatctcaatgagaacattcaaacaccaccaagatttgcatgctttagctgagatgacagcaagaggagaaggtgatggtcaatcacctaaggctgccaggattgttggatacttggatgcgtgtgacatccgggagtcttggaggaagaaggagcgggaagcaagtgacagccaggatgcggcggcgctccggcgaggcacgccttatgtaccatctagacagggttcaggccttcgatcttcaggggttcaggttcagcacgttgtgctcaagatggcaccaggtggtagtagttgtattgttcgttgtaggatgggaattgctggctacctttcgtcgcatgagacataa

SEQ ID NO: 48451 - DNA, 1591 bp, Oryza sativa
  Clone ID: PAT_MRT4530_51124C.1
tcccccatttccctcctcatctccgacgcgcatttcccccaaaagaggggagcaaatggcgtcggcggcgtgctcctcgtcggcttccgccctcgtccgcctcaccggcccgatccatctgtgcagcgccccgccccgtgggtccgcgcggcggcgccacgcttccgtgcggtgctcgttcgcgccggtggagacggcgaggataaaggtcgtgggcgtcggcggcggcgggaacaacgctgtcaaccgcatgatcggcagcggcctccagggcatcgaattttatgccataaacacagattcccaggcgcttttgaattcgcaagcgcaatacccgctacaaattggagagcagttaactcgtggactaggtactggtggaaatcctaatttgggagagcaagctgctgaggaatcaaaagaagccatagccaatgccctgaaggattctgaccttgtcttcataacggctggaatgggagggggtactggatctggtgctgctccagttgttgctcagatatcaaaggaagccggttatctcaccgttggagttgttacctatccattcagttttgaaggacgcaagcgctctcttcaggcaagtgcgttggaagcattagagaagctggaaaggagtgtagacacacttattgttattccaaatgatcgattattagatgttgttgatgaaaacacgcccttgcaagatgcgtttcttcttgcagatgatgttcttcgtcaaggtgtccaaggaatatcagatattattacaatacctggacttgtcaatgttgattttgctgatgtgaaagctgttatgaaaaactctggaactgcaatgcttggtgttggtgtttcttccagcaaaaatcgggcccaagaagctgcagagcaggcaacacttgctcctttaatcgggtcgtctattgaggcggctactggtgttgtgtacaatatcactggtggaaaggacataaccttgcaagaagtaaacaaagtctctcagattgtgacaagcttggccgatccttctgcaaatataattttcggggctgttgttgatgaccggtacactggtgagattcatgtgacgatcattgccacagggtttccacaatcctttcagaagtcccttttggccgatcccaagggtgcaagaataatggaggccaaagaaaaggcagcgaacctcacctataaagcagtggcagcggcgacggtacaaccagcgcccgccgccacttggtctcggaggctcttttcctgaacacggttcaataggaaaactagtagtttgtgtaccttagattctcatggaattactgagttggcgctccaatcaggcttctatgtgttattctttttggatatgtaaacacttaacagttacacatagtgattagcttcacttttattgtatgtatcatctagatgaggttgaggtcttcaggagttcagcagccgtcacgaatttttattgtatgttcaagacgacacttggtagttgttcgttgtaggcgcgacttgctggccaaatctattgagtgtagatgtggatgaatttgcaaaaaaaaaaaaaaaaaaaaaa

SEQ ID NO: 48452 - DNA, 315 bp, Oryza sativa
  Clone ID: PAT_MRT4530_51125C.1
cttcaccttgccttcagctagagtgcaagctggcggcggcggtaactgcggcgccggcggcggaggctcggggaggttcaagcgggcgctgctccggaacctcatgctagggctcaggaagggcggcgtggcgtccggggagatgggtttccacgagaggaagagcgccattaagcgcgccgacgacgccgcgctcgtcgtcttcaggggcgccggcgacgtgctgatgtcgttcgctgtcctttaaagttctcacgggaccgaacgatacaactatttgcacctcgattgatctacatcatatccctttatgca

SEQ ID NO: 48453 - DNA, 570 bp, Oryza sativa
  Clone ID: PAT_MRT4530_51126C.1
ctttctttttttttttttttttttttttgttcaaactgtactcagtagtcagtagcccctccatatgtgatatatttcatgtccaaagccttaataaacaagtacaaatcacatgcatttagctacccatttgtcctagtttattgagtaaaattctcatcaagattgaatatcctactaaaaatttttcacaagtgctacctcggaattctagctcccacatcaacactacattatgcaagaacataaagtgaaatactatcatctaatgcttatcatctttgggggtaacatctttctttgcagcctgggactccagctccttaggtgcagcccgctcagcaggtttggcggcggcggcggactcctcctcgagccacttgcggatgtggcggacgttgcggcggaagatggacgccgactgcttcacgtcgctccgcagcagcagcaccgccgtgcccacgcccaccaccgtcaggatgaagttggtcagcgccatcgctctccgatcccccgcctccgatcgcctcgcctcctctccaaaaccctagcgccgccggcaacggaagc

SEQ ID NO: 48454 - DNA, 1413 bp, Oryza sativa
  Clone ID: PAT_MRT4530_51127C.1
atggcggcgcccgtggccggccgcctctccgggctcctccggcgatgcgcggcggccggggcggtccggccgggagagcaggcgcacgcgagggcggtggtgggcgggtggctccccgacgccaccctggagaccgacctcgtgctgatgtactgcaggtgcggcgagcgtcggcgcgcacgcagggtgttcgacggaatgcgtgcgccgtccatgcacgcgtacaacgtgctcctcgcggcgtcgcctccccgcgacgcgatggaggtgttctcccgcctcctcgcgtcggggctccgccctgacggttactctgtccccgccgtggtacgtgcctgcgctgagctccccgacgcggtgcttggcggggtgatccacggcttcgccgtccggctcggcttgatggggaacgttgttgtggccgctgcgcttctggatatgtatgccaaggctggtttcctggatgatgcggtgagggtgttcgacgagatgacggagagggatgctgtcgtctggaactgcatggttgcagggtatgcgagggctgggagggcagtagaaacctttgagattttcagcagagcgcaggttgaggcggtgaacatggtgaatggtctgcaggctgtgcccagcgtgttgaatatctgcgcgaaggaaggggagctgatgaagggtagggaaatccatggtaggatggtgaggtgccttgcatttgattcggatatcgcagtggggaacgctttgatcaacatgtatgcaaagtgcggccgggtcaatgtatcacaagcagtgttttctggcatgcagcagagggatgtggtgagctggtctacaatgattcatagctacagcattcatggcaagggggaacaggcattgaaggtttacatggaaatgttgtctgagggagtgaaaccaaattggatcacattcacatcagttctgtcaagttgcagccactccgggcttgtaaccgagggtcggaagatcttcgagtcgatgactaaggttcatggtgtccaccctgctgctgagcactatgcatgtatggttgacctcttagggcgtgctggagccattgaagaagctgttgggcttataaggaagatgcccatggaaccttgtgctagcgtgtggggagctttgctctctgcatgtgctatgcataataacgtcgatgttggagagattgcagcttttaggctatttgagttagaagaaggcagtgctagcaattatgttaccctctgtggaatttatgacgcagttggtcaatctgatggtgttgcagggttgagatcaaggatgagagaactcggcatggtgaagacgcctgggtgcagtcggatcgatgtgaagggaagagctcatgctttctaccaggggagcatcccacgttatttgaggagatga

SEQ ID NO: 48455 - DNA, 341 bp, Oryza sativa
  Clone ID: PAT_MRT4530_51128C.1
cgactgccgagagagcgtggtcgatgctattatgatttcactgaaatcacaaaggccttaaatatggcttggggcccatatgtagaaaatggtggtaggcacaaggagggcaaggacgaactctatcataacaccaagttcgcataagcacaacaggtcagagaccagggtggttttcaataccaacattgccattctaaacgtgctaacctctgatttatcaaatagaaaggtagagatggcttgaagatctcacccatcaatcccccgctatcagaggcgaagtgtgcgccttcattcttgcagaaataatgaacaagaaaggacgttttcacgtcaaa

SEQ ID NO: 48456 - DNA, 1281 bp, Oryza sativa
  Clone ID: PAT_MRT4530_51129C.1
atgaacccgacaatagaaaacggcggcagcggcggcgatggatcggcggcggcggcagcggcggagggaagtgcgatctggaagagtgagctggtgccgcagctacagctacctccgggctaccacttcgtaccaacggacgaggagctcgtggacttctacctccgcggcaagatcgagggacgcgacccgcctcgccacttcatcagtgaggagaatatcatgcgttatgatccccaaaagctgattgagaaatacaagggctatggggaagacaggtggtactttttcatggtgagggagccgtcgaagacgaagaagaaggacgagccgaacaggaaggtggtggtggatggggtggaagagggaagctggagcgcgacggggagcgtggtgcagattcacagcaccaaggagacgaaccggaaggctatcattggcagcaagagggttctcacttataaatctgctcgttccgctgagaacgacatgtggagcatgcatgagtatgtcttggcaggcaaatcccagatgggtcagtatgtattgtgcgcgatacagctgaagcagacctacgagagagaagagaaggcccgggaggagcagaagaatgacaacaaacgcaataaaaaggccgcaaggaggaagaacatgcagcagcagcctactgcttgccaggcacaagacgagcagcaggaaacagcaccaacacctggagaagaaaccattgtggatcctgaccagttcatggatattgcccattccatgcatatgatgtttggaggagtagatcaagatgcaccaccattcatgccaagcttaattgctccttgcaacaacgatgatggcatgctgcaacttcaaccactccaattgcagaacccaaaccctgcaatgctgtacagtaaccagctggaaccatcgtacattggtgatcagtcgatgttcaccccatgctgctgcgatagaaactgtatttcttgtcgtcagctacaattttaccagcaacagcaagcagaggatggcagtgttgcatttgaaaaggctgatctatacaacaacatgatagggctttgggaaatattggtgtataccctgacaatgtttgggtggatggtaacatggcagattatgctcagcgtcagatttacaatgatcaagataatggtggttcttttcagggcaacatactggcttcggtcttgggctcaactactaaagtgtgatgaagaaatcaagtcggtgaaagctgcatgtcgtaatcttgagtcaatggtgtga

SEQ ID NO: 48457 - DNA, 435 bp, Oryza sativa
  Clone ID: PAT_MRT4530_5112C.1
atgccgagtagcagcgacgcagtagattgcgtcgtcactgagcagctggcagcagcaaccagggagattgcgtcagtgccgagcagctgtgattgccatggagtgaattacgtcggcgccggccgctggcgacacgcgatgcagtttcgatttttggcttttcgccaaatcgctatcgcccggtcaccgatcgctaagcgcgtgcgcgtgaagaggacaagaggggatgtgggcggcggcaatcacgcgcgtttctgttttcttttcgccgcggggcgcttcgctttccggcttccgcacatgcatgcgctcgatctgcgggccagggacgcgggagggagtgcatacattcccctcgggccactctcagcccaaaagaacaattcaatttggaataagtccattttgccttcctcatctcttgcgcttgcgtga

SEQ ID NO: 48458 - DNA, 374 bp, Oryza sativa
  Clone ID: PAT_MRT4530_51130C.1
cccacgcgtccgctttgctctcaaatatgttctcagtcattcacatggttggcagggactgcaaatcttttacgtattcctgatatgtgtcactgactgagagatgggagtacagttggaataaaaagtggaagttgaatgtaaaaaaaaaaaaaaaaaaaaaaaaaaaaaaataaaaaaaaaaaaaaaaaaaaaaaaataaaagtataaacataaaaaaaataaataaataaaggggggctccctttaaaggtatcaatctttatttaatggtccgtgccatataaataaatatgtaataacgtgtagctaaattaaattatctctggactttttttttggggcggcgttttttggtgatacacattttttta

SEQ ID NO: 48459 - DNA, 316 bp, Oryza sativa
  Clone ID: PAT_MRT4530_51131C.1
gttttatacaacgtaccgttatcgtaaacctcttccgagggttgaacttgaacctgagggcgcccacggagctaaactgagccttttgacacaggccgggtcagtcagcgcggaattccgcggcagccgtcgtccacacaaagagcaacgctattgcggaatcgcaagggcagatcatgaaaagaaagtagagactcgcgaaagaacaacggggcaccagaagcacatccatctcactgttgacgaaatcagattcaccaaatcaggtggaacattgcgcttttatgggaaccagcgagaggaaacatgcatctag

SEQ ID NO: 48460 - DNA, 1023 bp, Oryza sativa
  Clone ID: PAT_MRT4530_51132C.1
atggggaggtcgccgtgctgctgccacgacgccggggtgaagaaagggccgtggacggaggaggaggacagggcgctggtggagcacatcaagaagcagggcgggcacgtcggaagctggcgcggccttccccgggcggcggggctcaaccgctgcggcaagagctgccgcctccgctggaccaactacctccgccccgacatccgccgcggcaacttctccgacgacgaggagcgcctcatcatccgcctgcacgccgccctcggcaacaagtggtcgacgatcgcgacgcacctggacgggaggacggacaacgagatcaagaactactggaacacgcacatcaagaagaagctgctgcgaatgggcatcgaccccgtcacccaccagcgcctgccacccgacctcctcgccgacggcggcggcctcggcgccgcctcccctctcctctcgccgccggggccggcggcggcggcggcgctccagcctctcctctcggcggtggcgagcctcgggagcctcgacaccgcgctgaggcagttccagctgctgcagcacctgctgaattccatcacctcctctagcagcgacgtcgctgcgactgctggtctcatggccaccaacctagctgcaacaaacaccatggtgaactcgagcagcaacgtcgcaagcttccaggagcagatgaacgcattggcacatgcaaactaccagccaggttatctccgtgatgtcgtcccaagctttccagggcaagacatggcgccgcaactgaacagtactagcagtacacctagtacggctccagtgctcagatcaagcgctgaaccggctgatcagtgctgcaacgatgctgcattggtgcctgaaacttatccacgggaagtggcagcatctgttgatcactggaaggtgcaggattttcccagcttggagcccctggagctaccaaatctatcaactctggagagtgatcttgatccgttctggaaagagatactagaaagcagcttccgttcataa

SEQ ID NO: 48461 - DNA, 180 bp, Oryza sativa
  unsure (1)..(180): unsure at all n locations
  Clone ID: PAT_MRT4530_51133C.1
nttcntccnatntttggggggaagttcttatctnacagggatnttanggatttggttcaantcccccttgttganagcanttctgcnggggatantcncctcctctattcaangcttgcgaaaaattttgacctctnatcgngtccnacttggctanaggattttnttganatgggcccc

SEQ ID NO: 48462 - DNA, 507 bp, Oryza sativa
  Clone ID: PAT_MRT4530_51134C.1
accccacacagaatagtctgcagctagcattgatcactacaaaaccaattaagttgcacatgaccaaaaaaggctcaactaatcaatacagatgcaactaatataattaatcaccacacagccgacctggtgatcgatcgattgaaccctcaccctctctgcacagttgccactacaaattaagcataattaattagcttacaattacgtacgtacagctctggatcgatcgatcaggatcagctgaagaggttcagcagcgtgggcgccccggcgccatccccgtcgctggcttcctcgcacgtcgtcgtcgagtgctcgtccgacgcgccgccgcccccacccaccagctgcacggccggcggtgagacgggcgtgaggcagaggtccagctcgcaggactggagcaccgcagccaccgcgtgcggcagctgctgctgaccgacgccggcgccggcgccgttattcctgggccgcttcctccggggcgcggcggaggcggagttg

SEQ ID NO: 48463 - DNA, 576 bp, Oryza sativa
  Clone ID: PAT_MRT4530_51135C.1
atggcctcccgcgcccgccctcccacgccgccgtcgtcgagggaggagctgggcgcggccgtcgggggcggagcggggctcggccggcggggcggagctgggcacgggcggcagccggcggtggaggagctgggcggcggcaccgtgggagggcgggcgcccgatggccttgatgacgcccacttcgacctcccgctgcagtccaccacctcgccgtcgctcgacggcgacaccgacgacgatgacggcgaggttgtgctcgtccgccgccctcttgtcttcccctttggcttcgactcatgcggccccgccgacaccgacacgcatgacctcatcgctcgcctcttcgccaaggaccccgccgcctgcctcggctcccccggcggcggcggcgtgggagggcgggcgtgggaggccatgcggcgctgccgccgcctcgtcgcccatcgcccgtcgctggccgccgggctcccgcactcccccaccgggcggctgccctgcgtggggaggggaaggagagagaggaagagagaagaagaggagagaggaagagaggggaggggaataaggggctga

SEQ ID NO: 48464 - DNA, 837 bp, Oryza sativa
  Clone ID: PAT_MRT4530_51136C.1
atgtcagccccttattcccctcccctctcttcctctctcctcttcttctctcttcctctctctccttcccctccccacgcagggcagccgcccggtgggggagtgcgggagcccggcggccagcgacgggcgatgggcgacgaggcggcggcagcgccgcatggcctcccacgcccgccctcccacgccgccgccgccgggggagccgaggcaggcggcggggtccttggcgaagaggcgagcgatgagaggcgttgccgccgccgcctaaactggagggggtggtccggaaagcaggacgcgccactgccggccgtatcgtcttactcgtcgtcggtgtcgccgtcgagcgacggcgaggtggtggactgcagcgggaggtcgaagtgggcctgggtacggtgtagacttcgaagtcgtcgtcgacaaaggccaccatatttgcgagggtggcgccgatgggcatgccgccggccagaggacgtcatcaaggccatcgggcgcccgccctcccacggtgccgccgcccagctcctccaccgccggctgccgcccgtgcccagctccgccccgccggccgagccccgctccgcccccgacggccgcgcccagctcctccctcgacgacggcggcgtgggagggcgggcgcgggaggccatgcagcgccgccgccgccgcctcgtcgcccatcgcccgtcgccggccgccggtctcccgcgctcccccaccgaccagctgccctacgtggggaggggaagaaggagaaaggaagagagaagaagaggatagaggaagaagggaagggaataagggctgacatgtgggtcccaagctga

SEQ ID NO: 48465 - DNA, 441 bp, Oryza sativa
  Clone ID: PAT_MRT4530_51137C.1
cttctgttaatgaccaaaattggtaatctaggtatcagagatgaagatcaaattgaagcggaatccaagacagagatcgtttcggaaacagagcaagaatcggctgaagtccgaatcggctgcgaccagcatcggcagagttcgagtcggacaaggtagccggttaagccgattccgacaatgtgactcgcttgggcaaaagtctgccgcaaagacttatggtattttagagtttgttagagatacgagttgtgtccgacatggacatattttgatcaaatcaactggcacgctcacgaacctaaaagcaaaatttttggacctgcactaaagttaagcagatcttccaggcctcgtgtttttcgcatcaacagacggggacccgccccaatccacctcgccgccggtgggtcccagggctccggtcactgctcccgccaa

SEQ ID NO: 48466 - DNA, 141 bp, Oryza sativa
  Clone ID: PAT_MRT4530_51138C.1
cccacgcgtccgatcatagaatattactccagttttacaactctgaattcactcacggtagtagagtattattggggggagtctataaggcctgatgcctgctctatactgctaatgtagattaatcactgttgacgctgc

SEQ ID NO: 48467 - DNA, 5177 bp, Oryza sativa
  Clone ID: PAT_MRT4530_51139C.1
atcattttgcttctcaatgttcgagaaactttctgagggaaaaggaaagcggattcttgacctactgacgaatgcgtccgaccttgaaattcagccgttaagtttctaaggtcttacagaggtttccggaacagatgaattgcataaggatgaccgtgtgacactttctgaacaagactttggaattatgatgtcttttttcaatgagcagactgagaatgctgtggagaacataaaagatgtgcctagatctgagactatccaaattatggagctggagaaggagaagaagttttctgaacaaggagattcataagaagtgacaggtagtcctcttgaaaggacttcagatcatgattacacgaaaggtacggggcaacttgatgtttaggattttcgttttagtaggactgtagcagaagaaatattgtgctatagagattgtcaaggtgctcttcattaggttcctcaataagaaaggtacaagacaacagtagaaataaacattatggaatgtgtatgtactctagctcgacgtgaagagaatgagcatggaggcatgagggtaaatccagggacagctatgatgcttaaacaattcatatgtcatgatatctttgtggatattatcaagtaaaagaaattgaaatcgtaaaaagatgcaatggggagatccgacaagcttattcgactgttgacagaccacccaccccgtgcccgtggacgagcccaccgcaagcgcgccgccgccgcagccgcagcagcagccgcctcctcctcctcctcagcctctgctcccaagcgcacccgccgctcctccgctgcctcctcctcctccgccgccgctccccctcctgcgcctgcgcctgcacctgcgatggacccctccccttcctcccgccgccgggctcgcgcctccgcctccgacaagggcaaggaccccgacccctcctcccacccgttacctcactcggcccccgacgacgacgaccccgtcgccccctaacagcagtcctgcgcctgaaattgctttatgcgatcctagaaggccgtggatcatttgatctatcatgagttgatgataactaacatacagggctcaccattgaatgccctatcaattttatccagaattagtttctttgttgcccgtgtgacataataggttgaggctaccagccgctgtggacaaagcttgaaggacagagtctcccttcagacacagtgaaatcaagttccatatatgtggcgtgggcagcctcgcgagcaccgagaagaggagctctatcctttgccgtacatgtaaataaagaaaaaaaaagaaggggcaatagtagtttacatatttgtcgaaagaaggattgattcgttggtgaaaccctttgctgtgtatctggaatgttattactttgctattattatgttgttaaccatcatgtgtacatgtgtgatcgataatatcgtactgtttttgtactaataaatgtggtgtagtgctagtgtttacgagctggtgcgctaatggctgtcctgtcatatctggacttcttctctactggtgttcagcctggtatcaatcagcaactccgcaggccaggcctcgttgagtacatcaacatatacgccaaaacacttcttcttcttggaatcagtggtactcttaaagatattctttcaggttctggtttggttgctggagcatcagtctccccagctttgtcaaggcctgctgaacagatgtttgagatagtgagccttgctgatgatttgcttccacatttgccttcgggaatcatttctttaccagcatacttccatgtgcttgttaaaggctcttcttcaaagaaatcagcttccaccaaacaagatgggacaagttcaacagaaaatgaaaggtcaggacatgagagactattacgtgagcaccctgagcttctaaagcagttcggcattcttgcgtggaaagatccgcaagtgttgattcctgctcttcaaatagcagaaattatgatggaaaaacttcctgagacattctctaagttgtttgtgagggaaggtgtcgttcatgctgtggagtcgcttatatgtccagaatcctctgatatggtgccttctcaggtattgccacatgataaagacaatgaatctgtgatgccctcgcattctagacgccagcgccggcgtggtgctgctgcaccaacagaaaacagctcattagatgaatcaaacacttccaatcctgggattgccagctcaacaccatgctctacagaagttcaaaacaccagtcttcgatttgcagttagtgatcgtgcaaagtcgttcaaagataaatacttcccttctgaccatgaatcaagagatcttggagttactgacgatcttcttaaactgagaacactctgtgcaaagttaaattctgcaagtgagaatgtcgtgacaaaagccaaagggaaatcaaaagcgttaagtgccactcattttgacatctcacatgatgtggaggcacaatttgagctgataataacacaaatacttactgagcttagcaaaactaacggcgtatcaacatttgagttcattagaagcggagttgttgcagcattgcttgactatttgtcctgtgggacatttggaaaggagagggtatctgaggcaaacctgccaaagcttcgtcagcaggcgcttaggcgatacaagtcttttatatctgttgccctttctattgaccatgaaaggaatgagactcctatggcttttttggtccaaaaactgcaaagtgctttgtgttcattggagcgcttccctgttgtgctcagccagtccagcagaataggtattggaggctcccgtttgacttcagctgttgaagagtttctttggcccagagttcagcgtagtgaggctgcttcgaagcctacagttccatcaggaaataattctgaatctggcatacctggcaccgcagctggtgcgtcatccacagctgcaccagctccatctggcaggcgtccaacaacaagatcaaaatcatctgctgcaagtagtggtgcatctaagaaggattctcaggaggaaagcacaaacactgccaagggaaaggggaaggctgttgcaaaaccaaactcagaagaaccaaaaggacctaatacacggaatgctactcgcagaaaagctgcttcagagaaagatctggaaatgaagcgagcacatggtgacagcagctctgaggatgaggagcttgacacatctcctattgaaattgatgacgctttaatgattgatgatgatgacatgtcagaggatgaagaagatgatcatgaggttctccaagatggctctcttcctatttgtgttcaagatggggtgcatgacgtgaaattgggtgacactgatgactctaacattggttcagcaagtgatagccaagtgcagccctcatctggttccagcactaggaacatcatgagcaggggagtagatccaaatacctttggttcacgaggtgcaatgtcatttgttgctgcgacaatggctgggctggcttctgttggtggtcggggggttagaggtagtcgcgatcgacgtggcctgtcacttggaggtagcataaatgagcacaataaactgatatttatggctggggggaagcagctcagcaaacatctgactgtgtatcaagctctccaacgtcagctgatgtttgaagaggatgatgatgagaagtttaatggatctgatttgtcaaatgatggaaatcgattttggggtgatgtgttcacgataacataccagaaggctgatagccaggctgagaagcaacaacagggtgacaaccaaaatgctggtggcgaaagggagatccgatttggaaggctacaacgtcaaaaagttcgtgtttcccgtaaccgtattctggattctgctgctaaagttatggagatgttctccagtcagagagctgttcttgaggagctggacttatttgacataatctcatttgatgctgaattcggaaagacattgcaagaactgcaaattcttgttgaacggaagaggttccttgaatccacttatggcatgaatcagctagaagtcacggacttgcgtttccgtggcactcctatcgaagatttgtgtttagattttactcttccaggttatcctgattatattcttaaagaaggcgaggaaaacacaattgtaaatatttacaacttggaagagtatgttactttggtagtggatgctacagttaaatcagggataatgaggcaagtcgaagcatttagatcaggatttaaccaggtctttgacatctcatccctgaaaatattttcacctgaagagcttgactatctaatatgtggtcgccgagaaatttgggagcctgattcattggtggataatataaaatttgatcatgggtatactgctaaaagtcctgcaattgtaaatctactcgagatcatggctgaattcaccccagagcaacaacatgcattctgccagtttgtaactggtgctcctcggcttccgcctggtggtttagctgcccttaatcccaagcttactatagttaggaagcacccctcaagtgcggtgaatacttcaaatatcgctggagttacagagtctgcagatgatgatctgccaagtgttatgacatgtgctaattatcttaaattgcctccatactccacaaaagaagtgatgcgcaagaaattgctttatgcgatcctagaaggccgtggatcatttgatctatcatgagttgatgataactaacatacagggctcaccattgaatgccctatcaattttatccagaattagtttctttgttgcccgtgtgacataataggttgaggctaccagccgctgtggacaaagcttgaaggacagagtctcccttcagacacagtgaaatcaagttccatatatgtggcgtgggcagcctcgcgagcaccgagaagaggagctctatcctttgccgtacatgtaaataaagaaaaaaaaagaaggggcaatagtagtttacatatttggcgaaagaaggattgattcgttggtgaaaccctttgctgtgtatctggaatgttattactgtgctattattatgttgttaaccatcatgtggacatgtgtgatcgataatatcatactgtttttgaact

SEQ ID NO: 48468 - DNA, 1529 bp, Oryza sativa
  Clone ID: PAT_MRT4530_5113C.1
cacatagctagtgagtgagtgaggtggtgtatcatatctatcagcaactgtaacatctgtgtcactcactcactcactcactagctatgtgatggtcgaaggtgatcgaaggcggcggcgagcgtggcggcgaagcgggcgacgttgatgcggacgtcctgcttgccgaggtagtactcggcgaccttgtcccagccgctccggtgaaccgcctccgggtccttcaccacctggtgctccggccccagcatctccagcagcgtgctctcgtcggcggcgacgctgtactccatgtaccggagccccatgtccgccaccggctcgccgaagtccgccctcgccatccgctccagccgcccgtacggcaccacctggatcaccaccgcccccgccggcaggaacaccgcgttcgtcagcccggcgccgtgcacgcccaccatcgcgtcgaacgcgttcaccttcctcgccacctcctccaccggctcgtcgaaccgcggcgacatcaccgccgcctcgaaccccgccgcctccgccgcgcgcaccacctcgtccatgttcacgatcttccggtagtgcgcgcgccggatcaccaccagccgcggccgcctcgcgcccgccgccgcggcgcgggggagcgcgtaggtgtcgcggaggaacgcggcgaagtccgccatcgtcagccgctgcccgcccggcgccagctccggcttcacgctgaactccttgtgcatgcggagcccgacggcgacgcggcggaagcaccggacctccgtgtcgcggtcgaggtcgacggcgtcgtaccgcgacagccgccgcacgacggcctcgtacttgcccagccaccatggctggatgttgctgaccaggaactggacctcgccgccgtaccgccgcgacgccacgaacagcggcaccagcacgtcgctgaagtcgtgccagtagttgccggtcaggccgccgagcgcgaacacgacgccgggcacgccgtgggtcaccgtgcacgccggcgcggcggcccggtcctgctgccgcgtcacggtcacctccgcgatgccggacacggtcctgcgcgggtacggctggatcttccactcgcggcggcgctccgaccggcggctcgccggaacaagggtcacggagagagccgtgccgttgatccggacgtcgccgtcgacgtcgcaggtgtcggagtagaacccgttcgagccgcacactaccttgccgttctcaatcggtttggcatttgtcgagtctcttttggagaactcttctgctgagacggcaccagacgtgtcctttggccgctgccactcctgctccctcttcttctctgtttcaacgcgagccttggtcaccgactcattctcgtcaatcctcggcgccctgctagtgacagctgtgggagtttccatggcgaactgctgcgagacgatgacgtaggtgaggaggacgaggaggaagccggcgaagaagccggcgttgaggtgtcgccggaggccaagcttcgccggcttcacctcgctgcccat

SEQ ID NO: 48469 - DNA, 714 bp, Oryza sativa
  Clone ID: PAT_MRT4530_51140C.1
ccgcgacgatgacttgtctgccaaagaactcagctcagatttacctgacaatggcagccacttgatacaagctccctttggattgtttcctcggccttggccacttaccgttgatgcttcagaaggcagtagattttctaaggtcatcgaacatttccgcttggttgggcgagtgatggcaaaagttttgcaagatggaagacttttagatttgcctctatcaacagcactttataagcttatacttggacaagagctggacttatttgacataatctcatttgatgctgaattcggaaagacattgcaagaactgcaaattcttgttgaacggaagaggttccttgaatccacttatggcatgaatcagctagaagtcacggacttgcgtttccgtggcactcctatcgaagatttgtgtttagattttactcttccaggttatcctgattatattcttaaagaaggcgaggaaaacacaattgtaaatatttacaacttggaagagtatgttactttggtagtggatgctacagttaaatcagggataatgaggcaagtcgaagcatttagatcaagatttaaccaggtctttgacatctcatccctgaaaatattttcacctgaaagagcttgactatctaatatgtgggcgccgagaaatttgggagccctgattcattgggggataatataaaaaatttgaatcatggg

SEQ ID NO: 48470 - DNA, 889 bp, Oryza sativa
  Clone ID: PAT_MRT4530_51141C.1
ccacgcgtccgaagagatcttggagttactgacgatcttcttaaactgagaacactctgtgcaaagttaaattctgcaagtgagaatgtcgtgacaaaagccaaagggaaatcaaaagcgttaagtgccactcattttgacatctcacatgatgtggaggcacaatttgagctgataataacacaaatacttactgagcttagcaaaactaacggcgtatcaacatttgagttcattagaagcggagttgttgcagcattgcttgactatttgtcctgtgggacatttggaaaggagagggtatctgaggcaaacctgccaaagcttcgtcagcaggcgcttaggcgatacaagtcttttatatctgttgccctttctattgaccatgaaaggaatgagactcctatggcttttttggtccaaaaactgcaaagtgctttgtgttcattggagcgcttccctgttgtgctcagccagtccagcagaataggtattggaggctcccgtttgacttcaggtttgagtgctctagctcagcccttcaagttgcgcctttgtcgaggtcagggtgaaaaatcacttcgggattattcgtcaaatattgtgcttattgatccctttgcgagtctagcagctgttgaagagtttctttggcccagagttcagcgtagtgaggctgcttcgaagcctacagttccatcaggaaataattctgaatctggcatacctggcaccgcagctggtgcgtcatccacagctgcaccagctccatctggcaggcgtccaacaacaagatcaaaatcatctgctgcaagtagtggtgcatctaagaaggattctcaggaggaaagcacaaccctgcccagggaaaggggaaggctgttgcaaa

SEQ ID NO: 48471 - DNA, 203 bp, Oryza sativa
  Clone ID: PAT_MRT4530_51142C.1
caggtgggccccacccgtcagcgagggtggcgggcgggcctgcccgacgtgacaaatccaccccccttacaagaatctcgtccccgagattcgaggatgctagcaagaagatagctgacttcgattgggctgcggcattggaagatgaggcttcagttccagaacttcttataactcatatccttggagtcaacctcatacaa

SEQ ID NO: 48472 - DNA, 135 bp, Oryza sativa
  Clone ID: PAT_MRT4530_51143C.1
tcggtttttgctatgttgacacactgacgaggggtttttagggtagttaggaactacagctcgcacggagcttatttgcgacatggagaagtagatgaagaggttgctccagcgcatcaagaagatcttacaaac

SEQ ID NO: 48473 - DNA, 168 bp, Oryza sativa
  Clone ID: PAT_MRT4530_51144C.1
atggcgatggctaaaggtgtcctcgctgcaagggagcttgtcgagacaaccaaagttgtggtagatggaatgaaagttgagcttcctgaaggccgcaaaggtgcagctgctgtctcgggacgtcctgcgaagcaatcggagaagacaaaacggaacaccagggactga

SEQ ID NO: 48474 - DNA, 449 bp, Oryza sativa
  Clone ID: PAT_MRT4530_51145C.1
cggtattacatcaacgatgtgatcacacatgcaatgtggtacattggtagaataaacagaactaattaaagatcacaacagctccagtaaaaaaatcacaacagcaacaccactgaaggatacggtgatgaagattgatgccaagactaatacgacaatgtagatcaaggtcaatgatccatctatgcatgcacgaatccaacaagcaagacaacgccaataaaacaaatcgacatggagccgacgaagtgctgcatattctcaagtcctccctgtcgacagatatctgtcaccacggccgtctggagaggcattctcatagccatctcgagcaacggcgggagagggtggtgattaagtcggccgcccgtcgcctggacgccgccacccttggcagtaggcggggcacgccgccgctgttgaactgctccatcgaccgccgcagccat

SEQ ID NO: 48475 - DNA, 240 bp, Oryza sativa
  Clone ID: PAT_MRT4530_51146C.1
atgcactctaggaagaagccgtctcccgtcgccgccgccgccgccgtgccactgctgctgatgtgcctgctcttcgccgccaccgccatggctgcatcgccgtcgtcgtcgtcgtcggcggcggcggcggcggcgagcttcgtcgagccgagcgatgcggacacgtactcgacgtgcttcgaggctggaggctgcaacaacaccgggtgcgcgatcagaattgtgaagatcaacgtttga

SEQ ID NO: 48476 - DNA, 437 bp, Oryza sativa
  Clone ID: PAT_MRT4530_51147C.1
atggccgttctgaagatgagatccggagcggccaaaagtgatttttgcaggtggagggcaggatcgcctgcagcccaacgacgattttcgcagtcggggcaatggcccgcctgtgaaaatccgttgagcgagcaaaaaaatttgcgggcgcctcgccgctgccaccacgcgcctcgccgtcttcgtcgccgtccacgccgccgccgctgcgcgtcgccgtcgccgccgccccgcgctgtcatcgcgctgccgcccctgccggcttccccctccctcctccggccagatctgggagggaggggtgggaggggagcctccgcgccgcaccacaccgtcgtcgccgccgccgcctccgccgacctcccccctccctcctccggccagatctgggagggaggggggaggggagccgcctccgccgcctctgccggcctccg

SEQ ID NO: 48477 - DNA, 413 bp, Oryza sativa
  Clone ID: PAT_MRT4530_51148C.1
cagtgataatgtgaagcccaagtatccaggacaaggaggggattcccccagaccagcagcgtctgatcttcgctggcaagcagctggaggatggacgcaccctcgccgactacaacatccagaaggagtccaccctccacctggtgctccgcctccgtggtggtcagtaatcagccaagtctgatgtctacttgtgtctggtttaatggaccatcgagtccgtatgatatgttagttttatgaaacagtttcctgtgggacagcagtatgctttatgaataagttggatttgaacctaaatatgtgctcaatttgctcatttgcatctcattcctgttgatgttttatttgagttgcaagtttgaaaatgctgcatattcttattaaatcgtcaaaaaaaaaaaaaaaaaaaa

SEQ ID NO: 48478 - DNA, 225 bp, Oryza sativa
  Clone ID: PAT_MRT4530_51149C.1
ttccttgtccctgcgcgacgcgagctagggtgtctagactcggcctgaccgacacgctcatccatgtccaaacaggcaagaaaagccaatcccatcagagcgctctaggccgtcagcaaagaatgcaacatgagtgatctgcactgtatgcgcttaaagcaagatcaggacaaagcgctgcacgagcttgctgccatcgcaagacaaacgggtgcactggaaggt

SEQ ID NO: 48479 - DNA, 1317 bp, Oryza sativa
  Clone ID: PAT_MRT4530_5114C.1
cgctcgaaatcaatatttagggtttcttgctttctgaaccctttgtttcagcaccttagagatcaagtcttaatccccgtcgttcacgccgatacccgttacttccttggccctatgggtgatccagaccccacaatattcatcactaccgagacaaatagaatccccttctgagaatcaaaaccaaagttcaaccattggccaaacattttcagatcttggccctcaaaacttgattagtggaaagattggttcaagagggtatcaaccgccaagcgatcatcatggaagaagatagggatagaacagtgccttcaactatccctagccgatatgccaaagagcgagtccatgttatcggccgcgacatatttttggtctaataccattaatgcattcattcttggacatgggccgatgaccccaactctcttagatgtaaaaatgctcacatgcttggatatcacctcatcggccaaccccatcaacttgaagactaaatgtgagcgcaaaatcaatgccaaagtttgtggtggctggttgggatatgttaccagatgcatgggtactggactagtgacaaatgaagaacatattgctttcctcaacctctggttgaaaaggtttatattttgtggcacaactttcaacatctggctcaagctcttcatgaagaaaattcaatcccacttgggaaatttatactaggagcaatatatcagattatgagtcaagcgtcgaccagattactgatgaactcttcagtcaaacatggtggcccttggtggtttgttcagctatggctcaatatttatattgtcaattctatcaaccatcagactcttcaagacttcagattcccatccatcgaggacaatgaggacgacagaccttgtatgtcttttggcgaggctgcctacatgtttgctggctccaacctatcagctgaaccctttgagcattggttcaagcatttctatgatggtttcccaaacgatacagaaatgtggtatgcctatgaaaatttcgaagactttgaatgtccagaggacttgaggatagatgatttgaacaatgagttctatcctgagaacaaaaagaacttcatatcggccctcttaccatgcattcttcctactggagtatcccaaggtcgattcactcagaattcatatgaattctatcatccaatgatagcagcaagacaatttggactaggccaacttcccttgaatctccatttctcaacaaaaatccaggctagagatatagtcagctccgtcatgattctctcctccttgttgcggttgttcactt

SEQ ID NO: 48480 - DNA, 147 bp, Oryza sativa
  Clone ID: PAT_MRT4530_51150C.1
atggcgccctccttctccatccgggagtacgcggcgagcatgaggggcacggcggggttccggcacccggccctctccgccgccggggacttcccgccgatgccaatccggaggttccggtggtgggtcgacgagctacacgccgcg

SEQ ID NO: 48481 - DNA, 2385 bp, Oryza sativa
  Clone ID: PAT_MRT4530_51151C.1
catgtagggcatccccccagaccgcagcgtctcatcttcgccggcaagcagctggaggatggcaggacccttgctgactacaacatccagaaggagtccaccctccaccttgtcctccgcctccgtggtggcatgcagatctttgtcaagacactgaccggcaagaccatcaccctcgaggtggaatcttctgacaccatcgacaacgtcaaggccaagatccaggacaaggagggcattcccccggaccagcagcgtctcatctttgccggcaagcagcttgaggacggcaggacccttgctgactacaacatccagaaggagtcaacgcttcaccttgtcctccgtctcaggggaggcatgcaaatcttcgtgaagactctgaccggcaagaccatcaccctcgaggtggagtcttctgataccatcgacaatgtcaaggccaagatccaggacaaggagggcattcccccggaccagcagcgcctcatctttgctggcaagcagctggaggatggcaggacccttgctgactacaacatccagaaggagtccaccctccaccttgtgctccgccttcgtggtggtatgcagatgctttgtcaagaccctcacaggcaagaccatcaccctggaggttgagagctcggacaccatcgacaacgtcaaggccaagatccaggacaaggagggcatcccccccagaccagcagcgtctcatcttcggccggcaagcagctcgaggatggccgcaccctcgccgactacaacatccagaaggagtctaccctccacctggtgcttcgtctccgtggtggtatgcagatcttcgtgaagaccttgactgggaagaccatcactttggaggttgagagctccgacaccattgataatgtgaaggccaagatccaggacaaggaggggattcccccagaccagcagcgtctgatcttcgctggcaagcagctggaggatggacgcaccctcgccgactacaacatccagaaggagtccaccctccacctggtgctccgcctccgtggtggtcagtaatcagccagtttggtggagctgccgatgtgcctggtcatcccgagcctctgttcgtcaagtatttgtggtgctgatgtctacttgtgtctggtttaatggaccatcgagtccgtatgatatgttagttttatgaaacagtttcctgtgggacagcagtatgctttatgaataagttggatttgaacctaaatatgtgctcaatttgctcatttgcatctcattcctgttgatgttttatttgagttgcaagtttgaaaatgctgcatattcttattaaatccaacttattcataaagcatactgctgtcccacaggaaactgtttcataaaactaacatatcatacggactcgatggtccattaaaccagacacaagtagacatcagcaccacaaatacttgacgaacagaggctcgggatgaccaggcccatcggcaagctccaccaaactggctgattacgtagcacacaccaacggaggcggagcaccaggtggagggtagactccttctggatgttgtagtcggccaagggtgcggccatcctcgagctgcttgccggcgaagatgagacgctgctggtctggggggatgccctccttgtcctggatcttggccttgacgttgtcagatggtgtccgagctctcaacctccagggtgatggtcttgcctgtgagggtcttgacaaagatctgcataccaccacgaaggcggagcacaaggtggagggtggactccttctggatgttgtagtcagcaagggtgcggccatcctccagctgcttgccggcgaagatgagacgctgctggtctggggggatgccctccttgtcctggatcttggccttgacattgtcaatggtgtcagacgactcgacctcgagtttttttttttttttttttttttttttttaatcacttttgagtcacacctcacatgttgctacgtatacgcaaatcatcctccaaattaagcttggagtttgaatcaaactgtttgatgaggaggagggtaatacatcgatcgtgtaggcaagctgacgctctgcgttggagtatatacgtacgtagaattcgaaaggattcttcagcctttcttggcgaagagggcgccgaggttgaagccgccgccgccgccttcctcgtcggcggcgctcgccgcgggcttcttggcgggggccttccgggagacagtggagccggagggcggcgcgccgtcgaccttgttgagcagcgggtcggtctcgacgagctggtccttcttgaagatgaagccgaagatgaagtcggcgaggctcttctcctcctccgccggcgccggcttccccctcg

SEQ ID NO: 48482 - DNA, 1693 bp, Oryza sativa
  Clone ID: PAT_MRT4530_51152C.1
cggacgcgtgggcggacgcgtgggcggacgcgtggcccacgcggccgccggccggggcatcagctccacccccgaaaaatttctccccaatctcgcgaggctctcgtcgtcgaatcgaatcctctcgcgtcctcaagatgcagatctttgtgaagacattgaccggcaagactatcaccctcgaggtggagtcctctgacaccatcgataatgtcaaggctaagatccaagataaggagggcatccccccggaccagcagcgtctcatcttcgctggcaagcagctggaggatggcaggacccttgctgactacaacatccagaaggagtcgacccttcaccttgtcctccgcctccgtggtggcatgcagatctttgtcaagactctgaccggcaagactatcacccttgaggtggagtcttctgacaccatcgacaacgtcaaggccaagatccaggacaaagagggcatccccccagaccagcagcgtctcatcttcgccggcaagcagctggaggatggcaggacccttgctgactacaacatccagaaggagtccaccctccaccttgtcctccgcctccgtggtggcatgcagatctttgtcaagacactgaccggcaagaccatcaccctcgaggtggaatcttctgacaccatcgacaacgtcaaggccaagatccaggacaaggagggcattcccccggaccagcagcgtctcatctttgccggcaagcagcttgaggacggcaggacccttgctgactacaacatccagaaggagtcaacgcttcaccttgtcctccgtctcaggggaggcatgcaaatcttcgtgaagactctgaccggcaagaccatcaccctcgaggtggagtctttctgataccatcgacaatgtcaaggccaagatccaggacaaggagggcattcccccggaccagcagcgcctcatcttttgctgggcaagcagcttggaggatggccaggaccctttgctggacttacaacattccagaaggagttccacccttccaccttgttgcttccggctttcgtggtggtatgcagatctttgtcaagaccctcacaggcaagaccatcaccctggaggttgagagctcggacaccatcgacaacgtcaaggccaagatccaggacaaggagggcatccccccagaccagcagcgtctcatcttcgccggcaagcagctcgaggatggccgcgcgaaaaatttctccccaatctcgcgaggctctcgtcgtcgaatcgaatcctctcgcgtcctcaagatgcagatctttgtgaagacattgaccggcaagactatcaccctcgaggtggagtcctctgacaccatcgataatgtcaaggctaagatccaagataaggagggcatccccccggaccagcagcgtctcatcttcgctggcaagcagctggaggatggcaggacccttgctgactacaacatccagaaggagtcgacccttcaccttgtcctccgcctccgtggtggcatgcagatctttgtcaagactctgaccggcaagactatcacccttgaggtggagtcttctgacaccatcgacaacgtcaaggccaagatccaggacaaagagggcatccccccagaccagcagcgtctcatcttcgccggcaagcagctgggggatggcaggacccttgctgac

SEQ ID NO: 48483 - DNA, 360 bp, Oryza sativa
  Clone ID: PAT_MRT4530_51153C.1
aggcaggcggaacacattactttggatttccaaacggaatctcattacatagatagcatggctgttaggtcaaggttgcaaattaccatccgcaggatatggttactgggatcccagtgcactacttccgctgacaggcctgaagtatatagcaggactgcaggagaacatagctgccatagggagtgagaccggcaggataggacgctagttcggcgatccggattctgtatcattagtatgcctacggcgggtgatcaatatgagcttcagccgccgccaggagcgcatcaaatcttgcagcgcgactcgcgtaggttttcacaggcgccatcttctagcgcgaggttatcttggggt

SEQ ID NO: 48484 - DNA, 468 bp, Oryza sativa
  Clone ID: PAT_MRT4530_51154C.1
atggattatcttcaagattttgattttgtgtttcatttgcacttgatgttgatgatcctggggtatgcaaatgctctgtcactttgtttacaaaggaaagatggaggtatattggaggccatgctagaggtgaaatcaactaaggaaaaatttcaggcgattagagatgatggctgggaatctttattggagaaaatgtattcattttatgatgagcatggaattcttaggctagatatggaagaggagtatattgaccgtcataaaccaaggaaaaagataaatcacactaattaccaacagtatagatgggactgtttgaaccctgttgtggacttgctacttattgagtttaatgatcgctttactgaaacaaattctaatttgcttacttatatggctgctttcaatcctaaggattcttttgctgatttcaaaatgaatagcctcatgcatggaacttgctaa

SEQ ID NO: 48485 - DNA, 143 bp, Oryza sativa
  Clone ID: PAT_MRT4530_51155C.1
ttttcagtaccaagctgcctgagccacaacaaacgacgccttcattcatcgcctccgggcgatggcaactgcaaccgaggaagcagcccgaaaacagtgatgtctccaggggaggcggcgcatgatgaggggacagggctaaa

SEQ ID NO: 48486 - DNA, 1644 bp, Oryza sativa
  Clone ID: PAT_MRT4530_51156C.1
atggggagcttcgcgaggaaggagcaccagttcctcgccgagcttggcctcgcgccgcggaaccccgggtccttcgcctgcggcgcctggggcggctcgggccccgtcgtcacgtccaccaacccgacgaacaaccaggcgcgtctccccccacacgatccgctcggttctaggcgctcgatttggtttgggccgccctggcatttttggggtgtcatcgcggaggtcgtggaggcgtccgcgcgtgagtacgaggagggcatgcgcgcctgctacgatgccgccaagacctggatggcgattccagctccaaagcgaggagaaattgttaggcaaattggtgatgcattgagagcaaagctccatcacctgggcaggcttgtgtcacttgagatggggaaaattcttcctgaagggattggagaggttcaggaaatcattgacatgtgtgattatgctgtgggcctaagtcgccagctaaatgggtccatcataccatctgaacgcccgaatcatatgatgatggaggtgtggaatcctcttggagttgttggtgttatcacagcattcaattttccttgtgctgtgctgggttggaatgcctgcatagctttggtatgtggaaactgtgttgtctggaaaggtgctccaactactccgttgatcactattgcaatgactaaaatagttgccagtgtattggagaggaacaacttgccaggctcaatttttacagcattctgtggtggtgctgacattggccaagcaatttctcttgacacaaggatacccttggtttcattcacaggaagcacaaaggttggtctaatggttcagcagcaagtgaatgcaagatttggcaaatgccttcttgaacttagtgggaacaatgccattattgtaatggatgatgcagacattcagctagctgtccgttcagtgttgtttgctgctgttggaacagcaggacaacgctgcactacatgtcgtaggctgcttcttcacgaaagcatataccgaacatttcttgatcaacttgttgaggtttataaacaagtccgaattggggatcctttggagaatggtacgttactggggccattgcacactcctgcttcaagagacgccttcttgaaaggcatccaaaccatcagatctcaggggggaaaaattctttatggaggatctgcaattgaatctgagggaaactttgttcagccaacaattgtggaaatttcaccctctgcaccggttgtgagagaagaactctttggtcctgttctttatgtgatgaaagttcagaatctgaaggaagcagttgaaatcaacaattctgttcctcaaggattgagcagttctatatttacaaagagaccagatattattttcaagtggattgggcctcatggtagtgactgtggcattgttaatgtaaatattcccacaaatggtgctgaaattggtggagcttttggtggagaaaaagctactggtggtggacgagaagcagggagtgattcgtggaagcagtacatgaggagggccacttggtcctccaacttattcagttgtgtcaccccggtccctaaacaggacggtctaaaaactttatatcaaaaaataattcataactttttcatgtga

SEQ ID NO: 48487 - DNA, 2015 bp, Oryza sativa
  unsure (1)..(2015): unsure at all n locations
  Clone ID: PAT_MRT4530_51157C.1
cctcccccaccccaccccgatcccctccccgccgtacgggcgcagaaggaacccgtcttctagaaggaggaggagggctacctctctctctctctcttctgccatggggagcttcgcgaggaaggagcaccagttcctcgccgagcttggcctcgcgccgcggaaccccgggtccttcgcctgcggcgcctggggcggctcgggccccgtcgtcacgtccaccaacccgacgaacaaccaggtcatcgcggaggtcgtggaggcgtccgcgcgtgagtacgaggagggcatgcgcgcctgctacgatgccgccaagacctggatggcgattccagctccaaagcgaggagaaattgttaggcaaattggtgatgcattgagagcaaagctccatcacctgggcaggcttgtgtcacttgagatggggaaaattcttcctgaagggattggagaggttcaggaaatcattgacatgtgtgattatgctgtgggcctaagtcgccagctaaatgggtccatcataccatctgaacgcccgaatcatatgatgatggaggtgtggaatcctcttggagttgttggtgttatcacagcattcaattttccttgtgctgtgctgggttggaatgcctgcatagctttggtatgtggaaactgtgttgtctggaaaggtgctccaactactccgttgatcactattgcaatgactaaaatagttgccagtgtattggagaggaacaacttgccaggctcaatttttacagcattctgtggtggtgctgacattggccaagcaatttctcttgacacaaggatacccttggtttcattcacaggaagcacaaaggttggtctaatggttcagcagcaagtgaatgcaagatttggcaaatgccttcttgaacttagtgggaacaatgccattattgtaatggatgatgcagacattcagctagctgtccgttcagtgttgtttgctgctgttggaacagcaggacaacgctgcactacatgtcgtaggctgcttcttcacgaaagcatataccgaacatttcttgatcaacttgttgaggtttataaacaagtccgaattggggatcctttggagaatggtacgttactggggccattgcacactcctgcttcaagagacgccttcttgaaaggcatccaaaccatcagatctcagggggggaaaattctttatggaggatctgcaattgaatctgagggaaactttgttcagccaacaattgtggaaatttcaccctctgcaccggttgtgagagaagaactctttggtcctgttctttatgtgatgaaagttcagaatctgaaggaagcagttgaaatcaacaattctgttcctcaaggattgagcagttctatatttacaaagagaccagatattattttcaagtggattgggcctcatggtagtgactgtggcattgttaatgtaaatattcccacaaatggtgctgaaattggtggagcttttggtggagaaaaagctactggtggtggacgagaagcagggagtgattcgtggaagcagtacatgaggagggccacttgtacgatcaactatggaagcgagctgcctctagcacaaggaataaattttggctagttcggtggtcaagatcggctgatgaacatgttaagcttcatcgacagacttcaggaatttctactggcgtcaactgaaaaccgaaacttcaacgcagcagcattgctatgtgtgcatataataagagatgagtccaatattaatgcatgtactgctcttgctatgattagccgtcggagttcgagtccaataaacagggaaaaattgcgtattccctgatcggttgatatgtaccaacatttctgatgtaatctttagaacggtatcggttgaaaacttgaaatgaacgaaaacgcggtaagaatacaaaaaggtgtgcaaaccatcaggctaaaaaaaaaaaaaaaaaaaaaaaaaaaaaaaaaaaaaaaaaanaaaaaaa

SEQ ID NO: 48488 - DNA, 124 bp, Oryza sativa
  Clone ID: PAT_MRT4530_51158C.1
aaaaatacctttatagctagtacgggtgtgataacgtacatgtgggtcgcatgttttaagactcacaaaattacagggcgtactagttggtctaataacaaggaattgaagctaccataggtat

SEQ ID NO: 48489 - DNA, 214 bp, Oryza sativa
  Clone ID: PAT_MRT4530_51159C.1
tcacagccaaggtgtacaaaccgcattataggattgggagtgcatgcgcccgcgcgtgtcaatgggcgtgtagcgtgtaacgtgtagcaaagtagtcgccccacatgtgtagttgtccgtgcaacgtgggtgtgtgtaacctagcgtagtggcgggtagaagtccgtgcggtggaggctccaggagtcccagtaaagctgtggggtagatagta

SEQ ID NO: 48490 - DNA, 267 bp, Oryza sativa
  Clone ID: PAT_MRT4530_5115C.1
atggcctgcaccgtggcaggcggttccactgccgccggccctgtgatgggcggatccatcatagccggtgccatgacgggtggattagatggcaccaacgaaagggtggggaggggtggcaacaagccaacaactaggcaaccacgacgacctaagggatggtgggtccgccggtactggcctcgggaggggcagtccgttgttggagtgtacagtcggatctggtaccgacagcctgacgaagatagggtcacaggggatggctag

SEQ ID NO: 48491 - DNA, 534 bp, Oryza sativa
  unsure (1)..(534): unsure at all n locations
  Clone ID: PAT_MRT4530_51160C.1
ctgaaagatggtaatangcaaggtgatantaagaaaggaaagaagaagtgagtcgtcgacgacgacctntgcatatatncagacaaactccaatagtggaatggctggcaaacatcggtatctncgcttacgtataatagttgggtcaaggatcaaccgatcgagacctaacnacaaatgaatatgtactgttgcttaattgcagttataattaagtattgtaataatttgtcgtcgagctgtatagtatgtaagancaaattagataatgtattgaattctccaagagnaatatagggatatatatagggcttcttgccctagttaattaattaataacgtcataagcttgcggacgtgtgtgttagcgtttgcaataatttgcttgtacgttaaatacatacggatgtactatgtctgacaatattaattagtgtatccagattcgtgtgcgtatgtccaaattatnttaagggagaatttatattaaaaaaaaaaaaaaaaaaaaaaaaaaaaaaaaaaaaaaaaaaaaaa

SEQ ID NO: 48492 - DNA, 225 bp, Oryza sativa
  unsure (1)..(225): unsure at all n locations
  Clone ID: PAT_MRT4530_51161C.1
ttgtttctgccgctgctgaagaaaaacacacatncgtacttattaacaccaactcggcacccaataaggccattaccttccaaaattctcccatccaatggcgctactcctctccgtcttcttctctcacgggccggctttctcgcccgccatcttcacatgccgcccccccgcctgcgggcacttacccaccttgctcagcggccgtgtggcttctcaaaggaa

SEQ ID NO: 48493 - DNA, 566 bp, Oryza sativa
  Clone ID: PAT_MRT4530_51162C.1
aacccaaaattgggaagggggaaaaggaaggaaattttattaaaggggtttaattttaagggggggcacacaaaaggggggaaaccctttttactaaaggacagggaaccaagggtgggtcaacaacacccccaggaaaaaagtgggaagttgaaaggggccatggggcaaatgggggggattgggatggccattttaataattgggggggggccgaggccaaaaaaaaaaaatgggggaaggcttgggataattgggaaacgggggccaaaggggcacgggggcataaggccttggagcgggatgcaaaattggggggggaggagcgccatgggggggaaaaggaaaaggggggggggggtacccaggcccaacggtgggataagggacgggctacccggatccagggggcccaagggtaaggggggggggaaaaaccggataagggggatgggaaaaggggcccttcgaaaaagagcaattaagggaaaaggggcaaaaatctgggggggggagggggccattggggattttcaaaaaaaggggaaaaaaaaatccaaaggggg

SEQ ID NO: 48494 - DNA, 629 bp, Oryza sativa
  Clone ID: PAT_MRT4530_51163C.1
ttttttttttttttttttttttttttttttttttttttttttttgcaagcacaagtaggagtaattagccacaattgttcgtctgaaacaaggtaaacaagagtaaagttgaactagggtagggtacaattggttggcagatctagcaagaactcagcaagcagatccatatccctactactccactaagcttaggtttgtctttcttcatacacaaaaaaaaacatgtcatctgatccgatccgatccgatccgatctgatctgatgagagagaaagtaggggaacaagagaaagggggatggatcaggcggaggcggaggcggcggtgcgggagcggtagagcttgccgaagacgtggagggcagtgacgaagcctatgaagcagagcgacatgacgagcaccatggtgggcgagaggcggaggccgggcgcctcgtcggtgtagaatcgcagcatgttgctcccgccgccaccggagaagcccccggagccgccggcggtggaggcgcggcggcggcgcatgccggcggccgcagcggccgtgccgcgggggccaacggtggcagggcgggcggccccggcggcggcgccgacggaggactgggactgggaggaggagcgagccat

SEQ ID NO: 48495 - DNA, 569 bp, Oryza sativa
  Clone ID: PAT_MRT4530_51164C.1
gcagcgccgccgccgcttcctctccaaccagcagcgccaccacctcctcctgtcccctcctccatctcccccacatcatccacgatgtattgcccccggtggttcatccatgtggcccatcccacatgaatccaccatctccacgcccccaaggtggttcctgcagggaggtcgcatttggctgcgattcatcaccaagagcacgacctcatcgctcctagggagccacctgcatctgtgctcaccagatctgcttcacctgaggttctgggcaccgtcgtcccttcttgaagctcaagacgacgtttctttgtccactgcaatcaacaacacaagatctatcttcagtagttatggtggaatttgcttaattcttgtctacttgacctccctgacatatttagctagaaggtcttgctgagtaatcggagacaccaacaaggttggcagcaaaccagaacaaattaacaagcaaacgcacaactaaaagcgtgtagtttccgtcgtttcggaagtccgcggtcgcgaggaaaagagttcggtagtatgttttgaagaagcaagctctg

SEQ ID NO: 48496 - DNA, 822 bp, Oryza sativa
  unsure (1)..(822): unsure at all n locations
  Clone ID: PAT_MRT4530_51165C.1
gctatgataagaaaattagatggaaggtttagtaattaaggattgacatagctttgctcagaattttgtcatgggctggctcnatatgatccgcatgtctttagtaagactgagcatgctatacagtgggcatacatatataatgttttacaacctgtttctctgcaggtccttggtgacaaagcttttgagaaatttgggaaatggttcatctcacttcatttttcagatcaactggcaggctcttacaagaaagtcctttctttcaagtttgtactgccagatgcaagcaacatggctgagatgacaagattagttgctctcgtgccatactacattgatttggtggggcgttacaagctcagcaaccatgctcgttccaaaactgaagctgcaagaacaaaagcttcccaggaggctttcagggagcaacagggtctaaggcaggaagcccttcaaaggaagaaggctgagaagaaaaaacttatggaagaggcagaggccaaattgagcgccgaggcactccgcaagaaagaggaaaaagaaagggctcgtcagatgaagaagtccatgcccaaaactcttttatgttcttctgggccatcaacttttctttgccatggggggatacaagcgaaaggaaataggctggaatggcgtcaagtttgatttgcccccacgatcgttcattttagttcatctgaatgttgttatgcagcagctcgtttgtaagagaactccatgacttgctgtgtaatgcgtttatagatacgctgccagaaactcaagactagatcacataatttgagttgatttatgagt

SEQ ID NO: 48497 - DNA, 666 bp, Oryza sativa
  Clone ID: PAT_MRT4530_51166C.1
atgagcctctcgggatcatgggatgtgatgcgtagtactccgggaactggaaggacgatcagcgacgccggaatcccacgggcaaacccgcatagcagaggcgtcatgtctgacggcggagcttcggccagcgaacggggacagaggcgcgaggactgcgggtttcccccggcacgttttatgggttcatggagcgtgggcggacactgggacagtgacagcggtcgtcggctgcagaaaactgtgaattacttgaggccttgtggtgtggggaatgatattgcctgttttgacgggaacctaacggagaccgaggagaatagagatccactcgtgagctttggggagaaagcgaaaaggggaggagaggcgcctggggagcggcgtgagcggcgacatccaaggcggcgtcgggcgccggggaagagcggcgacatccacggcggcgccgagcgccggggaagagtggcgtgggcggcggcggtggtcgctgcctcgctgggggagaacggcgcgggcggcggcatccgcggccgcgttgagcgttgggggagaccgggagagtggcgcgggtggcggctctgcctcactgggggagagtggcgcgggcaggacacgatggctcgcgagccgactcaagctggctcgttatctctaacgagctga

SEQ ID NO: 48498 - DNA, 2041 bp, Oryza sativa
  Clone ID: PAT_MRT4530_51167C.1
ggcggtgcccgcccccacggtcatccgcgcccccccccgcctcctgccctcgccgcccgagccgggggccccccggtagctctcccttttcgcaaatcgcagccggccgccgctgtagtagcaaacatctccttcgtcttccctacgcgtccacccgaaaaagaaaaaaaaaaagaacaggagaattatccccacttccagagtccaaacctccccgtccatggcgacggcgagctcgatccggccgccacgcgcggcgctagtcctcctcctgctcgcgctgtccttctccctcaccctcgccgcccacttcgagggctttggctccgacgacctccactccgcccacgccgacgcggcctcggcagacgacgaagacgacgaggggctcgacgtcgagctcccgccgccgccgcgcatctccctctccacttcaactccttcccctcccgtcaccaccaccaccaccaccacctccgctccaaaccctaaccccgatcccaacccgacgctgaccccgccgaaccccaccccgacgctcgatctctgggacgaggacgagttcgagggcatccctgtcccggaagcggcctcctccgacgaatcctccacgccggcggaagccgccccgtcagaacccgcggccgatgccgcggccgaggcggcgccagccccgccccggcggcccgcggagctgctccgcgcgtacaccgtcgagatcgcgtgcgtcagcttcctgatctgcttcctgctcaactacttcaccgggaagcggcagaacgaggcgatcgcgctcgcctgggccaccaggttcgccaccagggactccatcttcgacaagaacttcagcctcctcggcaccggcgacggcaaggacacgccgctcctgatgaaggaagggcaggacgtgttcaagttctacgcgagcgggaggcggtactgccaggggatgctcgccaccatggagatgcgcgcgcggcacgacctgctgtccaagctggtggagctggtgttccccaggaaggacaccatcacgttcgaggtggtgatgaacgaggaagccatggaccacgtcatgttggccgtggcgaggaagaaggcggccaagacgatgcagaaggaggagagggatctgcagaaatttgccggggttctgacctcggcacccgccgggaggagatgggttgcggatgagcttgcggtagtggccgagtcaaaggaggttgctggggatatgattactgaagccgtgctggaccaggtccttggtgacaaagcttttgagaaatttgggaaatggttcatctcacttcatttttcagatcaactggcaggctcttacaagaaagtcctttctttcaagtttgtactgccagatgcaagcaacatggctgagatgacaagattagttgctctcgtgccatactacattgatttggtggggcgttacaagctcagcaaccatgctcgttccaaaactgaagctgcaagaacaaaagcttcccaggaggctttcagggagcaacagggtctaaggcaggaagcccttcaaaggaagaaggctgagaagaaaaaacttatggaagaggcagaggccaaattgagcgccgaggcactccgcaagaaagaggaaaaagaaagggctcgtcagatgaagaagtccatgcccaaagttaaaatgctccgttcctagtaacatcaaagatatatcacagcactggctttagctattcagttgctgattagcttattgttgcctgccagactcttttatgttcttctgggccatcaacttttctttgccatggggggatacaagcgaaaggaaataggctggaatggcgtcaagtttgatttgcccccacgatcgttcattttagttcatctgaatgttgttatgcagcagctcgtttgtaagagaactccatgacttgctgtgtaatgcgtttatagatacgctgccagaaactcaagactagatcacataatttgagttgatttatgagtaaatctcatctatgcatgtaaaaaaaaaaaaaaa

SEQ ID NO: 48499 - DNA, 2229 bp, Oryza sativa
  Clone ID: PAT_MRT4530_51168C.1
tcactgcatcatcgatctcgcagcatcaatgcaggcagaggcagcgtctggtacgcttttgttccagtgctcaggatcatcgtcgtcgtcagccatggctccatctctcatgcccatgcacttggcgtggagaatccacgagccccataagctgataaaagcagtggcttggcttggcttcattgattctttcttgcagaatcttgccaggacaggatggatggccggcctctgctgtccttgaaatcgtttttggacttttttatgcggaaatggagaacattgtagtacatgttgcttgccttgagtggaaacctgaaagtgtctgcgtcgcctgatgatccgtttgtactctctgattctctgctctgcttctgtggatgattccgtttcatgatgttgatacccaatgcagagcacatcaaacaacacacggtattttctttgctcatctgaaaacaccaggtgcaccatataatgcttcttctgaaaagggaacttgtcaaatgcgtgcaaccatgacacacgttttgcgtgagaacctcctgagtccttgtgaagcatgtgagttcttgaaggtattgaccaccagtaacacaagtagttgttgttgacaaagtgacaccaccagtaatcttttggaaattttccctgcttttcatactgcaaacaacttatctgcataggaaagttgagctgactgcacactctctccttgaaataaggcctcttacaaagtctttgcaggtcatattcagattgaagatccctctgtaatttagcaaaccatgtggcagactcctccatcgacatggacctacactagcttgctgtactagccgccgactccggcctcctcaactcagctagatgttcatcagttgatatgttcagtgtaagccttagattagtcaacaaagcctcctgctcccagctaattgacccacaaacatacaatgccaacattgttgcacgataagcatgcaactccagcaaatgggtatcttcctttggtataatcttatcatgttgagatgtttctctttcagatacggcagcttcagcaccatcagttctactacagatatcaccagtttggtaggctgagtaaaagtgtcgtgaactacagggactactgcttggactacaactaccaacagaggatgagatactctcggtgtcactaggataagcacttgttaaaggacggaatttattttcagtatccacatttaccccagccaagttagttgtatgaacaccattttttctcttatttaaggaagcatgcatgtatttttcacccagcattaagcatggggaatcaacagcatctaccttttcagccaaacgaggagaaactccagcaaccagcgctgcgtgccttccatctctatggggtgtctgtaatctcttcatgcctctagtcacttcactgcactgggttgggtgtgtaatagcagatgattttctcttcatgcctctagacttatcaccctccaaagctttttggttcttcagtagaagattgttgtccattgcacaatatggctgcctttgcttgccaaaattgcttccaagatttccagattttggttgacctctgaatgaaccaccgaagcactttgtagaatccttctgaagaacagtccatttgccatctttccaatgcttcctcaaccgaagttccgacgcatgtgttctcagctccagcgaagatccgaggagcctgacgagatagaaatccttgccaagcactctcaccatctcagcaatcttccatgagtagctatcaaaggcctcaaggatgtcgcccacagcccagcatactgaatcgtctcgaggggggcaaggccttatcaaccttctctgcaccctctcgacagcggcgcaagagtcaactggagaaggatcatatctcacatagaagctctgcccattgcctaatacaatctcagcacccctccaagaacctaggggcacctccgcttcctgcaacacctccaccttgctccctttgaccaacttcatcaacctgtttcctttccaaaacatgcgagctgcgatcccggcagcggccgagaggggcgacgagaaatcgccgcgagaactccctctcctcgcgctgtggattgggcgagggcaacaaaaattcgtgaagcgaaacgaggaaatcttttgctgctgctaatgcggtgtgatttcttctctctctttttttctctctct

SEQ ID NO: 48500 - DNA, 310 bp, Oryza sativa
  unsure (1)..(310): unsure at all n locations
  Clone ID: PAT_MRT4530_51169C.1
cggacggtggnctgacgngcgtcgtgttcccgccggtggcccgcccgccgggctccggccangnccacttcctcgccggcgcaggtttgtttgtgtttgcgttgtgtgttccgtgtcagtggagaagtggaaatgccgtgcaagcgaacttgcttgctggtttgatcgatccgtcgtgcaggtgtgaggggagtggagatcgccggcaacttcatcaagttcacggccatcggcgtgtacctggaggagggcgcggccgtgccggcgctggccaagaagtgggccggcaagtccgncgacgagctcgtcg

SEQ ID NO: 48501 - DNA, 1167 bp, Oryza sativa
  Clone ID: PAT_MRT4530_5116C.1
atgactccaaaccgggttaccagctcaacagggggagaagaagagttattagctaagataaagtacagcgcggcgagatcgacggcaagttggggcaccaagtgtcacgaccgcgccgcaacggatcccatcgcacttggtcgggcccgacgcgtgtgccagaatcacgtgttaacttccttaaacccggcattagcgcgggcactctccttcagcggcctggaggcattgtcgccagccacctacaagctagtggagggagcggaggcacaagatgggaggagagtgcgactccaagagcacagaccgaattctttaacgggaatgctacgggacgggatactgtcccccaacgggatgctcctcctccacaacacgattctcacccatgcgacgcggccgaagccctcaacgcgcaccaggcctgctcacccgccgccgcggccgtccctcgccgccatcgtcgtccccccccaccaccgccgcgcccatcccccaccgccgccgtcgccgttccccgccgccgccgcgccgtcccgtgccgtcctcgtctacaggggacggctacaggggggtgaccagatccgtgccgtgtccggccagatctggcaggggggtggccggcggcgggggctgacggtggtggtggcggtgctggtggcggttgtggcagcgacgacgctggtggcggatatggcggcgaaggagatggcgacgacggcagcgggccgcggcgcgtgtcgcgacgccggccgggctcgtcaaggacctcgccgccacgacctccggcatgccgccctcgtcgacgctccctccatgacgctgatgacccgcgctgcgcactgcacctccagatccgcgccacccaggccggatctggccggctggcggcggtggcggatggcgacggtggcggctagcgatggtggcgccagtggtggtgatggttggcaggccatcacgaccgaaggggctgacatggacgacctcgctctttgtttgattttgctaggtggagtcggagctgcttcgtcggggtctttcattggacgcaccggcgacggctttccccatgtggtgttcgccggggagagtgtggagtgtggtatggtcgaagcgtacaggccggtacatgggactgatggtcccatggctatggaggtctag

SEQ ID NO: 48502 - DNA, 2616 bp, Oryza sativa
  Clone ID: PAT_MRT4530_51170C.1
ccgggccgccggctccagcccccaggcccgccgcgcctccccgtcgcttgccgccccccgcggcggtcgccgcccgcgcggggcttcgccggtgtcccgtcctcgtttggaattaattaagcaatacttaatatgggcaagtcaagcaagaaatctgctgttgaagttgcacctacctctgtctcagtctcagaggggaaatctgggaagaagggaaagagaaatgcagaagatgagattgagaaagctgtgagtgccaagaaacaaaagactgtacgtgagaaggttgtgccctcaaaggaggaagccaaaaaagtgaagaagcagcccccaccgaagaaggttgagagcagcagttctgaggaggattcttcagaatctgaagaggaggtaaaggcccaaccaaagaagactgtccaaccgaagaaggctgcacaacctgctaaagaggagtcaagtgatgatagcagtgatgatagctcctcagatgatgagcctgcaaaaaaacctgttgctcgtccaaataaggctgcactttctaccaacagtagcagcagtgatgatagcagtgatgagagtttatcagatgatgaacctgtgaaaaagcctgctgcccctttgaagaagccagttgcacttgctaccaatggatcaaaaaaggttgagacagacagcagcagctctgatagcagctctgatgaggagtctgatgaggatgaacgcctgccagcaaccaaaatcaagctaccgggtcaaagactctttcagttggaaatttaccatacaatgtggagcaataacgactgaagcgttgtttccaggaggcaggtgaagttgttgatattcgcttcagtacctttgaagatgggaacttcaggggctttggacatggtgaatgagccacagcggaaggctgaggagaaggcacttgaacttgctggccatgacgtggtgggacggaaggtcgagcaagaccgggctcgtgagagcggcgcgtatactcctggcagcgggagggacaatagagcattcaatactcctgctgcaagctcaggaaacactatatttattaaaggctttgatacttctcttgacatacaccagagttctgatgagagttctgaggaaagtggtgatgaacctccgcaaaagaagattaaggattctacaacttctggtactaccaagccttcccctaaggctaccaagaaagaaatcagcagtgatgacgaaagtgatgaagatgacagttctgatgaaagctctgatgaggatgttaagcaaaaacaaactcaagctaagaggcccgataacaacagagagggtggcttcagcggtggaagagactttaacagcagtgggagaggaggaagacgtgatgaaccagcaaaaactccccaaaagaagatttatgttagtaaaagcttctttatccttcaggaaactgctgtgtctgttggttcgaataagtctgcgacaaaaccgggacaagaggaaccaaaaacgcctgccagcaaccaaaatcaagctaccgggtcaaagactctttttgttggaaatttaccatacaatgtggagcaagaacaagtgaagcaatttttccaggaggcaggtgaagttgttgatattcgtttcagtacctttgaagatgggaacttcaggggctttggacatgttgaatttgccacagcggaagctgctaagaaggcacttgaacttgctggtcatgacctgatgggacggccggtcaggcttgacctggctcgtgagagaggcgcgtatactcctggcagcgggagggacaatagttctttcaagaagcctgctcaaagctcaggaaacactatatttattaaaggctttgatacttctcttgacatacaccagatccggaattcacttgaagaacattttggctcgtgtggagagattacacgggtttcaattccaaaggattatgaaaccggtgcaagcaaagggatggcgtacatggattttgcggacaacggttccttgtcgaaagcatacgaactgaatggatctgacctcggtggatacagcttgtatgttgatgaagcgaggcctaggcccgataacaacagagagggtggcttcagcggtggaagagactttaacagcagtgggagaggaggaagacgtggtggacgtggtgatggtagccgtgggcgcggtgaccgtggacgtggtagaggctttggtaggggtgacaggggccatggtggacggggtacaccgttcaagcagagcgctggtacacctagtgcaggaaagaagacaacattcggtgacgacgactagacgaacaatttgagccgattttgttctagtactgtagtaatctccatcccccctaatatatgcgattctagtgagccgtgaattggctacctccggactgttacattctagccgtgttatgtactttgttggcagttgggaccgtgttggtaaatttgcccgacagatttggcaattttggaacctcttgacttcgtaatcattcttatcataatatagtgctttgtggcttaatggcactgttaactgcttccgaaacttaaaagttccgcaatgatggatccttgaattcttcgt

SEQ ID NO: 48503 - DNA, 16311 bp, Oryza sativa
  Clone ID: PAT_MRT4530_51171C.1
atggctcaactattggtaactgatgtgccagtagttgatggtattatggacattgaaaattatgcacctgacatggtgtatgtggaacctgagaaggaaaaacatgaggagcagaatgtgttgtcgatgccagaggccaaaatcaccaagttggaagaaggtaaacatacgaaagctggagaaggaaatgagtttcatcaagaggagctagaatactcagcagagaatccaataacagcggggtcaattgaggtgagtgatttagccttaagttcaattcaatctattcaatgtgaagagagtgatcaattgaaattactgagaacttatgtggaaagcgatggcatgacaatagttaggtggtcaatgagggaaaactattttctttctttgttattacttctttccatcttagcatattttcctatttactcaaccctactttaatttattttcttcggaggatgtgtggagttcattcagtttatattgtgctgccaatgtaaaattgtagtgcttttgttgtaatataagcttttcttaaagcttgtcgatcatgatgaattagtagtcccaggtaacgataaggaacatgatgcattatatgtagtagagcctagtgctagcttgttggatgatgaaggaactaattttgtagaagatgataagttggcacatgctaagctggagtcattgctgaaaaatgtaagtgaaaacagggtggagtccctagtgcaagcagaggccaatacaaatgaaactgagttgctagaaccagatatgaagagcaatgctgacctaaaggcaatacggattgtcaaattcaaagaaagtgatgatatgaaattatgcaaagaagattgcattagtgattgttttgcaatggaagaagatgacatgataaaagcgacatcaacagtaaatgacaatggggtaagtgttgtaattcatgaagctaaagatgataacaaaaatgtctttgaagatcatggaatgatagaggataaaacttacattgtgcctcaaaagtactttgagccagaaaagttttctatagaatttaaaaatttgaatggtgaagtagaggaggacaagcaaaaggaaatacttgtgctacaggataaaagcaacatgatgcaagataagaaagatcaaaacaatttggagcagacaaactcaaatggaggtgaggaggaattgcaagtgaaagataaggatttagtggcattggaggtggaggaaagtgagcttaaagttacagggttagttgcagtgagtgatattgagttaagaacaactgaagctattcgatgtgaagagagtgaccgagtgaaattgacgagagatgatttggaaagcgattgttcggctgtgcatacagacaaggtgctaagagatgcatctctgggaaagaactttgaggaaagtggtgcaaacctagcagctgcagacgatgacaaaaatcatatagtggattgggggatgaaagaagaaaactctataagtttgcaagtagagacgattgaggataaaactaactttatgccagaaaagttcagtgagctagaaaaggtttatacaggatgtgaaaagttaaataacaaaaaagaagagcaggaggaaaatgacaaaattaatacactaaaagatgagaaagaccataatacttttgagcacacagattctatcaaaggagaggtgcaattgccggataaagataagaatttagtgacattagaggcagagggaagtgtgcttgaagttatgcattcagtttcactgaggtatgctgagttaaggtcaattgaaactcttcaaggtgaagagggtgatggggtcaaatcaatggatgattttttgaaaagtgattgcatgatagtacaagcaaatgtgcacaatgagctatcaactccaacgaatgttgatgttgaggaagttgacctacaagatgatgagacattctatataggagagcccaaagctgttaaattggaagatgtgaacgaaaccaacattgaagaggatgataagatggttcttgaggaggttgagtcaccgataaaaaatgacaataagacggttcttgtggaggtggagtcaccagtgaaaaatgtttgtttggaaacattagaaactgagagagacattttgtcagaagatgagaaagagatggaagttggacatgttaatgaatgcagtgaaattgaggtgggattaatggtaaaagaagttgtcaacaaaattgaattagaggaggctgactcagaaacaaagagcaatgttgacaaaaaacccattcaaattcttcaatttgaacatatggatgaagcagaatttggtgccgatgattcgaaaagtaactatttggccgtgaatgcagacaatgtgcaaagagatgcatctctaagaaagaacattgaggaaagtagtgcaagcctagatggtgcagatgatgaaaaaaatgatatggcatattgcgggatgaaagaagcaaacactatgagcttgcatgtagagacgatggaggagaaaactaattttacgcctgaaaagtctagtgtgccaggaaagaattatacagaatttgaaaagctcaatgacgaaggagaagaggaggagcaaaatgacaaaatcgttacactaaaagatgagaaagaccataacacttttgagcacacatactcaataggaggagaggtggaattgttggtgaaagatgagaatttagtgatgttggaagcagagcgaagtgtgcctgaagttatggatataattgcagtgagtgatgctgagctaaggttaatagaacatcctcactgtgaagtgactgatgcagtgaaatcggcgggagattattcggaaagtgattacatgatattagaaggtaatctgcacaatgagccgtcaactccaacagatgtcggggttgagactgtagacctacaagatgagacgttctatataggagagcccaaagcaactaaattggaagatgaggatgaacccaatactgaaaaaaatgataagatggttgttggggaggtggagacaccgatgaaaaatgttagtttggaatcattggaaactacggaaaatattacttcagaagatgagaacgaaataaaagctggacatctttgtgaatccagcgaaaatgatatcaggtttccggagaaagaagataccaacaagattgatttagaggtggctgattcagttatggagggctatgatgaccaaaagccaattaaaattcttcaatgggaacatatggaggaagcagaatatagcactgctgattcaaaaagtgaccttttgaccatgtatgcagacaaggtgcaaagagatgcatcccggggaatgaatgttgaggaaagtggtgcaagcctagaaggtgtagacggtggaaaaaatgatgtggcaaattggggggtgaaagaaggaaataatttaattttgcaagtagaaacaatggaagaagaaattaactttatgtctgaaaagttcagtgatcctaaaaagttttatacaagatttgaaaaagaaaatgacaaaatagaagagcaagaggaaaacgacaaaagtagcacactaaatgataagaaagacgagaacactttagagcacaccgactcagtcggaggagatgtgaaattgcttgtgaaagacgagagtttggtgacattggaggcaaaggcaagtgctcttgaagttatggatttagttttggttagtgatgttgagttaagttcaaatgaaactcttcaatgtgaagagagtgacggagctaaatcgacaggagattatttggaggatgagccatcaactccaacagatgttaaggttgaggaagtcaacctacaagatgagacattctatataaaagagcccaaagttgctaaactagaagatgagatggaaaccaatactgaagaaaaggataagataattgttgtggaggtggagtcaccagtaaaacatttaaatttggaaactggggaaaatattaaattagaagacgagaaagagatggaagttggacatcttaataaatctagaggaaatgagatggagttcctagtgaaagaagatgctaaaataactgaattagcacaaaccaacttagatataaagaacaatgctgaccaaagggccattcaaaatattcaatgtataaatatggatgaagcagaatttgttactgatgatttgaaaagtgactgtttggctatgcatgcagacaatgtgcaaagagatgcatccctgacaaagaacattgaggaaagtagtgcaagcctagaaggcgcagatgatgaaaaaaataatatggcagattgcaggatggaagtaggaaacactatgagtttgcaagtagtgacaatgaaggagaaaactaactttatgcttgaaaattctagtgtgcaagaaaatgataatacaggatttgaaacgcttaatgacaaaagagaggagcaggtgaaaaatatcaaacttaatccactaaaagatgagaataaccataatacttttgagcacacatacataattgaaggaaatgtggaattgcatgtgaaagatgaaaaattagtgacattggagacagagggaagtgagcttgaagttatggatacagttttagtgagtgatgctgagttaaggttaatggaacctcctcaatgtgaagagattgatgcaatgaaatcgacgggagatttttcggaaagtcattgcttgatattagaagctaatgtgcgcaatgagccgtcaacttcaacagatgatgtggttgaggctgctgacctacaagatgagaccttttatatagaagagcccaaagaagctaaattggcagatgaaaacaataagatggtaactgtggagatggagtcactagtgaaaaatctaagtttggaattattggaaagtgagaaaaatgttatgttagaatatgagaaagagatgaaagttggacatgttggtcaatccgatgaaaatgatgtgggattacttgtggaagaagatgccaagaaaattaagttagaggaggctgactcagatataaagagcaatgttgacaaaaaggcctttcaaattcttcaatgcgaatatatggatgaagcaaaatttggcactgttgattcgaaaagtaattatttggccgtgcatgaagataatgttcaaagagaagcatccctgacaaacaacgttcaggaaagtagtgcaagcctagatagtgcagacgatgaaaaaaatgatatagcagattgcgggatgaaagaaagaaacactatgagtttgcaagtagggatgatggaggagaatactaactttatacaagtacagtctagtggactagaaaaggattgtacaagatttgaaaagttgaatgataaaagagaagaagaagagaaaaatgagaaaactaatacacttaaagaagaaaaagaccataacacttttgagcacacatactcaattggagaaggggtggaactgctggtgaaacatgagaatttagtgactttggaggcagagggaagtgtgcttgaagttatggatacaattttagttagtcatgccaagttaaggttaatggaacctcctcaatgtgaagagattgatgcaatgaaatcgacgggcgattatttggaaagttattgcactatattagaagctaatgtgcagaataagtcgtcaactccaacaaattttgaggttgaggttactgacctacaagatgagacgctctatagaggagagcccaaagcatctaaattggaagaccatagtgaacccaatactgaagaaaatgataagatggttgttgtggaggtggagtcaccgctgaaaaatgtacgtttgggatcaatggaaactagggaatatattactttagaagagaaagagatggatgttgggcatcttggtgcatccagtggaaatgatttccagtttctagagaaagaagatactcacaaaattgaattagtggaggctgattcaagtataatgtgcaatgatgaccaaaagccaattaaaaaacttcaatgggaacatatggaggaagccaaacttggcaccactgagagaagtgcgctcgaagttatgaattcagttttggggagtgatgttgagttaagttcaattgaaactcttcaatgtgaagagagtgaccgagctaaattaacgagagattatttagaatgtgattgcgtgatagtagaagctaatgtgcaagatgagccatcaactccaacagatgttgaggatgaggaagttgacctacaagatgagacgtcctatataggagagttcaaagatgctaaactggaagatgagaaggaaactattagtgaagaaatcaataagatggttgctgtggaggtagagtcatcggtaaacaaattatgtttggaaactacggaaaacattacattagaagacgagaaacagatgggagttggacatcttgataaatccagtggagatgaggtgttctcggtgaaagaacttaccaaaaaaagtgaattagtgcatgccaacttggatataaataacaattctgagcaaaaggccattcaaaatcttcaatgcataaaaattgatgaagcagaacttgttgccgttgattcgaaaagtgactgtttggccgtgcatgcaggcaatgtggaagtagatgcatccatgacaaagaacattgaggaaagtggtgcatgcctagaaggtgcagacaattcaaaaaatgatgtggtagatttcaggatgaaagaaggaaacaatatgagttcccaaggtgagacgatggaggagaaaactaactttatgcttgaaaagtatagtgtttcagaaaaagatctgaaaagatctgaaaagctcaatgacgtagaagaagagcaggaggaaaatgacaaaactagcacacttaaagaagagaaagaccataatacttttgagcacgcatactcaatcagaggagaggtgggattgctgatgaaagatgtgactttagtgactttggaggtagagggaagtgcactcaatattctagattcagctttagtgagtgatgatgcgttaaggttaatggaaactcctcaatgtgaacagagtgaaggagtgaaatcgacaggaaattatttggaaagtaattgcgtgacagaagaagctaatgtggacaataagccatcaactccaatagatgttgaggttgaggttactaacctacaagatcagatgctatgtataggagagcctaaagcagctaaattggaagaccagaatgaacccaatactaaagaaaacaataagatggttggtgtggtagttgactcaccagagaaacatacaagtttggaaacattggaaactagggaacatgttacttcagaagatgaggaagagatagatgttggacatcttggtgaatccagtggaaatgatacagggtttctagacaaagaagatactaataaaattgaattacaagaggccgattcaggtatacagtgcaacgatgaccaaaagccaattaaaattcttctatgggaacatatggaggaagccgaacttggcaccgctgagggaagtacgcttgaagttacggattcagttttggtgagtgatgttgagttaagttcaattgaaactgttcaatgtgaagagagtgacggatctaaatcgacagaagattattttgaaagtgattgtatgatggaacaagctaatgtgcaggatgaatcttcaactccaacatatgtcgaggttgaggaagttgacctaccagatgagacgagctacataggagatcccaattctgctaaactggaagatgagaagcaaaccgttactgaagaaaacgataagatggttattgtgaaggtggagtcatcggtaaaaaatttgagtttggaagttgcggaaaacattacattagaagacgagaaagagatggaagttggaaatcttggtaaatccagtggagatgaggtgtttccggtgaaagaagatgccaacataactgaattagcgcaagccggctcggatataaagaaaaaatctgggcaaaaggccattcaaaatcttcaacgcatagaaatggatgaagcagaatttgttactgtagattcaaaaagtgactgtttggatctgaattctggcagtgtgcaaatagatgcatccctgacagagaacattgaggaaagtgttgcaagcctagaaggtgcagacaatgcaaaaaatgttgtggtaggttgctggatgaaagaaggaaatactatgagtatgcaagtagagatgatggagaaaactaactttatgcatgaaaagtccagtgtgccagaaaacatttatacaatatttgaacagatgaatgatgaaggaggagaggaggaggcaaaagaaaaaactaacacactaaaagatgtgaaagaccattatacgtttgatcacacaaactcgatcggaggagagatggaattgcttgtgaaagatgagaatttagtgacattgggagcagagggaagcgcgcttgattttctggattcagttttgatgagtgatactgagttaaggtttgttgaacctcttcaatatgaagagagtgatggagtggaattgacgggagattactcaaaaattgattgcgtaatagtagatgctaatgtgcataatgagccgtcaactccaatagatgtggaggttgaagctactgacctacaagatgagacattctatattggacaccccaaagttgctaaattggaagacgagaatgaaaccaatactaaagaaaacaataagatggttggtgtggaggttgactcaccgttgaaaaatataagtttggaaacaatgcaaactaggaaaaatgttatattagaagatgaagaagagatagaagttgatcatcttattgaatctagtggaaatgaggtggggttcatcggaggagaggtagacttgttggtggaagatgggaatttagtgacattaggggcagaggaaagtgcgcttgaagttatggattcagtttcggtgagttatgctgagttaaggtcaattaaaacttttcgatgtgaagagagtgatggggtcaaatcgacaaaagattatttagaaagtgattgcatgatagtaccatctgatgtgcactatgagctttcatctccaaggaatgtggaggttgaggcagttgacctacgagatgagacattctatataggagagaccaaagctgcaaaactggaagaaaagaatgaaaccaacactaaagaagacgataagatggtccttgtggaggtggagtcgccggtgaaaaacgaagataagacggatcttgtggagctagagtcatttgtgaaaaacgtaagtttagaaacatttggaacagaggaaaatactatgtcagaatatgtgaaagagatggaagttgaacattttgatgaatccaatgaaaatgatctaggattccttgtgaaagaagatgcccaaaatattgagttagaggagatcaactcggataaaaagagcaatgctgacaaaatgagcattcaaattcttcaattggaacatattgatgaaacagaatttggcactgatgagtcaaaaagtgattgtttgtccgtgcatttaggcaagctgcaaagagattcatccgggagaaataatgttgaggaaagtggtgcaagcctagacagtgcaaacgatgaaaaaattgatatggcagatcacgggatgaaagaaggaaacgttgtgagtttacaagtagacatgatggaggtgaaaactaactttatgcctaaaaagtgtactgtgccagaaaaggattatacaggatttgaaaaccttaatgatgaaggagaagagcaggaggaaaatgacaaaagtaacacactaaaagatgagaaacaccataatacttttgagctcaaagactcagccggagaagaggtggaattgcgtgtgaaaggtgagaatttagtgacattggtaacagagggaagtgcgcttgaagttatggattcaattttggtaagtggtgttaagttaaggttaatagaacctcttcaatgtgaagagagtgatggagtggaattgatggaagattattcggaaagtgattgcatgatagaaaatgctaatgtgaacaatgagtcgtcaactccaatagatgttgaggttgagactgctgatatacaagatgaaacgttctatataggagagcccaaaacatcgaaattggaggaagggaataaaaccaatacggaagaaaacgataaaattgttgttgtggaggtggagccaccagtgaacaatttaagttcagaaacactggaaactagggagaatattacgacaaaagatgaggaagagatggaagttgggcatcttaatgaatctagtggaattgaggtagggttcctcgtgaaggaagataccaacaaaataaaattattggaggccgactcaaatataaagagcaatgctgacaaaaaagacattcaaattcttcaatatgaacatacggacgagtcagaatttggcactaatgatccgaaaagtgacagtttgttcgttcatgtagacatggtgcaaagagatgcatccctaggaacgaacattgaagaatgtggtgcaagcctagaagctgcagacaatgagaaaaaggatatggcggattgtgggatgaaagaaggaaacactacaagtttgcaagtagagacgatggaagagaaaactaaccttatttctaaaaagtccagtgtgccagaaaaagtttatacaggatttgagaagctaaatgatgaagcaaaagaacaggagggaaacaatagaagtaatacactagaacatggtaaagataataatacgtttgagcacacgaactcaatcagaggagaggtggaatggctggaaaaagataataatttagtgacattattgacagagggaagtgcgcttgaagttatggattcagtttcggtaagtgatgatgagttagggtcaattgaaactcttaaatgcgaagagagtgatggggttaaaatgacgagagattatttggaaagtgattgcttgcaagtggaagcaactttgaaaaatgaggcatcaactcccacgaatgttgaagttgagactgtcgacctacaacatgataaattctataaaagagagcccatagctactaagttggaagatgagaatgaaaccatcgttgatgaaaatacggtttttacagaggaggggataccgatggaaaatgtaagtttaaaaacaattgaaacaggagaaatcattatgtcagaagataaggaagacaataaagttggacatgttgaaccgagtggaaatgaggcaggactcatagagaaagaagatgccaacggaattgaatttaagaatgttgagtcagacataagaagcaatgctgaccaaaaggacattcaaattctccattgcgaatatgtggataaggaaactaactttacgtctaaaaagttcaacaagctagaaaaagtttatatagaatttaagaagttgaatgatgaagtagaagaggagaaaaatgataaaagtaacataccaaaagaaaaggaagatagatttaccgttggtcacactgaggaaagtgtgcatgaagttatgcaatcggttttggtgagtgatgctgacttaaggtcaattgaaactcttcaatgtgaagagagtaatggagtgaaatcgacgggagattatttggaaagtggttgcatcatagttgaaactaatgtgtgcaatgagccgttagccccaaaggatgttgagggtgaggtagttgacctacaagatgagacattctatattggggagcccaaagctactaaatcggaagatcataatgaaaacaacaccgaagaagaagataagatggtttttgcggaggtggagtcaccggtgaaaattgatgatgagatggttcttgcggatgtggagtcaccaatgaaaaatgtaagtttggaaacattgaaaactgaggaaaacattatgttagaagatgagagagagaagaatacttctgagcacactgacttaatccgtgcagaggttgaattgttggtgatagatgagaatttagtgacattagaggcagagggaagaacgcttgaaattattaagtcagttttgataagtgatgctgagttaaggtcaattgaaactcttcaatgtgaggatagtgatggagcgaaatcaacagaaaattattcggaaagtgatcacttgatagtagaagctaatgtacacattgagccatccattccaacagatgttgatgttgaggtagttgacttacaagatgatacggtctatgtaggagagcccagagatgctaagttggtaggcgagaataaaaccaagatggaagaagatgatatgatggttcttgcggaggtggagtcaccggtgaaaaatgttagtttggaaacattagaagctgagaaagacattttgtcagaagataaggaacatatggaagttgaacatgttcaatcgcatgagaatgagactggattcatagtgaaagaagtcaacaaaattgaatttgaggaggccgactcagatgtaaggagcgatgtagaccaaaaggccattcaaaattttcaattcgaacatatggatgaagcagaatttggaattgaagatttgaatagtgattgtttgaccatgcatgaggacaagctgcaaagagatgcatctcggggaaagaaccttgagggaagtgttgcaagcatagaaagtgtagacgatgacaaaaatgataaggcggattgcgggatgaaagagggaaacactataagtttgcaagtggagacgacagagcataacacaaactttatgtcggaaaagtccaacaagccagagaagattcatactgggtttgaaaagctaaatgatgaagtagaagaacaggaggaaaatggcaaaagtaacacactgaaagatcagaaagagaataatacttgtgagtacactgactcaattggtggggaggtaaatttactagtgatagatgagaatttagtgacatttgaggaagagagaagtgtgcttgaagttatagagtcattttcggtgagtgatgctgagctaatctctattgaaactcttgactgtgaacaaagtgaaggagtgaaattggcgagagatttttcgaaaagtgattggatgataatagaagctaaagagtataatgagccatcaacacaaatggatgttgaggttgagacagttgacttagaagatgaaacgttccatgtaggggagctcagagctagtaagtcggaacatgacaatgaaaccatcattgaagaagacgataagttgattcttgcagatgtggagtcgtcggtgaaaaatgtaactttggaaacattggaaactgagaaaaacactatgttagaagatgaggaagagatggaagttggacatgttgttgattcatgtgaaaatgaggttgtatgcctagtgaaagaaggtggcaacaaaattgaatttgaggagactattcaaattgttcaacatgtggaagagaaaactaactttgtgcctgaaaagtccagtgtgccagaaaaggtttttacagaatttgaaaagctgaatgacgaagtagaagagcatgtggaaaatgacaaaaatatcatactgaaaaataagaaaggtaggaatacttttgagcacacaaacaaaattggaggagatatacaattgttagtgaaagataagaatttagtgacaatggaggctgagagaaatgagcttgaagttgcgaattcagttgtggtgagtgatcctgagttaaggtcgattgaatcttttcaatgtggagagaatgatggaatgaaattgacaagaaactatttggaaagtgattgtatgatactagaaactaatgtgcacgaagagtcatcaacttcaagtgatgttgaagttgaggcagtaaacctacgagatgatacttttcatataagggagtccacagctgctaagttggatgatgagaataaaaccaacactgaaaatatatcggtcgtgatgccaaataaactacaaaaagatgtgaagctttctctcggcaagaagatcgtttccgaaatctcccaaaagccaattaatgaagatgtggtgttgtcaagtgaacaagcaatggaaggagataagaaaatagagctagacgccaatatagaagggaatatagttagaaatgatatagaaatggtcacccacaattgtgaaatatgtgacaattgtgctaatacaatggaagaagatacaaatggaagctcccataatagtccaacacatgtcatggatagctcaaatactttgatatatattattaaggaagcaataaccggtgatgaggagggcatagactcttctatattggtgacagatctacagcatgtagctagtggatctcatggaggaaatatgtgccccaagtattttaggagttctgaatctaactcttcatctcgtacatgcatctccagttacaatgatactaagatggaatataattttactgatatgactgtgacgaagaaagataagaaattgcatcagaaacttgagttgattacagagaagtttctaaaccttttgtctagaatgggagcaaacactatggattttaatcttgatcatcatcatcataagtcctctcaacaatatcatgacaatcaaaaggatttgagcttctcatgcaatatacttgtcctaggaaagattggggttggtaaaagtacagttataaattccatcatgggagaagaaaaaaacaaaattaatgcttttgatggtgctactactaatgtgagacttgtttcaagtgtagtggatggcataaaggtaaacattatagatacccctggactcaggaccaatgtgatggaccaaggatggaataagaagattctttctacagtcaacagttataccaaaaaatgccccccagacattattttatatgtggaccgcttggatagttggagtaatcattttgacgatatccctcttctaaagactattactactatcttgggaacatcaatatgggtcaacactgttgttacttttactcatgctaattctatacctcctgacaactctaacggcgatcccatgacttatgaaacatttatagcacaaagatctcatattgtacaacaatccatccaacaagcaacaggcgatatgtgcctaatcaatgcattttcttttgttgaaaactacctgtactgcaaaaggaactgtcaaggcaagaaggtgcttcccactatccaaaattggaggaaatatttgttgatcttgtgctactctacaaagccaaagtatcaaccaaaggcatcaattcatcataaaggccttaaagaggattcttctattgaagttgatgactactctgaggtatgtgatgatgaatatgaatatggtcagctacctactttgtggcctttgatgaaagcacaattcgatgagttgatgaaggataagaacaaggatgagtgtgcctaccatgtcaagcttatccaagggatgcaatttaacggagtgacccaaggtagtatgccttgcgacaatgatctaaatcctcttcaaaagaataggatgtctccaatacttaatatggtaattgaaccatcatttgactttgatgatcctcctacacatcaatataatttactggagccaacatcaattattactagaaagcatgttttaggtgctcatacatgggatcacgagtacaattttgatggtgctagtcttgaaaaaactcttgtgcttcataagcctacaaaatgctttgaagctactttagttgaattctctaaggacatgaagaaatctagaatccattttaactcttcattcagatcaaagcatgtggacgatgcatcacattgtctgggatataacatacaaaatgcttggaagaaacttgcatattgtatttggggtgagactacaaccaaggatactaagcacaagactgttggtggactttcagtaatgttcttgggtgacactatgcttactggtgtgaagattgaggactacatttctgttggagaaagtctagcactactgtcacaatacttactcagaaggcattctaagatggcacttcacattggcctaaacactctgcgtaatggacaaatcaatctaaagatgagcacctcaaagatggttcagatagcactcttggggcttgttccattggcaacctccatgtataagagctttgtccattccgcggagcataattag

SEQ ID NO: 48504 - DNA, 147 bp, Oryza sativa
  Clone ID: PAT_MRT4530_51173C.1
atggcgaagcttgtcgcctatgtccaccacatcatggagtctgccagggaactgctcctcatttggaatttctctatcgaagccaacaacttgcccaccatcgaggcttgccgcatctacttcgtgaagccgaatctagcaacctag

SEQ ID NO: 48505 - DNA, 442 bp, Oryza sativa
  Clone ID: PAT_MRT4530_51174C.1
tgcggccggcaatccgcgacctccacctcctcctcctcctcctctcgtcaccaccaccacggcgaccccgtcctcctcgcccctctaaaagcctctcccttcctttctctctccccttctcgtgggatcttgtattcttgcgtcgtcttgggactcttgtggtggtcaagaacgaggacgagagaggtcggagagcgaggcggcggctgtgccgttgcgcgtgcggtgcgggtgaggtagctagcgagcgagaggggagatggaggcggtggcggttgcgggcggcggcgcggggctgacaaggtggcaggcggcggcgctgtcggcggtggcggtgtgggtgtgggcggtctcctccttcgacctcacgcggcggtcgcgcgcgctggtgcagccgtgggtcacccgccgcgtgctcgccgagacgccgtccatcgtcaga

SEQ ID NO: 48506 - DNA, 1689 bp, Oryza sativa
  Clone ID: PAT_MRT4530_51175C.1
atggcgtcggcccccggcgacggcaagcagggcggcggcggcggcgggccggcggtgggcatcgacctcggaacgacctactcgtgcgtggcggtgtggcggcacgaccgcggcgaggtcatcgccaacgaccagggcaaccgcctcacgccctcctgcgtcgccttcaccgccgacgacgacgacagcttcgtcggcgacgctgccttcaaccagtccgcactcaacccaaccaataccatctttgaagtgaagcgactgattggccgccgattcagcgatgattctgtacaaaaagatatcaagctttggcctttcaaagtcgtggcaggtcaagaggacaggccgatgatcgtggtgcggcatgaaggcgaggaaaggcagttcatgcccgaggagatctcctccatggtgctcgccaagatgagggagacggccgaggtgtacctcggcaagacggtcacgaacgccgtcatcactgtcccggtctacttcaacaacgcgcagcggcaggccaccatggacgccggcgccatcgccggcctcaacgtgatgcgcatcatcaacgagcccaccgccgccgccctcgcctacggtctcgagaagatgcccgtcagcaacaaggggaggatggtgctcgtgttcgatctcggtggcggcacattcgacatctcccttctcaacatcgatcccggtgtcaacatcgatatgggcctcttcgaggtgaaggccaccgccggtgacactcaccttggcggagcggatttcgacaacgagttggtgaagcactccttgcgagagttcaatcggaaacatgggtcgatggacattgaaagcaatcagaaggcgttaaggagattgaggaccgcctgcgagagagcgaagaggatgctgtcatccacgatgcagaccaccattgaggtagactcgctccatcaaggcatcgacttccgcgtcaccctcacccgatcccgatttgaggagctgaacaaggatctcttcagcaagtgcatggaggctatggagaattgcctccgcgacgccaaggtggacaagtggagtgttgacgatgtcgtcctcgtgggtggctccacccgcatacccaaggtgcagaagatgctgagtgagttcttcgacgggaaggagctctgccgcagcatcaaccccgatgaagccgtcgcgtatggcgccgccatccaggcctccattttatgtggtggaaccgatgataagaggttggttgatatgcttctccgcgaagtcacgccgctctcgctaggtgttgagactgaagataattgtacaatgagcgtggtgatcccaaggaacactgcaatcccgaccaagaaggtgaaaaacttcactactctctacgacaaccagatcaacgtgagctttccggtgtacgagggtgagagcgcaaacaccaaggacaacaacctgctcggcgagttcacgctatatggcatccccccggcacccaagagagtgccatctatcgatgtcactttcgacattgatgccaacggggtcttgaacgtttctgccgagcacaaggtcaccggacagaagaacagcatcaccatcactaaccgcagcggacggctgaacaaggaggaaatcgatcgcatggctctggaggccgagaggcacaagatgaagcggatcaagcaaaacgaagtagtctaa

SEQ ID NO: 48507 - DNA, 240 bp, Oryza sativa
  Clone ID: PAT_MRT4530_51176C.1
caaacaaatgctcttcctgggcatgtaaattggaccggccacttgcattatacatatatcaaatatatttacaaattaagctcttgttgcataatgactaaaactgctatatcccaaaatttcacacataacacaaaaacttacaacacctaattgggtccccctaaaaagttataaatgcaatgcactgcgtatggccttcacgttctgaaatatccattcaaacaaatcggctttttt

SEQ ID NO: 48508 - DNA, 186 bp, Oryza sativa
  Clone ID: PAT_MRT4530_51177C.1
atggcgccgtcgtacgtggccgtgggttcacgcgactacgcaaggaggggcagcgggcggcggccgcgcattgaggatcaatggttagatttggctcctactactacactactaccagctcaagtaaaggcactgcacccaacactgtgtctcgaggaggaggtcgcaagggccaccatgagctag

SEQ ID NO: 48509 - DNA, 1428 bp, Oryza sativa
  Clone ID: PAT_MRT4530_51178C.1
atggcgacgctggcgccggcgctggtgctcctgccggagtggggctccggccacctcatgtccatgctcgagtcctgcaagcgcgtgctcctcgccggcgccggcggcggcagggagttctccatcacgctgctcgtcatgcgcccgcccaccgacgaggcgggctccgaggtcgaggcgcacgtccgccgcgaggccgcgtcgggcctcgacatccgcttccaccgcctccccgccgtcgacccgcccgccgacgccgccggcgtggaggagttcatcgcgcggtacatccacctgcacgcgccgcacgtcagggacgccgtcgccgggatggggcgccccgtcgccgcgctcgtgctcgacatgttcgccgcgcccatggtcgacgtggcgcgcgacctcggcgtgccgtcctacgtcttcatgtcgtccaccggcgccatgctcgcgctcatgctgcacctcccagtgctccacgaccgggtcgccgtggagttccacgaggtggacggggagaagagccccaactacacgtggttcgtgcgcctcggcgaccgcttcatggacgccacgggcatcatcgcgaacaccgccgacgagctcgagccggggcccctcgccgccatcgcggacggccggtgcgtgccggggcgcgccgcgccgccagtgtaccccatcggccccgtgctctcgctcggcggcaacgacaagagggacagctccgagccgccgcacgagtgcatcgcgtggctcgacgggcagccgccggcgtcggtggtgttcctctgcttcgggagcatgggctggttcgaggcggcgcaggtggtggagatcaccgccgcgctggagcgttccggccaccgcttcctctgggtcctgcgtggcccgccgcccgccgccgagtcaggcaccggcgcgcccgacgggtcggagcacccgacggacgcgaacctcgacgagctcctccccgaggggttcctggagaggaccaaggggaggggcatggtgtggccgacgtgggcgccgcagaaggagatcctcgcccacccggccatcggcggcttcgtgacgcacggcgggtggaactcggtgctggagagcctgtggcacggcgtgccgatggcgccgtggccgctgtacgcggagcagcacctgaacgcgttcgagctggtgcgcgacatgggcgtggccgtgccgctcggggtggacagggagcgggacaacttcgtggaggcggcggagctggagcgcgcggtgaggtcgctgatggacgatgcgtcggaggaggggaagaaggcgagggagaaggcggcggagatgaaggccgtgtgccggagcgccgtggcggcgggcggcggctcgtcgcacgccgcgctgcagaggctctccgaggcgctgcaccagggcgcggcgctcccgaagaactga

SEQ ID NO: 48510 - DNA, 933 bp, Oryza sativa
  Clone ID: PAT_MRT4530_51179C.1
tgcgccgcctcgaaccagcccatgctcccgaagcagaggaacaccaccgacgccggcggctgcccgtcgagccacgcgatgcactcgtgcggcggctcggagctgtccctcttgtcgttgccgccgagcgagagcacggggccgatggggtacactggcggcgcggcgcgccccggcacgcaccggccgtccgcgatggcggcgaggggccccggctcgagctcgtcggcggtgttcgcgatgatgcccgtggcgtccatgaagcggtcgccgaggcgcacgaaccacgtgtagttggggctcttcttgtccaccaccgggcacggcatggacgccggcggcagaggcggcaggccgggcacgtccacctccccgtccacctcgtggaactccacggcgacccggtcgtggagcactgggaggtgcagcatgagcgcgagcatggcgccggtggacgacatgaagacgtaggacggcacgccgaggtcgcgcgccacgtcgaccatgggcgcggcgaacatgtcgagcacgagcgcggcgacggggcgccccatcccggcgacggcgtccctgacgtgcggcgcgtgcaggtgtatgtaccgcgcgatgaactcctccacgccggcggcgtcggcgggcgggtcgacggcggggaggcggtggaagcggatgtcgaggcccgacgcggcctcgcggcggacgtgcgcctcgacctcggagcccgcctcgtcggtgggcgggcgcatgacgagcagcgtgatggagaactccctgccgccgccggcgccggcgaggagcacgcgcttgcaggactcgagcatggacatgaggtggccggagccccactccggcaggagcaccagcgcttgtgccagcgccgccatactctaaatctccccctgatcaccgtctgcagcagtagtgttagaaacg

SEQ ID NO: 48511 - DNA, 3372 bp, Oryza sativa
  Clone ID: PAT_MRT4530_5117C.1
atgaccgtaagagagacattagatttctctaggtggtgcttaggtattgggtcaagatacgacatgctcacggaaatctctagaagggaacgcaatgcaggcattaagccagaccctgagatcgatgctttcatgaaagctactgcaatgcaaggacaagagactaatatcataacagatcttattctcaaggtgcttgggctggacatttgcgctgatactattgttggtgatgagatgattagaggaatttctggtggacaaatgaagcgtgtgacaacaggggaaatgttaacaggaccggcaagggctttgctcatggatgagatatccactggcttggatagctctagcacatttcatattgtaaaatttattaggcatttggtccatataatgaatgaaactgtgatgatctctctcctccaaccaccgccagagacatataatctctttgacgacatagttctactatcagaaggatacatagtctatcatgggccacgcgagaatatattggaattttttgaagcttctggctttcgatgccctcaaaggaaagcagtggctgacttccttcaagaggtcacttccaagaaagaccagcaacaatattggttccttgacaaggagccttattgttatgtgtcagtcccagagtttgcagaacgtttcaagtcattttatattggccaacaaatgatgaaggagcaacatattccatttgaaaaatcaaaaatccatcctgctgcactgacaacaatgaaaaatgcattatccaactgggagtcattgaaggctgtgctttgtagagagaagttgttgatgaaacgcaactcttttctttacatattcaaggtcacccaattgatcattcttgctttcttgtctatgaccgtgtttcttagaacaaagatgccccatgggcaattttctgatggcactaaatttcttggggcattgacattcaatttaataacagtcatgttcaatggcctttctgagctaaacttgacagtaaagaagcttcctgtgttctacaagcatagagattttttattcttccctccatggacctttggggttgcaaatatactaataaaggttcctgtatctcttgtggaggctacggtctgggttgtcatcacgtactatgtgatgggatttgcaccagcagcaggaaggttctttcgtcagtttctagctttcttcgttactcacctaatggcaatggctctgtttcgatttcttggtgctatcttgcaaacaatggttatagcaattagttttgggatgcttgtgttgcttattgtcttcgtctttggaggatttgtgatacgtaaaaccaaaatgcaatatcgatcaacgaatttctggccagtaggtgggccattccaaacaatgacacaaccattgatgcaaaaacgttgggcacttatacttcaaaaattggctctcctagctattagaagtgcaaacgcactagttattgatgaacacaatgaaactgagttgtacacggaaacaagaaatgaagagcataggtcccgaacatccaccacaacatcatcgatacctacgagtgctaacggagaaggaaataggccaactcagtcacaatttgtcttacctttccaaccattgtcactttgtttcaaccatctaaattattatgtggacatgccctcagaaatgaagcaacaaggactcatggaaagtcgtctccaactgctctctgatattagtggtgcttttaggccaggtcttctaactgcattagttggtgtcagtggagctggaaagaccactttgatggatgtcttagcaggaaggaaaactagtggaacaattgaaggaagcataaccctttctggttactccaagaaacaagaaacgtttgctcgcattagcggctactgtgaacaagctgatatccattcaccaaatgttactgtatatgaatccattctctactctgcttggttgcgccttccctcagatgttgatagcaatacaagaaagatgtttgtggaggaggtcatggcccttgtagagcttgatgtattgtgcaatgctatggttggtctccctggagttagcggtttatcgactgaacaaagaaagcgattaacaattgctgtggagctggtagcaaatccttcaatcatctttatggatgagcctacttctggtcttgatgctagagctgcagcaattgtcatgcgaactcttttgcttttgaaaagaggaggtcgggttatttatgctggtgaacttggtgaccactcacataaactagttgaatattttgagacaattttaggtgttccaagtattacagaaggatataatcctgcaacatggatgctagaagttagctccactctagaagaagctcgcatgaacgtagattttgctgaaatttatgccaattccctgctttataggaaaaaccaagaacttattgaggagttgagcattcccccaccaggctatcgagatctcttatttgctacaaaatattctcaaagtttctatatccaatgtgttgcgaacttatggaagcaatataagtcttattggaagaatccatcttacaatagcttgcgttatctaacaacgtttctctatggccttttctttggcacagtattttggcaaaaaggaacaaagttagactcacagcaagatttgtacaatttactcggagccacttatgctgcaatcttcttcattggggctactaactgcatgtcagttcagcctgttgtatcaattgagagagcagtttactatcgtgaaagcgcagcaggaatgtactctccattgtcctatgcatttgctcaggcaagcgtggagttcatttacaatatcatacaagggattttgtacacggtcatcatctatgcaatgatcggatacgattggaaagctagcaaattcttttattttctattcttcattgtttcaagcttcaactacttcacatttttcggaatgatgttggtggcatgcaccccatctgcactgcttgcgaacattctcataacctttgcactccctctttggaacttgtttgctgggttccttatttttaggaaggcaataccaatttggtggaggtggtactattgggcaaacccagtatcctggacaatatatggtgtcattgcatcacagtttggagggaacggtggatcgatttcagttcctggtgggagccatgtagcaatgagccaaattttggaagataatgttggcgtccgacatgacttcctaggatatgttatacttgcccattttggctttatggccgcctttgttctcatctttggctattccataaaatttctcaactttcagaaacgttag

SEQ ID NO: 48512 - DNA, 524 bp, Oryza sativa
  Clone ID: PAT_MRT4530_51180C.1
cccacgcgtccgcccacgcgtacggtaagtttgctcctctctctcaaaaattaaaaaaaagaactcatggcagacagggaggaacaatatacagcgcgcagcatgaacaaatcggacatgcggtttagggacaggcagtgccagccgcaggtgcaggacagcccgctgtacgcgtgccggcaggtgctctaccggcatgtcaccggccgtaagaggttccaaccgatgttcctccggccgggcgcgctctgactgcggatgcagtgcatccaccttttgcaagatgtgagccgtgagtaccggtccgccgccatccgccttatgaagaggagctacgacgaaagcttgcagatgcccctgcatcaaggttggtattagcccccgccggagtactacttatgccaggggtcgccgttagactaggcatactactagcagcggtcccttgaggaggcttacttcggttagcagcaacattagccggttatgaccctcaagaggttaaccagggccagcctttacgc

SEQ ID NO: 48513 - DNA, 239 bp, Oryza sativa
  Clone ID: PAT_MRT4530_51181C.1
ggttatgaattcgattacagtaaatgtatataaacctttatttagaaccgtaaaaaatataagctttatttttcaaatataacaaacagcgggttgacattaaccatactggttaaaatgctgagggaacaaaattgggggggagatccttctttttagacaatgggatgtcctgaaacctcataaccacatatgggaagccaattttggggacataggaaattaaaacatatttacca

SEQ ID NO: 48514 - DNA, 639 bp, Oryza sativa
  Clone ID: PAT_MRT4530_51182C.1
atggcgttttcttccgcgtttagctaccgatgtcgattttggggttggttttataacaagtggtatcagagcctgcgggagatccatggtagaggtacgagggaggtgctccacgccgcgacgactacacagggtgtccagggacagacatggacgcaaggtagagcacgacggcgatcaacggaatttgatcggtggaatcgaacacttctggcggcggccggaaccatcaatggctgcttcaacagggagatgaccaaacgtggtgctcgggttgatggcggcggaagcgattggcgaatcaatcggtgggtcggacacttcgggcgggtggctcgaacttttcggtggtcaatcggagttcggagcgggttgcgggtcgaggtggagccgcaaaggtggcgcaagccacgcgtggagcctctcctagaggctgttttggatgtgtcttcaacaagacgccttcaacgttttaatgcccacgcccgtcggcgcttgaagcacacttcaaggtgtatgccggcaaggctaaggtcacaagcttttcatcaatcccatatggcaattatctctgcgggtgattcccgcaacaacggtgaatcattggatcccgcaacaacggcgatccacatcatctaa

SEQ ID NO: 48515 - DNA, 378 bp, Oryza sativa
  Clone ID: PAT_MRT4530_51183C.1
tacatacactcgggcagcatatgccctacatctgatactgctaagattggtcacttgagctgcaaccgtgggatgagcgatgctacctgatgccgaaggaaagccacataagagcacaacgactacctggacatgcgtcggtagacagcccactgttactgtcatagacctgaatagacttatccgatagttaatatgctgcaaaaaaggtaggacatatggcaaacattcctgcttaacgatgtgcaaacaaagatcaaggaaattgacggaatgctgaactcatcagatactgagcatgctactagaactactgacaatgccgagaagatacagagaatgctaaatcaagcgcggattgctaccattatcattgac

SEQ ID NO: 48516 - DNA, 305 bp, Oryza sativa
  Clone ID: PAT_MRT4530_51184C.1
ttgatgtggactagggttcctgattttccaaaaggttctgataaacaacgatttgggcggagtcgcgacacaaatcgatcggacttcttgaacgcgcacgctcttgagccccgcaatagccgcaccacgtgtcctctggttatcacccgtgccgaaacacggatgaccttgccgagaagcaacgcagcgccgggacagattctagatgtcaacttattcggtcgattcccgttgacttggaaagaatttggatgtgggaccaaaaccattggaacgtttgtagaatcttctcttcacctaattgt

SEQ ID NO: 48517 - DNA, 300 bp, Oryza sativa
  Clone ID: PAT_MRT4530_51185C.1
acggcacgagggtagacccgcgcccgcgcccgcgcctacaccgcaatggcgatagcggcagccatgggcgtaggcctccccctaaccacgccgcccacgccgccgcatccacatcgtgcgactacgctccgcctcctacgtcgcggaaggccggccgcggcggccgcgaggggtaggcctcctcctcctcctcctcctcttcggcggggaggcggaggcggccgctcgtcttctccccgcgcgcggtgtccgactaccaagagctacgcagacctgcctacgacccggacgccagcacga

SEQ ID NO: 48518 - DNA, 1382 bp, Oryza sativa
  Clone ID: PAT_MRT4530_51186C.1
ccggcattttcaaacaatcccaagctatagcaccccctccgcccaagcaataaccgatgtggaacgaggcctcacaacccacaacattttcaaacaacgcaaagcagtagcagcagcgagaagcaagcaagaagcgatggggatggggatgaggagggagagggacgcggaggcggagctgaacctgccgccggggttcaggttccaccccacggacgacgagctggtggagcactacctgtgcaggaaggcggcggggcagcgcctgccggtgccgatcatcgccgaggtggatctctacaagttcgacccgtgggatctgcccgagcgcgcgctgttcggcgccagggagtggtacttcttcaccccgcgggatcgcaagtatcctaatgggtcacgccccaaccgcgccgccggcaacgggtactggaaggccaccggcgccgacaagcccgtcgcgccgcgggggcgcacgcttgggatcaagaaggcgctcgtgttctacgccggcaaggcgccgcgaggggtcaagactgattggatcatgcatgagtaccggctcgccgatgctggccgcgccgccgcgggcgccaagaagggatctctcaggttggatgattgggtgctgtgtcggctgtacaacaagaagaacgagtgggagaagatgcagcaggggaaggaggtgaaggaggaggcgtccgacatggttacgtcgcagtcgcactcgcacacccactcgtggggcgagacgcgcacgccggagtcggagatcgtggacaacgaccccttcccggagctggactcgttcccggcgttccagcctgcgccgccgccggcgacggcgatgatggtgcccaagaaagaatcgatggacgacgccaccgcggccgccgccgccgccgccaccatccccaggaacaacagcagcctgttcgtggacctgagctacgacgatatccagggcatgtacagcggcctcgacatgctgccgccgggcgacgacttctactcgtcgctcttcgcgtcgccgcgggtgaaggggacgacgccacgcgccggcgccggcatgggcatggtcccgttctgaggtgacggcgacgcgatcgaacaggtggtgatcgatgctgcaacgtgtgtaaatatacagcgccggctgggtcaagagatggctcgggtgacgcgcgcgcggcgtgtcctggcgttggcgccggggcattctttagtttttcatcttttcatcatctcagatggtagatacaaaacagtgtatgtatgtagctctgtttctctctatagaaccccaacaaattttgttgttgatgttgtttaaaatatcgaacggctcctcaacccaaagcttttaactaatgatttaatttttt

SEQ ID NO: 48519 - DNA, 342 bp, Oryza sativa
  Clone ID: PAT_MRT4530_51187C.1
atgggcgcgtggcggcatcggccgtcggcgcaggcaccgcgcgcgtgcagatcggcgtcggccgtcacattggcgatgatgggctggctggcttatttccttgatgggctgagtctgttagattgttttctcgatgggctgatggatagggggttctgggagaaccacgtcgatgccggaaagccaaacatcgacgtcttcgacgaagtacagcaagaaatcagcaacgatatcgtggctcgggtcatcagagacgctcatggactaaaggcatgcatgacggggtcatgccaatgtcctcccattcccatagtgcgggcattgcggatatggcgccgctag

SEQ ID NO: 48520 - DNA, 273 bp, Oryza sativa
  Clone ID: PAT_MRT4530_51188C.1
atgcaggaggtggctggcggcacgacggcgttgtcaggcgctggagttgggatcgattcgacttggagaaggctaggaagaacatgtgttggtctggtgctggtgttgcactgctgctacgagcggccggacatcgatgggctccggcggtggcgtggcgagcccgtcatcgtgtactggtttatccccatctacgagcgtgaggctggccagtggccccatatggccacatcatgtgaacgcaccgttgtagcatggcatagttgggcctaa

SEQ ID NO: 48521 - DNA, 481 bp, Oryza sativa
  Clone ID: PAT_MRT4530_51189C.1
ggtggcgtcgtccatcgattctttcttgggcaccatcatcgccgtcgccggcggcggcgcaggctggaacgccgggaacgagtccagctccgggaaggggtcgttgtccacgatctccgactccggcgtgcgcgtctcgccccacgagtgggtgtgcgagtgcgactgcgacgtaaccatgtcggacgcctcctccttcacctccttcccctgctgcatcttctcccactcgttcttcttgttgtacagccgacacagcacccaatcatccaactgcacaaacaattcacaccagatcagatcagaccacgatccaattatcgatcatcactcccaccgaataatcttcgatcgaagcaaggatcattgctagtaattcggatgaatctgagctaagcttaccctgagagatcccttcttggcgcccgcggcggcgcggcccgcatcggcgagccggtactcatgcatgatccaatcagtc

SEQ ID NO: 48522 - DNA, 165 bp, Oryza sativa
  Clone ID: PAT_MRT4530_5118C.1
atgggtttaggttctttacctcatgcctccctctgcatggtcctgcgaccagggagggcaccgtcgtcttgcagcttcttcaaggacgcggtggttgaggtagacttctcaagatccatcgccgccagaggatcgccggagaacaagaggaaagaaggaagctag

SEQ ID NO: 48523 - DNA, 2099 bp, Oryza sativa
  Clone ID: PAT_MRT4530_51190C.1
aattgtatacgactcactatagggcggctcggggcccgggccccccctcgtgttgttttttttttttttttttttttttttaacaacgacgctaaataataataatagtagtagtagaggtaattcacattacaagttcttataacacgctaataatattacaagacataataataataataatgctactactactgtttacaacctgtaagatcagcagtagaaggtaataacagactttagaagagcaatggacgccacggccggagtaaccgaccagtgaccggccaccggagacgcacgccggacacaaaaacgccggctgccggtagcatcggcgtctccggttgaggaagaacaccaaccaaccctagcatctacagaggaaacaagtccggagagagatcgatctacgtacacaaacgaaccaaaccaaaaggattagggactataaaactgctaatccatgcccgtccgtgcggtgcagaatgtctaaaatcccatctgcacggcggcggcggcggcgacgattaggctaacgacggcgtgagtactagccaagaagtggtggtggtgttaattggcggcgaggagggagtcccagtcgatctcgtaggacgggtacttggtgagggcgaaggcggcggcctcgtcccacggcgcctcgctgaagtcgagctgctgcatctccggcacggtcgccggcgtctcggccgtggtggcggcggaggacggcgacagggagggcgacgagtcggcggactccaggcaggacgacgcgtcgtcggaggacggcgacgagcagttgctggtgggcgcggaggatgttgcggcggcggaggcggagacagaggacttcttggcgttcttggcggcggcgatgttctggcagagcgtctggagcttggcgtcgacggaggcgtggagcgggccgcgggaggcggcgttgtcggggaagttgagccgcgccgcgtcgccgcggaggcggtacgccgcctggtcgtaggcaagcgccgcctcctcggcggtgtcgaaggtgccgagccagagccgcgtgcggttccgcgggaggcggatctccgccacccacttcccccagtgccgctgccgcacgccgcggtacagcttctgcggccgcggcggcgtcgccgccgcccccgccgccgaagccgacgacgacgacgccttcatcggctgcgcgcgcgggccgagcgggccggcctgcgccgcctgccgctggaggtggaggcgggcctggatgtagtgcatctgggccgggctgagctctggctgctgggccagcccgccaccgtacgcgaacgcgtgcgggaaggagaatggcgaggtgggactaaactgggaacaaaccggaggcgagccggaggcatctcggataaaaggctcgagtgctctcatcagctcctcccctgacagatctatagctgcagccatctactcactcttttttttgggatttttttttctgatactaaaacagtagtaacaaagatttgcctggttccgaatccaaaatcaagaacaggcaggaaggagggagaaatcgacagccacagtaaaaaaacagatggctttttggtggtagatctagcaagtgaggtgtggaaaaagaacccctcttggctaccaacctaacactagaacacaaagaagatgaaagaaaaacagcagatctgggagccctggatctaaaaggccctgggtctctcgctctctgcaagcaacctaaccaagaaaccgtagaagaacaggtgggggagccagaggaggaagaagaagaagagggtttcgagaaaactttaccttgaagacgctcgaagtcgctcagatctaaagcttttcttacctcgctcgagctcacggtggctgtgggtgttcgtgggcttggagatggtggcggcggcggtgggaggatggctgtggatctgggtgtgtgtgtgggcgaaagtgggaatggtgggcggggaggtgtaagggacgccattggagctcttttatagcaaagctctccagctccagaggccatgaccggttaatcccatcccttaattagtaatttccctcgtcttatcgcccaggat

SEQ ID NO: 48524 - DNA, 418 bp, Oryza sativa
  Clone ID: PAT_MRT4530_51191C.1
tttttcatatctcatcacactgctctagcagagaaccaaactaaacaactaaacaacgaaacatacaaacacgtaggcagaaaaggaacaaacgcacacagagagaacaaaaacggagaagtccacgcttgatcctgaccgtccatctcttttgcaggaacagctgcaccgcgataccaccaagactagacaggagacaaaaccgaaacctgggtggctgtccacagaattttcacaattgcagacctacgagagctgccaaaaacggcctttttttgggatgctgccactgcgacatttaagtgccgaaaccttcgagcggttcaggtttcatgacccggggggagccccttctggacagccaaaaaacacagtatgtatggccaaatcaaaccaacttgcctccccacaaatatta

SEQ ID NO: 48525 - DNA, 494 bp, Oryza sativa
  Clone ID: PAT_MRT4530_51192C.1
aagaaatcgtcaattaagttattaagttaaaaaagtttacattttcagatgcctttccagcaaaagctaacttgaagattcatcacatcatttcatcaatcatcagaagcgcaaaactttaaaaaaaaagatatggaaaaacagtcaacgtgatatgcagaacagcttcttgaactgacaaggctaatccgtacaggagttgaaaaattacgattcaatctattccagaagttccatgtcctgagcagttactatgaacggtgaaaacagagagatatactaacctttcatgaatgacaatgatgagctagcattggatccagtgttcgtttgaataagaggatctatagaactagaagagttctggtgatccatccgtggaccttcaagactgcgctgttcattactagcatcttcccctgcaactctcactcttaaactgaaaatatgaacagttcctttgtcactggacactgccaaccactgcacattgg

SEQ ID NO: 48526 - DNA, 354 bp, Oryza sativa
  Clone ID: PAT_MRT4530_51193C.1
atgccgggatcgtcgtcgccgacctccgccgctgtcgctcagaccctcgccaaccatcgctgtcggcatattcgttggggagagggagggggagaggtgccgctgccatcgacctgtagctgcctcccgtcttctcccaccagatccatgccgtcggatccgttgctgcccgggccacccagcgccgtcgcttatcggggaggtgtggtggccggaggaggaagggggaggtgcggcggcagccagaggaagggggaggctcagcggttggaggaggaagggggtggcgtggcagtcggaggagggggaggcgtggcagcggagatgaggaggggaggcgcgcagagcgagtag

SEQ ID NO: 48527 - DNA, 1911 bp, Oryza sativa
  Clone ID: PAT_MRT4530_51194C.1
gccacgcgtccgaaagatttcaagaaatccaaccaaaaatctcgcgctctcctatcctcgcgctccgcatgcctcctcctccttcggcgccgcatgagcgcctccgggttggcgttggcctgtcgtctccgggaggagtaatgcagagtgcggcggggaagtccgaaacggagtttgttcgttttggagcatgggggagtgcaaggtgggaggaggaggcggatgcggagtctgcttgatcaagctgttcggggagaccatccccgtgccagagcccggcgcctgcgcccgtggcgatggttgataaggaccttcaacacagtggcagcagcacgactgaaccgaaaactcaagagaacaccgttcaagactccacaagtccacctccgcagccagaggtcgtcgacaccgaggactcttcagctgataagaactcatcagagaatcagcagcagcagggcgatacggccaaccagaaggagaagctgaagaagcctgacaagatcctgccgtgcccccggtgtagcagcatggacaccaagttctgctactacaacaactacaacatcaaccagccgcgccacttctgcaagaactgccagaggtactggacagcgggtggtgccatgcgcaacgtgcctgtgggtgcaggccgacgcaagagcaagagcgtatcggccgcttcccatttcctccagagggtcagggctgctctgcccggtgatcctcctctctatgccccagtgaagactaatggcaccgttctcagcttcggctccgacctgtccaccttagacctcacagaacaaatgaagcatctaaaagataagtttatcccaacaaccggtatcaagaacaccgacgagatgccagtcggtttgtgtgctgaaggattgtcgaaaacagaagaatcgaaccaaacgaacctaaaggagaaagtttcagcagatagatctccaaatgttgcacaacacccatgcatgaacggaggagccatgtggccatttggcgtggcaccaccacctgcttattacacttcaagcattgcaattccattctatccagctgcagcagctgctgttgctgcatactggggctgcatggttccaggagcttggaacgctccatggccaccgcagtcccaatcccaatcggtttcatcatcaagtgctgcttctccagtatccacaatgaccaactgcttcagattaggaaagcaccctagagatggtgatgaggaactggatagcaagggtaatggcaaggtgtgggtgccgaagacggttcggatcgacgatgtcgacgaggtggccaggagctctatctggtcgcttattgggatcaagggtgacaaggtgggagcagatcatggcagaggatgcaagcttgcaaaggtttttgagtcaaaggatgaggcaaaggcatcaactcacacagcgatcagcagcttgccattcatgcaggggaacccggctgccctaacacgctcggtgaccttccaagagggatcttgacttgaacaacgccttggaaatttttatgctgccttctgctgctataaagacatagcgtgatacagctgaaattttgtacattagaggattgtaaagtaggtatgggagatggagtgtcagggtgtataacttaacatagctacaagcaagcccagtagctgtattagataacttgtacatagctatgtgggtttgagaaagatagggagagcaagttccccttataatatgtagataaataatataatgatttgaatatttagatcaaaaggatttccttttgcagtagtatctgaataattcgtcgctgtctgattccagtgtattaaaccagtcccactgtagccctggaaatgtgatacttttctgcatatattcatcttgtttcctatttgtc

SEQ ID NO: 48528 - DNA, 405 bp, Oryza sativa
  Clone ID: PAT_MRT4530_51195C.1
atggagggactcttggagttgaaagtgtttatcgagtgtgtccagaaaattggtagcttgattcctctattgtgggatggggagtttcagagtaggaaatggagatcaaatattcagacatgcagagaagttcagataagcagagaagaagcagagttcaggacatatcgtttcgctgagaacatgcactgcaacgccaacaagtcgggcgtggcagactacacctgccacgccaaggagctaggcgtggcagaagtgccacgtcagcgccagattgatcttgtcaacgacaacgtctgccatgaggcaccctttgacatgccacgcgtgaccaatggcatggctgttcagattggccacaccgattacaatggtgtggctggttcatttttggaaataagttaa

SEQ ID NO: 48529 - DNA, 345 bp, Oryza sativa
  Clone ID: PAT_MRT4530_51196C.1
atgccgctgccattcgtggcaggaggcctcgtcgccgtcttctcgccgttgctaatcctaactgggctctcgtcgcctttcgcagcaccggcggcggaggcaccgccccggcgatgcgacagccaaatccgctacctgcaccgccgtaccatgatcacatgccagtggttcttgacggcacttgtcttctcggcccgagaacagcctgccgatctccgtccaccccctgcgaggggcacggctctactcaaggaggacctgttcatgctcgagtgccaaggggctccggccgatgctatgcactacttactggagacacatagtcctgactattttgccgcataa

SEQ ID NO: 48530 - DNA, 859 bp, Oryza sativa
  Clone ID: PAT_MRT4530_51197C.1
aaaaagtgcgaagtggaatcaaccgccgccgctcgtcgaaagtcaccacacacaccctcgccgccccgccgctcaattcagtgatgcaggcggcagcacccgcgtgggctccgcccatcgtctcctcggcttccgccgtcttcgcgcggccccgccgtggcgcgcgcgccggcgccggcgccgtccggtgcgagctcgccgcctccgcgccatcgtcggccgccggctcgatggccccacgctgggcccagaggaccatcgtcatcccgccgcagcgccgcggatgccacctcatcacccccaagattgtgaaggggataaaagacgacctctccgagttcaagtgcggcatggcacatctgttcttgcagcacaccagcgcttccctgactatcaatgagaactatgactccgatgtccagtttgacactgaaacatttcttagtcgcattgtcccagagggtccatctgctccatggaagcacaccatagaagggccagacgacatgccagcacatattaaatcgtcgatgtttggttgtgccctgacgattcctatcactgatgggcgtctcaatatgggaacttggcagggtatatggctctgtgaacatcgagactatgctacccctcgccagattgtgatcactctcaatgggatctaaaaggtccatgacaatagatattaatagctgtaaatgcaatatgaccatctagacatctagatcatatgcattgaaactgaaactgaaaccttttcactcatttgtgatatgaattacagtggtgaatatattttgcaatcttgtaaaaaaaaaaaaaaaaaactcgagactagttctctctctctctcctcgtc

SEQ ID NO: 48531 - DNA, 436 bp, Oryza sativa
  unsure (1)..(436): unsure at all n locations
  Clone ID: PAT_MRT4530_51198C.1
tgatttggcagtacatactcaaacaaaagagcccctttctcctagtaggcaatttccatgcaaactgaactgtcttgaagtttgatagtcgaatactacaatttgttggcttaattcaaacatgttttgagtgggaagcattagccaatgcctatgatatacttgtagtgcataacaagggtagacatgaacaggagtaaggtcggatagcagtggtttgaggagcaagagctgcaatagctcatccaatgggagagccaagcatgaaaacgagttgagacttgagacaatacttgatactgcatcattatttatgtgtgcaactcgtgttataatatcttcttatataggtgatacctagtaaagggcatttacttttataaagcangacatgcaagaagccacatcattaacaattttaagacattagatcaca

SEQ ID NO: 48532 - DNA, 208 bp, Oryza sativa
  Clone ID: PAT_MRT4530_51199C.1
ttgcttggttgcaaaaaccaagacatacacacggagtcaaataataacaaaggcgaggtcgcctccacggctacagacatctaggccgcccacaagacagccgcgtccgcatacgcatcccaggacggcgttgccgacggcgaggagggggaggggccggcccctgcggcggaggacgatttgttgaagaacgacctgtacacggcgg

SEQ ID NO: 48533 - DNA, 774 bp, Oryza sativa
  Clone ID: PAT_MRT4530_5119C.1
atggcgccactcgtgcgactgccgccgtcgtccacgccgtccccagccgcaaccgccaccatcctctacgtcgtcatcgtagctagccgcgactaccgacgccgtcacaagggtcccggccgctgctttccactcgtgaaccgccactggaccatcgttgccgctgccaacccgaggagcatcgctgcaatctcctcgccgttgggtcctttggccgccgcagctcgccaacgtgcccacggggacacgatacctgggtaccctacaggaggccttcggctacaatgcaggggcaccttcgacatcgtcgctgatgcccttggccaactccagcaggttaaccccggcttggtcggacctgttcaagacatctggttctcggccggtactagtttctacattggctcgctggacttcaccgccaacaaggctggtgcactacgacccttgaacccgagtatcttcgacccaacggcgacgtccctagtacccttcgatctagccaagatcaacttccacgacgaccgcagcctacatgacaaggtcgccacgactccaacaagacggcccgggcaccacggccgatcaaaacaccgcagaccacgactacccacggagtttggccccgatgggtcggattcctcaacatacgtggtgtctagattacgggatatcattattttgggttatatattgcggatgagaggtgggccgctgatggtgacagctcagtacgggggtggcttctcgaagtaccaggagggcatcgaatag

SEQ ID NO: 48534 - DNA, 356 bp, Oryza sativa
  Clone ID: PAT_MRT4530_511C.1
gagatcgagtttgatcgatattacgaggcctaattcacgttctagaacatgaactggaagccactgaaacattcacaagttcttgctgtaagcagaaataggggtcttcacttgaatgggccacaaaaaaaactcggtttgcgggtgcttgtgaaacgcaactccttatattagatccaagtggaacaattggtatcttacggcctgagaatgccggtttcgtatcactgtgatgaaggtcccctgttttaaccatagaatcggcaaaacggagggaggtctggttctaactgctgcatttgctgatgattgtggagaagtagctgtgggatcagtggaaaaggcttgctcacaat

SEQ ID NO: 48535 - DNA, 1535 bp, Oryza sativa
  Clone ID: PAT_MRT4530_51200C.1
cccgggctgcaggcggaagaacggaacggaacggaacaccagccgctgctccggcaagcgctcgccgccggcgaggcaaagatggagaacactcaatttagccgtccaaaggcggtaccctataatgactcctgggagatacccaattctgactatattctcttgtatctcaatgacaaacaaactgggaagatcacttgcatggtatgtgggaaagaaggacactacacttgtgagtgccccatgaagaataaagaaaaatatgtcatatgtactctttgtggcaaggttggccactgtcacttatggtgctgccatcagaatgagagtgagaggcgtgcttgccgtcgttgtggagaaaaaggacactatgataattggcatcacctaggttgctccagctgtgagaagcatcatccactcgggagatgtcctatgggaaaaattacatgttttctttgtgaaggcaatggacatgtccctgttcaatgtcatttgagtccaatgctcactgcaataactcagaatcaacgagagagtttccgagctactctgagacaagcattgagagaaacaagcaacacagcagtcacaccaattacattgaccagagaattagagccatataatgataagaatggaggccaacctaaaggggacaatgaaatggtgcccagggtcttaggcttcaatcaaggagaggaaggccattctgctttgaggaaccctaacagatgccatgtaccatcctctgacaaggctaacgttgctgcagataaggcaccaaaccaatctttaggagtaacctgcttcaactgtgggggcaaaggtcactattcaaataaatgtcctcaaaagcaaaagcaacatggagtcagatcaaccaatgctgcagctatgaaagataagacaccgaacctaacaggagtgacctgcttcgactgtggtgacagaggtcacttttcttatacatgtcctcaaaatctactagaagtcatgttgactgcagaactagagccacatgatgatacctatgaacgccaacctaaagcggataatggaacagtaccaactgtcctaagcctgaattgtggtgaggcaagccattgtggtaggaataatcccatgaaaagtctggaatcatcctctgataagatcaattctacagctatgacatataaggcaccaaaacgagtgttaggtgtaatctgcttcaactgtcatgaggaaggtcattatgcaaatagatgtcctcaaaagcaacagggaatcaactcaggtacttcccaatccccaataaagcggcagaggaaggaatgactgatgtaagttgatatcgagcaaacttgtcttaacatagatgttgataaaaaagaactaataatatattgttccgtgaaattgtaatggatgaaagatttatcagatattcaaaggaggttgtggttgtaaaaccataaccatttttggtattgtagaatttgatattgaataatatcaagtgatccgtgtgttgcatgaaaaaaaaaaaaaaa

SEQ ID NO: 48536 - DNA, 411 bp, Oryza sativa
  Clone ID: PAT_MRT4530_51201C.1
atgcgacgtctggagcgagattctagcggtggcgacagcaagggtggcgcggccggtgcggcggagcaaggctgggtcaagctcgaggccgacgaggaagaggaagaacgtcgccgccgtgctcgtgtgctcggtgtcgccacttgccatagcgccgtgcgccgggtggccgctgcgcctcgtcgtcgttggtggtgggtccccgacagtgcgccgctgcttccccggctgcgcgtcgagctgtcccagctcaggccgtcacgccgccgctgctcacccgtggtggcaggaagaagggagaaagaaaagaaagagaggaagagagatggagagctgacatgtgggcccaagggcatttttgacatttcacgcgatttctctctcctcctcaatcggaaatcattattttaa

SEQ ID NO: 48537 - DNA, 1669 bp, Oryza sativa
  Clone ID: PAT_MRT4530_51202C.1
atggccatggcgatggcgtcgccgcccgcttgcccattcctcctctcgctctcggccggcgccaccgccatttccaccgtgtccgccgcctacggttccgtttccgccccgcgcgcgcctctcttcctcctcgcctccccgcgtcccgtcccgcctcgccgacccctcgccgcgggctcctcatctcccaaggccgcggcacccgccgccgtcgagatccccgaggagtacgtggacgatgttgatgcggtgaacattgcgcaggacgtcacccagctgattgggaaaaccccaatggtgtatctgaataatgttgtcgacggatgtgttgctaatatcgctgcaaaacttgagtacatgggaccttgcaggagcgtcaaagacaggattggattaagcatgattaatgatgctgaagagaaaggattaatttttccaaacaagaccattttggttgaaccaactactggaaatactggtataggcctagcttctgtggctgctgctaggggatacaagctaatagcaactgtaccttcatcaatagatgttgagagatgtgttcttctacgtgcatttggagctgagattgtgttaactgatcctaacaagggactaaaaggagctcttgataaagcagaggaaattgtttcgaagacaccaaatgcatacatgtttcagcagtttaacaattccgctaatagtgagatccactttcaaaccacaggcccagaaatatgggaagacaccttgggtactgttgacatactagttgcaagcattggcacaggtggcaccattacaggcactgggcgttatctgaaaatgatgaacaaagatattaaggttattggggtagaacctgctgaaactagtgtaatctctggtgataatgctggttatattccaagcatattagatgttcagctgcttgatgaagttgtgaaggttaccaccacagaggcagtcgatgttgcaagggaacttgcactaaaagagggcctgctggttggcatttcgtcaggtgctgccacagttgctgctattaacgtcgctaaaagacctgaaaatgctggaaaattgattgcgattttgaagggtgaggttccaggtagattacaacgagtagtgcctgaaattttgaaacgccataggcactggtcagcctcacagaaggttgaaattgcgcacggttgctgacgtccgatatatgactcggtccgaagaatgaggaagagataactaacttctgccactccaggaagaagaaggttgccagttcttaaacctaacatacttccacggcataacagattttgaagggtgaggttccaggtagattacaacgagcagtgcctgaaattttgaaacgccataggcactggccagcctcacagaaggttgaaattgcgcacggttgctgacgagtagtttgcaagcctgcaatttggttccagggaatcgtgtccaaaactattcataactgtaaatcatctgcaccaaagcgtctggaaccagaccacatccacgatggaatttgttgaattagatattgcagctagcatagtaggatctttcttcaatagtttaggcttggtaatggaacagatctgtaatgtgatataccttttgagctgatcttgttgacttattgaacgaaaaaaaaaaa

SEQ ID NO: 48538 - DNA, 4181 bp, Oryza sativa
  Clone ID: PAT_MRT4530_51203C.1
ggcaaaaattgcaacatcaccatgcaaataacagaacgatgtcataacataagcaatttccaacttacaaaagcttgggttgggttctttctcagtaggaaaacatatgtacaagcatgggaacttagttccaagatatatatacttggctctacaactaaagaggcaatcttctacacaaaagaagcctacaattggggctgggtctcttcctgttattgggtattatgtacattgactgaaaccaaaactgcaaattcacctaccaaaaggggctacttttctttcctgtaagttaaaaggattaaactagtttacttacattccattaacaatcaaaatctgcaagaaccagaagcatttacactgatttttcagatgattcctccatgtttgttgaattgagtgagaagtcatcgaggaaattgctgcccgagtcaacctgaaattctttgaacattgtcatgacctggatcatggtaggcctgcggttaggctggtcatccaagcagcggcaagcaatcttcagatactgatagagctccaattcactagatgtcgtggccatcaatgtaggatcatatatttcactgcatctgtcctccaccatctgcttcacccagccaacaagattactgtcaccaaattcagttgggtcaatcggtttcttccctgtgaggagctccaagagcacaactccatagctgtacacatcgcccttggttgtgcaccggaaatcctggcagtactcaggtggcacatatccaggtgttcctgaaagcatgctcacagtgagatgtgaatcgagcgcattcatgagtctcgccatcccaaagtctgacacataggcatcaaagtttccatcaagcaacacattgctggacttcatgtcccggtgtatgatatgtggaacacagctgtggtggaggaatgctagccccctggccgagcctattgcgatctttttccttgttgcccaattgagatccatattagcctcacccttgtcatgtaggacgaaatctaagctgccattcttcatatactcgtaaacaaggagccgctcatcaccaatcttgcagtaacctagcaatggaacaaggttgcgatgcttgatcttgccaatggtctccatctctgcggtgaactcccggtcaccctggcctgtgaaatgcatcagcttcttgacagccacaatgttaccatccttgagtttggccttgtaaacctcaccaaaccctcctgacccaatgagtgtctccgcacaaaagccattggtggcctgatgtaggtcagagaaggtgagcttcctcaatggattctcaaatatggccatattgatgctcaatggctcaccgatacctgaaagcttccagcttgatttgctggatcctgggaggctctcagagcaaccagcttgtatctcttttgttttgtttttgtggaacttccatagcttgtaatgaataatcagcaaggagaacagtatgagcactgagagtgtcactgcaaggaacacgctttgtcgagcaaaattcctatgcccataagaagtttggggcagaccacctgcgcctgaattatgcacacaaggattcaagggaataccacagagtccagagttgttctcataccgggatgctggaaatgtgatgagctgccctgatgttgggatttcaccagtgaggttgttgttggagacatcaaaatctgcaaggaaatgcagacacccaaaccccggagggatgacaccggtgaggtggttgtgtgagagatcaagtgcaccaatccccttgagcccagtgaatgcatctggaattgcaccggtaagttcattgtgacccaagttaaggacctcaagatatgtcatgttcccgaagctcgctggaattgtaccggtcaagctgttatatgaaagatcaaggaagatcatgctcccattgtttctgaaagtgtatacagttgtgccagtgtatatccttgtggaggagcacaagtgcacagccgggaaattggcaaggcggtctggccgaatgtctaggaattcaaacagaacaccagcaccagggcagatgttgccagcctcattacggaggaaagcaaactgcttgccagagacaattgctccggtgatgagccccgcctgtgctgctagctgtggcggtattgtgccggttaactcattgctgttgaggtcaagccagatgaggttgctgcagctgccaagctctgctggaaccttgccagagagtgaattcttgttaagctgcaaaatggcaagattctggaggttgccgaatcctgagggaatactcccagtcaggttgttgccggcaagtgataaccaaatgagattcacacacctggtaatggactcagggatgtttccagtgaagctgttgtagcttatcaccaatgtctccaatgccgtgctattgaagcagaacttgtctggtatctcaccggagagattgtttgcccataagaccaaatcaacaagttccaaatcaacaagcttcagaagaaacaatatttctggtggaatctgaccaaccagcaggttgaagctaaggtcaatagactcaaggttgacacaattgctcagtgatgatggcactgttccattaatgtaattgtttggcaggagaagtttccgaagtgacggcaatgatgagcacagatccggcatgatttcgccatcaaactcattggatccaagatcaatgacttcaagcagagggcacctggaagcaagtgcaggcagtggatttgcccctgtaatattgttgaacggcagccgcaacacacgaagagaagaaatgttggtgatgacagtttcgacgaagtccccagagagctggttgttgccaagatcaagcacctgaagaaacctacattgtccaaaacttgcaggcaagctgccaatcagctggttgcttgacaagtctagctcaaccagcgttttgcacaagatgctcagcttatccgatatttctccagtgaatcggttgcccgctagtgagagtcgcctcagtgcttgcaattcaaccaagaacgtcggtattggaccagacagaagcttgttcccagacatgtcaagtgcctccaatcgacggcaatcgacaagactccgcggcaaccctgtgctacgtagtctgttgtatgaccaatcaagcaatgtgagatttgcacacccaccaaattcatagtctgagatgtccatggagaagttgttaccggcaatgctcaagtatgtcaaattggctggagccatggccacaaaccttggaggtagtacaccggacatgaggttccatgacaaatcaagaacagaaacttcagtgcaaggtgcaagccccgggaggcttccggtgaactggttggccgagaggttgaggtactgaatgccatggcagccggtcagggagtagttcagcaagccggcatccgacaactggttccgcgacatgtcgagcctgcgcagggacggtgggaacgggtagccgccaccggtgagggagttcctggacaggttgagggtctggaggccgccgcaggacgccaagaacgcccggggaagcgtcccattgaaggtgttcgacgaaatgtccacctccacgagcgcgcacggcgccgcccgccgcggcgagccgtggcgcgagaggtcgccgtggaaggcgttgccgcggaggtcgaggcgccggagcgccgagagcgcgaggagggcgtcgaggcggaggcggccggagagcgacatgccgctgaggtcgagcgcccggacgcggccggcggcgcacgagacagccgggcccaccggccgcggcgagccgggggtggtggagttggcccagcccgcgagcgcgccgccccgggtcgacggccacggacgcgtccttgaacgcgagcagcgccgcggcctcgtccgccgcgccggcaatggcgcgagccaggtgaagcagcaccaccgccgccgccacaagcagcagcaccgaaggcgccggcgccaccacgcgaacggcggccatggctgcttcttgatgctgaaccagttgatttcttcacatggtaaagaagactaggagcttcgattcgaatcaaactctcgcgggctcaagtatctcgtcggaatccaaccccgcatcgagaaggggtaaagcggcatgcagcaggtagaggcgaag

SEQ ID NO: 48539 - DNA, 147 bp, Oryza sativa
  Clone ID: PAT_MRT4530_51204C.1
atgcccagggtgtgcggctgccctgaggtcctcatgtgcgcccacgtcaaccaaatgaatgggaggggcgtgacatgtcgcgcccgcatcaactcccgcatggtcccacctcgccacctctcaagggttgactggtggaccccataa

SEQ ID NO: 48540 - DNA, 487 bp, Oryza sativa
  unsure (1)..(487): unsure at all n locations
  Clone ID: PAT_MRT4530_51205C.1
gagctggaaaggcttagtaactatggacncaatccttatttcattctgaacgtgcactgncggtcatccncatctcatacccattgttttgatgctagaccagtcggaggtagttggcacgcctgtgccagcttgaagcttttcttgctttcgactcaggcggaagcaaggttctaattcattcattcagtctttgtttcatttgttattgcaaatccggattattacacaccatgtgttgcttctaatagttcggcagccggcacacaaggacatgagcagaatgtgagaagtgttgagattaattgtcacgtcttggagaactgtatgcagcacatccaataaaagcttagtgctgttgaagcaagttgtagttctctcatatctttgaactgagtattaactcctgtaataccaagttaatcggaacgcagtgtcatatctgataaggcacgccgtgttcatatgaaaaaaaaaaaaaaaaaaa

SEQ ID NO: 48541 - DNA, 135 bp, Oryza sativa
  Clone ID: PAT_MRT4530_51206C.1
cgagcaaggcgggtgttgaaccaaggacctctcccccgacgagcatggcgcatgccgtctcagctagtcaagcgagcacgaagccaaccgccacagttgggagacggcgccaacatctcgcgagacgatccaacg

SEQ ID NO: 48542 - DNA, 245 bp, Oryza sativa
  unsure (1)..(245): unsure at all n locations
  Clone ID: PAT_MRT4530_51207C.1
ggcattattttaatgatggagcacatcattttaatgatagagggcatccnttcnatgatagagggaatnacttcnatgatagaggacatcantttaatgaaagagcaattaggggacaaatgcaccatgaagttaatagaggaagatttcccccacacttccctccaggccccccatttccagaccattttaatggtccgtccaccccatttaattgtaggcanccatcgattcctncaacaggg

SEQ ID NO: 48543 - DNA, 397 bp, Oryza sativa
  Clone ID: PAT_MRT4530_51208C.1
gaatattggccgaatgctgagtagccactccaaaaattttagtcatcagtcaacaaaatcaaaaattccttccactccacaaaatgccgtgtcaaaactacagggaattcgattacactcaacaaagtcacaaattgcatcaacagcaatgttagagccatatgattctgtataaactagtagcaacttttatgcaaggaaccttttgcccccaacctgctcgatcctgctcccctcacctcatcaatgctaaggcagctctgatcacacggacttgtaaatcacagcgtccacaacaacaatgccatcttggaacaacaaaactgtatatctccgaacaaatgctacgagatttttcgacggccaaggtgtcaaacgtttgatcttctcagaggca

SEQ ID NO: 48544 - DNA, 228 bp, Oryza sativa
  Clone ID: PAT_MRT4530_51209C.1
atggcagcaagaggttcattggccgggcacgacgacgatggcatgcgctccctcctcacacctggtacctatgggtgttctggctggtacctgggcacccacgagactaccacaaccacctctgcctcccccaccttcgccgggagagaccctcatgaccgggggccattggcggcgacaccggaggcggagccgccggggccctaccccgaccccgacgaggagtag

SEQ ID NO: 48545 - DNA, 292 bp, Oryza sativa
  Clone ID: PAT_MRT4530_5120C.1
cgtactgtaggttaatctatccatgcctcgaacacttcccaaataataccaccgactcacataggtatacaccactggccatacccgtcaagccactcagacatcattgcattcaaattacataatttcaaccgggatacatccatattaggaaggtccgtaacgctacataaggcccaaacaatgctgacccgcaccaaaatgggctttctccatgcctgaaaggcggtgaaacctgtgataccttaacgaggacaatgcctccgtccttactgcaaaacacaggagcaac

SEQ ID NO: 48546 - DNA, 144 bp, Oryza sativa
  Clone ID: PAT_MRT4530_51210C.1
atgcctctgttccgcgcgaaaacagagtgcaagttgccacgggctgcacacgaaagcggagacgaccactcggttttggaggtgggaacagcagagacccactggaggcatccaccaatctgtggtgttggtaacaccgaatga

SEQ ID NO: 48547 - DNA, 578 bp, Oryza sativa
  Clone ID: PAT_MRT4530_51211C.1
ctttgctcttgctcttgcagcctctctcttgctcgctcttgcgttgcacgtttgcttgctttgccaccatgtctcaggaggagcagcgccatggccgccagctgccgctagctacgagtggcgtcatcaccttcaacggcgtgccgctctcgccgctgaccgccggcgcagagagcgacggcgacgacgacgacgtcgtcatcgtcgacgcgtgtaataacgggaagaggaaggtcggtgatggggaagaagaagggcgcggatcccagggcggcgacgacgacgacgacgacgtcgtagctgtccacggcggcggcggcaaccgggcgtgcatgttcgcggtgcgggagcgggagaggcggaggcggatgaacgacatgttcgccggcatccgccgcctcgtccccaacctcccggagaagggggaggaggtcaggatggaggcgcaaaagcaggagctccagcgcgagcgagaccgcctggcaatggaggtggcggcgccgctctagaggatccaagcttacgtacgcgtgcatgcgacgtcatagctcttctatagtgtcacctaatcattctgc

SEQ ID NO: 48548 - DNA, 648 bp, Oryza sativa
  unsure (1)..(648): unsure at all n locations
  Clone ID: PAT_MRT4530_51212C.1
gccctttagagagaggaggcagagcgcatggancataactgcatnctgggacgttcttgcatttgttttgcttcttgtgattggttatctatgggcgccatcccagagctcacaaagatacgcatattcaggcgaagctgccgacgacgatgatgaagaatctcaatctctgacgaaggggaccgacggtgatgtagggatggtaaaggttgacaaggacagaagtggtggtgtcagtagtgctttcagcttggaagacgaggctgaggaggacaaaagagagtgacctgctggagcaagaatgctccaaggttcctgagctttcttcttctttttggtggtgatttgatcttctcttttgtaccttctcagttacacaggtcatgtagaagcgcaccattttatccattcctgcgaggatagtatgttcgtggtgttccatgtggagtttcacataggccaggatggtgcacattatttaaatgactacacattcacaacagtgtacatatctgtttttgttaccggttgtgcattgcctgatgtatcatggtatcatgtatgaaactggtgaacgcagtgtttgacagatctgtttgcctaattgactggaagttgcagatgccaaatagccaaagtttttaatcc

SEQ ID NO: 48549 - DNA, 1710 bp, Oryza sativa
  Clone ID: PAT_MRT4530_51213C.1
atggatctcctccgcgaccgccgcctcggcgcgctgctggtggtggtgctggtgctggtgagcggcgcggcggtggaggcgtcgatccacacctacgacagggagccgttccggggaggtggggaacgcgttcctcctctccggggcgcccgcgagggcgtcgtcgccgacggggccgacctcgccgccccccgcctcctccttcatcaaatgctgggttttcttactgtcaggttcacgaatgttactttctggagaactccggaatcagctgaatcacatgcaaaaatggcacacagtacaggtctggtacaggccattttatttgaagcagctgacagggataacattgggggatctgcctatggtggacagaggtccatatgttgtacccctgaccttgctaaactagagggctgcaaacaaggggaagtaatcaggagaccatcctctgatgatcctgattggccttatgtgctagatacacacttcagtggtagtcacctttctgtgaagttagaagatgaggtagttcgcattaccaagacaggcatgtacaacttgttcttcatttcctgtgatccaaaactgagaggccttagtatgagtgggaagacagtctggaggaatcctggcggctacctaccagggcggatggcacctttgatgaaattttacgtttttatgtcactggcttatctattggtcatggttgtctggtcgagtcagtatataagattctggagggacatcatgccaatccagaattggatcacactaattattgcacttggcctttttgagatgacactatggtactttgaatacttaaacttcaacagtagtggtgtacggccaattggaatcacaacttgggtggttactgttggagccatcagaaaaacgatttctcgcctattgatcctttctatctcaatgggatatggtgttgtccgcccaaccctgggaggactgacctctaaggtgttgctccttgggctgacatatttcctggcttctgaattgctggatattgcagaaaacgttggaacaattaatgacatttctgggaaagcaaggcttttcctagttcttcctgatgcctttttggatgctttcctcatactttggattttcacttctctctcccgcacacttgagaagttacaggctaggaggagctcagtaaagctggatatatacagaaaatttactaatgcattggcggtatctgtaatagcttcagttgcctggattggttatgaggtctatttcaaagcgacagatccctttagtgagaggtggcagagcgcatggatcataactgcattctgggacgttcttgcatttgttttgcttcttgtgatttgttatctatgggcgccatcccagagctcacaaagatacgcatattcaggcgaagctgccgacgacgatgatgaagaatctcaatctctgacgaaggggaccgacggtgatgtagggatggtaaaggttgacaaggacagaagtggtggtgtcagtagtgctttcagcttggaagacgaggctgaggaggacaaaagagagtgatatcctattgttccatatggccagataccaggaaacaagtgacctgctggagcaagaatgctccaaggttcctgagctttcttcttcttgaaggtggtgatttgatcttctcatttgtaccttctcagttacacaggt

SEQ ID NO: 48550 - DNA, 2326 bp, Oryza sativa
  Clone ID: PAT_MRT4530_51214C.1
atggcgccgccgccgccgtcgccgccgtgccggccgcgagtcaagcccgagcgcgcccttctgtgcttctccctcctcctcctcctgaccgccaccacggcgaacgccagcatcaccgactgcccaactacaagcagcaccaactccagccatgtcgacgacggtgccttcggggccaacctccgcgctctcctctcctccctttccgcagccgcggcggcatcgtcgtcggggttcgccgagaacgcgaccggcgcggcgccggacacggcgtacggcctcgcgcagtgccgcggcggcatcgtcggcggcggcaatggcaccagctgccgctcctgcctcgacgactcggtgcgggacgcggccaaggcgtgccccggcgagaaatccgccgtgatcatctccgactactgcctcgtccggtactccaacgcgagcttcgccggcgccgccgacgagcggacggtgaagctctggtggaacacggacaacgcgacgcagccggagaggttcaagtcgctgctggggacgctgatgggcaacctcaccgacgcggcggcgcgcgcgtcgtcgccgctgatgttcgcggccggcgagaccgacctcccgcccttcaccaagatctacggcatggcgcagtgcacccgcgacctcgccgccggcgactgctaccgctgcctcgtcggcgccgtcaacaacatcccgaaatgctgcgacgggaagcagggcgggcaggtcatcacgaggagctgctccatccggttcgaggtgtacccgttcttcgacgcccaggccgccaaggcggccatgtcgcctgcgccggcgccggcgccggtgacgacgcccaccggggtcaatggaagtaatcacacagtcagtaagtctgtgattgtcccagttactgtgggagttgccgtgttactagtggtaatactgctgctaattgccctttgtctgtgcaagaggaacagaaaaccacataagcatatgatgattggaagcgtcgatcttggagatgaagacgaaatgagaggctcagaatctctcttgtatgatttgagtactctaagagcagcaactgccaacttctcagaagaaaataagctcggagaaggtggatttggcccagtctacaaaggtacactgcaaaatggtcaagagattgcagtgaagagattgtcagcaacttcccatcaagggcaattggagatgaagaatgaggtagtcttggttgcaaagcttcagcacaagaatctggtcaggctgctaggatgctgcatcgaagaacgggagaaaatcctagtttatgagttcctctgtaacaaaagcctcgacactatccttttcgacacttcaagacagcaagaccttaactgggagcaaagattcaagatcattgaagggatcggaagagggcttctttatcttcatgaagattcaaggctcaagatcatccaccgtgatctcaaagctagcaacatcttgttagatgtagacatgaaccccaagatatcagacttcggccttgccaagttatttaacatggaagcgagcgtagcaaacactagcaggattgctggaacctacggatacatggcgccggagtacgcgctgcacggcatcttctcggccaaatccgacgtcttcagctacggcgtgctcctcctcgagatcgtcaccggccgccgcaacacctgcctccatgactccgaggatctcctggcatttgtaatccccgcgcaaatcctatctaaagtttaagagctgctcgacggcttgccccgccgccggccgccggccgcaggagcttctgcggtgcatccacgtggggctcctctgcgtgcaggaggacccgcagctccgccccggcatggcggcagtcgtcgtcatgctcaacagccgctcggtcacgctgccggcgccctcggcgccggcgttcgtctccgcgagccgtgggatcggcggaagcccgccgccggcggcggcggcgggagatgcgccggcgaggagcacggatcacgaggttcctacggctgctcgatagccgtcgatcaaacggcgcttctgtctctgaactagagccccggtgacatcggagattcggaggactgacggctgggcccggcttatgtttctgctctgaatttgaaaatttgttgctcgttttgcattcaaaatttctctcggatttaatgcatttctgtatgccgttcagtgttggagtagttaagtggatatgaaaatgtaatgacggctttgtaatttaaatttttcgacgagcttagcaattcaagtggtttatgtagtacaaaaaaaaaaaaaaaaa

SEQ ID NO: 48551 - DNA, 267 bp, Oryza sativa
  Clone ID: PAT_MRT4530_51215C.1
atggaatatggggaagttgttatggatagtgcaagcctgggaactgcacatgaagaggtagaatatctaaacacagtcatagacaacccagcggcgtataaccgacctccacgagaagggcttgctgctgctagtaagtggcagtgcgagttggatgggattgcagcgctggcggtagggcaccgccggtgccccgacgacctccggaacaaaccttgctctgagaacaaaccttgccggtatagcagaagggaaatttgggaataa

SEQ ID NO: 48552 - DNA, 978 bp, Oryza sativa
  unsure (1)..(978): unsure at all n locations
  Clone ID: PAT_MRT4530_51216C.1
ggtgccaagaaggccgtccttgtcgggcactcagctggttgccttgtggcagtggaggcatactttgaggcaccagaaagggtagctgcacttgtnctggttgcaccagccatttttgtgccagttttcaggaggaaaggtgtnaaggagaatggtgtaggtgaacaagaatggcagaataagaaggattccaatgattcaaatttgcctacaaatccactcaataggatttggggaaaattcctcgagctatgcttgtggattgcagggtttcttatgaatatgattagggcaataaggtggtgttgttcgatctttgtattataaatctgttgttgctgttcttcgatcatcagttggcgtgatgctggtaagattgatcatggataagtttggtatattggctgtccgcaatgcatggtatgacccaagcaaagtgacggatcatgtcattcaaggttacactaagccattaagatcccagaggttggggagatggctcttttggagtacactatatccatgatcatggattctatatcatcatcgaaagtgcctgtctcagaaaggctttctgagatctcgtgcccagtgctagtggtgagtggagacactgatcgccttgttcctcgttggaataccgagcgcgtagcacgtgcgattcctggtgcaggatttgaggtgatcaagaactctgggcacttgccacaggaggaacgacccgaagaatttgtctctgttgtcgaaaggtttctgagaagagcttttgggagacccaacaacgagcaagagcaagtgttgcaagcagctgtatgatatgaaaccagtacctgtagataagcatctagtactagataaccaatacatgtttagatgcgttctgtactagttctctgtaagccgttaaattttatttgctaaaaataatatcattaagttaacatttgaatttacttttaaaaaaaaaaaaaaaaaaaa

SEQ ID NO: 48553 - DNA, 232 bp, Oryza sativa
  unsure (1)..(232): unsure at all n locations
  Clone ID: PAT_MRT4530_51217C.1
cccacgngtccgcagcaatnaggccgtcgctgatgagatccgcctcgcagatccttccgncgccgacgngntaacttncttccggcttccggccaaaccggaagcggaaggtcgccaatccttgggcgcngccngcggnattcgggcangnggttctncctnctcatgaagctgaacccgctcgtatnctccctntncctctacgatattaggccggcanccccagggcgtt

SEQ ID NO: 48554 - DNA, 1446 bp, Oryza sativa
  Clone ID: PAT_MRT4530_51218C.1
atgccgatgcatctcccacgctccctccaatacccaccctcgactccacaccctctacattccaccgccttctcccacagcctccgccctcgccgtcccaatggtcctcccccagccttcgcctctgccgagttcccaggttcagttccagacagtgcccagatgccaccacgacgccgccgccgccggagtgtggctggcattgaccaggacgatctccttgaccccgacgccctcgccgacccagacagcagcttctacgagatcaatggcgtaagggtccaccacaaggtttgcacccatgaggattccagtgaccaatctccagactctgccatcacaaacgcggaccaaaaccaaattggtttgcccatagtgctattacatgggtttggctcgtcggtcttctcttggacccacatcatgcgccctctagcccgcattgctggtgccaaggttctagcctttgatcggcctgcctttggtctgacatcccgaaccatctggtctggtgatgacaccaagcctatcaacccctactccatggccttctcagtcatggcaactttggcattcattgaccaactcggtgccaagaaggccgtccttgtcgggcactcagctggttgccttgtggcagtggaggcatactttgaggcaccagaaagggtagctgcacttgtgctggttgcaccagccatttttgtgccagttttcaggaggaaaggtgtgaaggagaatggtgtaggtgaacaagaatggcagaataagaaggattccaatgattcaaatttgcctacaaatccactcaataggatttggggaaaattcctcgagctatgcttgtggattgcagggtttcttatgaatatgattagggcaataggtggtgttgttcgatctttgtattataaatctgttgttgctgttcttcgatcatcagttggcgtgatgctgctgatagcctcttcaatggatactttagtaaatgtgtcaacaaaagtaagattgatcatggataagtttggtatattggctgtccgcaatgcatggtatgacccaagcaaagtgacggatcatgtcattcaaggttacactaagccattaagatccagaggttgggagatggctcttttggagtacactatatccatgatcatggattctatatcatcatcgaaagtgcctgtctcagaaaggctttctgagatctcgtgcccagtgctagtggtgagtggagacactgatcgccttgttcctcgttggaataccgagcgcgtagcacgtgcgattcctggtgcaggatttgaggtgatcaagaactctgggcacttgccacaggaggaacgacccgaagaatttgtctctgttgtcgaaaggtttctgagaagagcttttgggagacccaacaacgagcaagagcaagtgttgcaagcagctgtatga

SEQ ID NO: 48555 - DNA, 208 bp, Oryza sativa
  unsure (1)..(208): unsure at all n locations
  Clone ID: PAT_MRT4530_51219C.1
gttgcccggcatcccgccttcggcggggccgatttttccccatccatntgctgtccggccagcaaagccaccggcgcgctccttccccaacaaggccgcggaatcagaaggaagagagcatggtatatatgtccccctagccacctcagcatcgccccgccacgtcggcggtgggacggcgccaaagaggctggcgccgtcctgttga

SEQ ID NO: 48556 - DNA, 518 bp, Oryza sativa
  Clone ID: PAT_MRT4530_5121C.1
caactggtactaaaaatgcatatttagtaccagttggtgttaccaactctctggcaatcttcaaagctctctggtaatctccaactgaaccaaaacaacgtttctttgggtggcttgtcttgcatcagaaaattcttacagctgaaaatctccttaggagacattggccctgtaattggatttgctatctttgcacaagtgcttttgaagattcttgccatctagcaaaggactgcccttatactgtttcagtttggactcttgtcacaaattggttgggctacaattcagcagctcttcagccgcatcaaatttccaatttatctcaaaggtgggactttctaagttccctcgcactggcagagaggagacgaaaaatcctgaccgcgctaatatctacttggtggaatgtgtggcttgaaagaaatcgaaggattttccaccaaatctccagggatgaacaacaggtggctttcatcataaaggaaaatatagatcaaattagactttcgaggctt

SEQ ID NO: 48557 - DNA, 324 bp, Oryza sativa
  Clone ID: PAT_MRT4530_51220C.1
atggccttcatgtcatcatcaacaagcatgacacagaggccaccaggggagaacgacatcatctcttcctccgttgccacaaccaatagagatgtgcccatcggtatcacggtgatgtccttcaatgatgttgctgccagtggcagcgcaggctctggcgatggggcagcaactctccggtggtgtctagctggatgcttccaagtggcgcccgtcgacaatataatgatgtctttcaacaacattgctgcatcggtgaccatgctggctctagtgatggggcaacaactcttcggtggtgtccagctggatgctccccaatag

SEQ ID NO: 48558 - DNA, 615 bp, Oryza sativa
  Clone ID: PAT_MRT4530_51221C.1
aaattaatgtcaataagataaagaaagagtaatatacattaacaatcctgagtttcaagattcttgatcaagacaaagagtaaaaaacaatgatgcaagagagttgaaagtacactcgatatattttgatctacatttactggacgaagtaaggaaggtcaagaacgtagagaaggaagtaagcccaagtcaccccagagatccctccaaagaagaatcctccagtgaacttagcccatccatcagccgtttgaagctggtcaggctgcttcttccgcccagtcaaagtcaaactcggtgcgatcgatggctctccttccttgaaagaagagataccgtagatggtgaggcacatgctgaggatgactaccagcccagccgcggctaaagacccggctgacccggcgtaagcagtgttccttaatgggccagctttgacgaatgggcccactaagaagaaaccatgggccaggcccacttccacaccgcggaggagagggttgacggcggtacggtatccagggaggttggaaaggaccacgcgatcaatgggcttgatgtcaccggagtttccaaacttccgatgaatggatcaccgttgattggttgaactac

SEQ ID NO: 48559 - DNA, 231 bp, Oryza sativa
  Clone ID: PAT_MRT4530_51222C.1
cagatatagtcggatgtagtacgtatcgatatgaacacagtggatattagtcttgcttagtagtgaattctgtcacgctatagccagattatataggctaataagtttgactgttgtactcttctcgcggtgtgcttaagtatcctatcatcggaacccatagtaatgtatatgtgctgtggcttcttagcccaatacatatttaagtatataaagggtttattatattat

SEQ ID NO: 48560 - DNA, 639 bp, Oryza sativa
  Clone ID: PAT_MRT4530_51223C.1
ggaattcggcacgaggaatacataaactgagcagcaatgtccatggttacatctttcaacctcctgatgagccagacggcgcctccggtactgaaagctccctttggtgcagccctgcgatccgcaggcaagccagcagcggcattggccctccaaaggaagtctccgcgtcttttggtgcgtgctaataattctccgaaaagccctgctgatactgggcatccctttggcatcgcaccctttgccctggtgcaccccaagttcccaccgacgtcaggcaacaggtggaggatcacggaggacgacgactacgtgaagctgtggttccacgtcggggagatagacagggagaagctcaaggttcggatcgagcacgacacggtgctcctcgtcagctacggcggcgccggcgacgagacgtcgacgccggcgaactccctcgacgtgcgcctgctgctgccgaacaagccgtacgacacggccaaggtcgaggccgagctcaccttcgggacgctgctggtgaccgtcgccaagcgcaagcccctgcaggggcgtgacaaggtcggaatcccgatcactccggctccaagcaatgagaaaaccactaccgccaccggacaaaccggtagcgagacctag

SEQ ID NO: 48561 - DNA, 349 bp, Oryza sativa
  Clone ID: PAT_MRT4530_51224C.1
tctttccgccgggccccgggaagacgacgagcacgttcgacgacttgaggtcgccgtgcggcggccggtggaagagtggcagcgtctggtgcaggtaggccagcccccgcgccacgcccttcgctatcgccaacctcgccggccatggcagcggcgtcctcccctctcctctgttctctgcagcaaaatcgaggatccgatattcctttatttttatatgtctcttaaaaagtcacaaaaaaatttaaaaaatttagtaagatagatctatatgtgatttatcactccacaacactccacaacacatgcaaattcaaatttaacttatataaatagatacaaaaataac

SEQ ID NO: 48562 - DNA, 164 bp, Oryza sativa
  Clone ID: PAT_MRT4530_51225C.1
tttgtttgttgtccaaaacaacagagttaccagcattaccaaatatggatgcaacatcaaagttaaagataactgcaaataaaattccaatatatgagcgaacagacgacggaccaacattgacacacaattcgactcccacaaaaatgtaagtttaacataca

SEQ ID NO: 48563 - DNA, 4165 bp, Oryza sativa
  Clone ID: PAT_MRT4530_51226C.1
ctgcaggaatcggcacgaggccccccccccttttttttttttagacgcacccgacagaaagctagcagtagttaacactaaattattactattttcttacaagatctctcatcaaacaattttgatatcgtgctggtagagccaatacaggcaatattcgagttgggatctagtatccccaaaagccaaaaaaaaataaaaaagaaacagtacaaacaacaacattttagtcccggtaaaagattgttcagtacagtcccttaatccgtatccctagtatacaagaaacaaaatttctttgcaccacttcgcccatggcgtcaatttggcataatccaagggcacagcacaccagggatatatataactcgaggatgtggcctactgactgctttctgcctcagggggtcagaccgctaagcccaagttagatttaagtattgactatgaacgaagacatagtacgacaagcgagtgccccatgtaatatttggtctcaacgtttcttctgatccttcccagttttgttatcctgagtgagcatcctgggagcgatggccatcgccataagctcctggaacagaagcttacacgcgtagggtatatgcacttggacaatgtcggttttgttcttgcaccctctgcactcaaaggaattcttcttgagattagcaatagcaataagcccacacttctcgcatacatggactctgtacgcatcactctggtcaaataacctttccttaaggaaaaatgcagcgccatgagcaatcatacagtccctctccatctctccaaaccggagaccaccatcgcgtgagcgcccctctgcaggttgtctggtaagtatctgcacaggaccacggcctctagagtgaatcttgtcatccaccatgtgcttaagtctctggtaataagtaggaccaaggaaaatcatggcagttaattttcttccagtgtgaccgttgtacatggtctcgaatccacgcatctgataaccacatttatgaagtgctttgctgatgttatccacagtaacatcagtgaaaggagttgcatctccttcttttcccatgtgagcagcaactttacccataatacactcaatcagttgaccaatagtcatacgggatggaatagcatgtggattcacaataatatcaggtgtgatgccttcaatagtccatggcatgtcctcttgtgtataagtcattcccacagttcctttctgaccatgcctactactaaacttatccccaatctgtggtatacgaactgatcgcattctaaccttaacaaatcttaaaccatcagcatttgttgttaggagaacctgatccaccatcccactttcactgtggcgcagcgaagtactgtgatcacgctttgtgtatctagtagcttgcccttgggcatcatcttgtggaataggagatgtcttcccaataatgacatcttcaccagatacccttgtacctggtggtgcaagtccatcatcatctagtttatcatatgacccatgacgcattcccatagtattctccctatttggacggccaaactcctctttgacaagagtccccatcttcttttcctcatctctgtatgagcggaaaaacagagatcggaagaatccacgatctattgaagattggttcataataaccgaatcttcttgattatatccagagtagcatgcaatagcaacaattgcattaatgccagctggtaactgtctgaagtgcaaatgttccatagcacgagtagtaacaagaggcttttgtgggtagtatagcacataggccaatgtgtccattcttaactgatagttggtaacatagattcccattgcttgttttcccatagcagactgatatgtattacgaggtgactggttatgatctggaaaaggaataatcgaggcacagacaccaagtatcaatgaaggatgaatctcacaatgtgtgtaagtttcagagtacgcctcctctggattgtgtcttgcaccaataaggtcattaatggtcatggagatcatagtagtttcttcctcttcagtatctatgtactcaataaatcctttcgcaactaagtcatgccaaccttcctcaggtgtctccctttgctgcaacgctcggatatgtctctttttaataagaagcctttggttttcaacaataaacagtggacgactgcaacgcccatagtctgtataaagtctgagttctttaagacgaatatcacgaaccacaccaacttcagtgttgacatcaatctgtcttctcaaacgcctaagagtcttcaccaacaggtcagggttcctgtgaattccaacccaacaaccgttgacaaaaattttagcagcttgtggaatgacggctggtgatatctcctcaaaattttctgtgccccactcctccaaaaattccaaaataggatttgcagcagaaccaacagtgatatacaccatcaatgcaagatttttaaccaaaccacaagcttgtccctcaggtgtttcagcagggcacatcattccccaatgagaattatgcaattgccgaggttttgccaatttcccttcacgcccaattggagagttaagcctccgcagatgagataatgtagatgcataggtaaggcgattaagcacctgagaaacaccagccctggtaccagcttggttagcctgtccccagtttccagtagcaagggaatacttcaacccactagtaatggttttggctttaatagcaaattgcagattgacttcctttccattatccacacacttttgcacatatgacctcacatcccttgtcaactttctgaaaagcattctaaacagtcctccaagcaatggacctgcaagatccagtcttttgttgccataatgatctctgtcatcttcagctcttcgaccaagagcgcacatcagcagacgatgaataatgtacccaaagtagtacgcctttttggtttcacagaattcacccacaccaacatggggtaacatttctttttgaagtatctctttggcatacttaattctcttttctttagttacaccaacagtagctccacgctttccaatgtaatccagagcaacctgctgattctgaatgacgaaagcttcctctaaagatgggcgtagcaattccatcatttgtgtatcagagaaatcatagcatatgtgctctaatatatctttatcagcaacaaatcctaatgctcggaacacaatgatgatcggaatgtctgcacggatataaggcaaagtagcacgtatatattgaccagatgaaccccctttcgcgcctgccctagaaagcatccgcacaaacatactactagcaggtctattctggttctctgccatagaacggacttcagccacgtatgcgtatttattaggctgcctcttcttaaacacatagacatggttggtgctcatcttctcctgggcaataaggactttttcactaccattgattataaaataccctccttggtcataagggcactctccaagttctgtaagatccttttcggactgttgaaacagtgtgcaataactagaacgcaacatgataggaacctttccaataaagacttttgggtactccatagtttctgtaacctcttcacagtcatgtccttttttcataactctgtatgatacatcaacatatagtggcgccgagtatgttaggtttcggagccttgccgattttggaaataaagtagctgtctctccatcagcttctgtcatcattggtttactcagatagatttgtccaaagctgatcttgtggagtgtctcggcgaactcggcctggcggccggggttgtgctgcgactcggggcggatctcgatgtcggcggactcgtcgacgatctcctgcatggtgttctggatgaactcgtcgaaggagtcgagctgctggcgcacgaggcccttctcctcgaagtaggcggagatgacggcccaggcgtcctcctgggtgatctcctcctcgtcgggggcgtccccatccgcctcctcgtcctccatctcctccccgccgacggccccgtactcttcggcgccgtacccgccgccgtggtgcgggtggtggtgcccgcccatctccatctccatcccctcctcgtactcgtcgtcctccat

SEQ ID NO: 48564 - DNA, 300 bp, Oryza sativa
  Clone ID: PAT_MRT4530_51227C.1
atgacagttgtgatggttggaatagtcagtaataccctccaatcgtcattggggagccatctcagccgtccaggagaaccctggatcaaacggagttgtgggaggttcagccgaaccaccaggttcggccgaacctagggctggcccaatccagcctagtttcggctggtggcctcctctgctgcttcactttgtagacttgtgaattttggcctgattcatcgtgtcaagtctgcgttcttggcccattcatacataagtctatctctcgacatcgtccgattgatttatcgtccatgt

SEQ ID NO: 48565 - DNA, 546 bp, Oryza sativa
  Clone ID: PAT_MRT4530_51228C.1
atgtcaacctcatttccccctcccctctccacatctcttcctctctcctctcctctccacgggcggcgtcagaggagtagctgggcgcgtgcaacgggcgcaggcggctgggactgggagaggtcccgccagttcgtgcccgcagccaccgccgcgtcctggttagcgacggtcgcggccgcgtcagcgaacgggatcatcgggacacgcgtgtgtgtcatcgggagtgggccgacggtgtgcatcatcaggaccaggccgacggtgcacacttcggtggtctacgtggcgtgcgccgagctcaagcccgtgctcttcgagggcttcttcgggaacgacatcgccacgggccggcagctcaccaccaccagcaccgatgttgagaatttcccaggcttccccaacggtatcctcgacgccgacctcatggaccgctgccgcgcgcagcctgtgcacttcgggaccaggatcgtctccgagactgtcaccgccgtcgacccctcctcgtgccccttccgcgtcgccaatcttcctcgacggcgttga

SEQ ID NO: 48566 - DNA, 336 bp, Oryza sativa
  Clone ID: PAT_MRT4530_51229C.1
atggaataccgttgtagcacttcacctttgggtgaccccaaagagatatcgaactcagggaacgtgtgtaatctacctaaggctaagactatccagggacaacaactaatgcgtggttccggctatagctctatgatgtacccgaacgtggaggattactacgatgggattcagggctgtcaccacctgccatctacctctgacaaatacgtgggatacacaacaaacaaagccgaacccgggacagctcctttcggcccgtttttcctcgtggacactaattttgaggccctcagcccattggcatggtggattgggccatttggaggtgtttaa

SEQ ID NO: 48567 - DNA, 453 bp, Oryza sativa
  unsure (1)..(453): unsure at all n locations
  Clone ID: PAT_MRT4530_5122C.1
cccacgcgtncgcaaaataattcggattctaggtcgttcagcctatactcattaaagagtgagaaaaagactatggtgcccctcattaaatggtgtatagatgaaagagagagggtggctaaggctaaaatagctaaatttaaatgaaatgattgacggggcaattagtagaactctagagttactactgtttgcggataaatcttgaatactcnaaatgggtatagatcaatggatctatttttgcggactgttggttaacacctctcaccaggtacaagagggataagccgattgcctccatgtgaatgtgacttgacatgcactgtcatcagtgaatgtataacaaaactttcagtggttatagaattatgtgaactgggtgtncaaggatgtcaaggaaatgtgcaagaaccatgggggccgcttgcgagtagaacctatatcgctagc

SEQ ID NO: 48568 - DNA, 1550 bp, Oryza sativa
  Clone ID: PAT_MRT4530_51230C.1
atcaaaagtgatttttataacataccggtgtgcagaaaaaaaaaggccgttaatatatttagtacagaaaagcaaaatatatggacagaagaagaggagggcatagctctgtgagcacccagtggggatcaaccacagttgaaaactggaacacgagcagggtatcaaatgaccaaatatgtacaaatggaatccaagcaagcccgttgctagttagcgttgaatcctttgagtgggagccttcaccaaacaaagacataagggcacatcaggacaacttttacaaaatacaacagcttgcttgttccttctttggatcttggtatagtcttaaggcctccaggaatttgttccaaaatgggccagtctcctgaaggctaacgttttctggtcccccaaggtatgcctgaacaatgaactcgtgacttctttctcttccttcatattgtgacaaccatcccaagtaagctgcgccaaagtacattgatgtaaaaggattgtatagatcatctacggagctgacagtatacgccctatggccacaatctctgcaggaaaaagctaactcagcaagagcagctagggcttctggtgttactccttttgagctcaaatgacgtgatatggttatttcagcaacagccttcacctcaactcgagaaagataaggcctcctcttggagtcatgagaaaacctcacatttcctcgcctctcaccagattttgtccactccttaatcacatcgggctgactccacatcgcatccatatctacctctgataccttggaatcccaataaatcaactgtccttctgtgctcgaggaattggctaggagattaggagttaaatcattaaaactttctggctgtttatcgtcacatgagaatagccattttgcataagcagcaccaaagtagacattcacaaaaggccaatagagcaaattagcatcttcttcaatgtcataatacttgtaacccaattccctgccaagccattgagcaacttctattgtcacctgcattatgccagctttgatctccttagtctttcggtcataattatcgacaaagagtctccttccacttgcaatttctgcaagggcacctatcatatacgggtctagctgtgacttgaaatgcttatgaacagtaattgcagccaccgccatcatttcagtttgtgtgagatatgcctcaccatcaggatcccgtgacaggtgaaccttctgtcccggcccttccccagcatcaatccactctttacttacatgaggatcagcccacattaattgcatatcctctggatccaagcagtcatcccaatatttgaagcttatagccatcagtatacgccctatggccacaatttctgtaaagccatgctgcagtagggtagtctattcccatcaagccagtacgagaacgaacaccatggacaaaacgcatagggcgggcctgggggggaggagcgagggctgctggagtggggccttgaggggagagagggcgggaaggggaggaggggggagcgggcgagcctcgtgc

SEQ ID NO: 48569 - DNA, 353 bp, Oryza sativa
  Clone ID: PAT_MRT4530_51231C.1
ctggtacacctgcacgtaccgctcctgatttgctggattgacctacgcctccgtgccctgatgccgctgcatatgctacacacgccgaacgctcaggccgagagcgcatcccgcagggggagaaggcttggagaagatgtcccgcgacggaacgccagcgcttggcagcttctagcccttggccaattagaacgaactgcacataataagactgccccttttctgctggacctagcacaactagaaagccaattctatgctgtagttcctgacgcttgtgactattaaacaattgatgtgaactaacactttgcactatttcactattgaggtgaaggatggggatacccata

SEQ ID NO: 48570 - DNA, 354 bp, Oryza sativa
  Clone ID: PAT_MRT4530_51232C.1
atgtcgacgtttgagatcgcgactagggtatttagatggtatggggatcgttggtaccaaggtatatacgagattgaggtaaaagagatggagacagggatttttatatatgttcgggccctttatctaacagtttcagcagaattgttgaagacacatgctaggatgcgtgcttttgttccattcaaaaattatatagtttgtcacttgctactgaattcccagagtcgccagtatgaagaatgcaacctgaaaacagttgtgcttcagaattctgacaacgccggcagttcagctcatgagtcaggcaatttatcaatcaagcatttgcaaattcagaaccatttgtactaa

SEQ ID NO: 48571 - DNA, 237 bp, Oryza sativa
  Clone ID: PAT_MRT4530_51233C.1
cttttcagaaaacttgaaacttgcaagggtaagactacaagagtgacacgcccccgcaccgcctggcctgggtcccccgcctgcactgcctggcctgggcccaccgcctgggtttgcagcgcctgctcctctgcccgtcagcttggcgccttggcggacacgaaagctcaaggaccaatcgggaacgactatctaggcgagtgtgcgcggatgcgcccctttgggccctgtagtcag

SEQ ID NO: 48572 - DNA, 410 bp, Oryza sativa
  Clone ID: PAT_MRT4530_51234C.1
gaaaagtggcagtattaccaaatcgttgagccaatagagcaacgtgcaagtggggatgtcttaattttgtgcattctaatgttctgaaatgcatacagtttcagcagaattgttgaagacacatgctaggatgcgtgcttttgttccattcaaaaattatatgtgtgctttgctcttttatctattggttctgcagagtgggtcacttgctactgaattcccagagtcgccagtatgaagaatgcaacctgaaaacagttgtgcttcagaattctgacaacgccggcagttcagctcatgagtcaggcaatttatcaatcaagcatttgcaaattcagaaccatttgtactaatcaggagtactgttacccaattagattaacagcttatgtactgtactacttaggatt

SEQ ID NO: 48573 - DNA, 228 bp, Oryza sativa
  Clone ID: PAT_MRT4530_51235C.1
acataactgaccatactcgtgtcctcctcgctgtggaaatgtgaagatcgcgcgtctaccagttcacacaacagacatgacacagagcctgtaagactgtgaaacgtgctaacacgcgcgtgggcgtcgtccatacatgtagctgcagcgtatactacaccatgtaaattactatctgccgcctcacctgcgccgcattgccagatctggataaccgtgagtggccga

SEQ ID NO: 48574 - DNA, 225 bp, Oryza sativa
  Clone ID: PAT_MRT4530_51236C.1
atggcgacggtgcatctccacgggatgaatcagcggagtcacaccgcacgatgctgcgcttcggggaagagagaaaggaaaacgctcgagaggattggttgtacacgcggtgcaggagcggtgtgtttccacatgttcccatcatgccccttgcgagcgaacgacagggatgatttcggtaccgtgcggtaccagtaccgcaagccaaacttgaaagtaacttga

SEQ ID NO: 48575 - DNA, 195 bp, Oryza sativa
  Clone ID: PAT_MRT4530_51237C.1
atgatggtaatatccaacgtttcagcaccagcgagtggcgctaacttccttgccatcgtggcctctggttcgacttggctgattgatatggtgagcggtaaaagagttgaccaagatttcgacaagaacaatagtatccaaatcatgtggcatcatcgccgtcccgagttccaacaacgtcatgccctcatttga

SEQ ID NO: 48576 - DNA, 360 bp, Oryza sativa
  Clone ID: PAT_MRT4530_51238C.1
atgacacacatccacgcgcgcgggcacatgcgcaccgcacgggctcgtttcctcgcggaaatgatgcggttttcctctctccgcgtcggtctgatcaggcggcagcgatacggggctaagggccggggtgtgagcgcgcgcgccgaaagcctgttgccactctgcactgcatgccgcgcgcggcaccgcgtcagttcagggtttgtgcttaaccgcgtgctggtcctccacgggagaaaaagtttacgggttcggcaggggtttcaaccatcgatcgccgcgtgccttgttgccggggacctgtacatggcgaaccgcgcggcgactcgatcgatcgtgcaacgcatccagccgtattga

SEQ ID NO: 48577 - DNA, 2373 bp, Oryza sativa
  Clone ID: PAT_MRT4530_51239C.1
atgccgccgttgtccgtccaaaagactggacaaggttttcacctagagatcctcgtcgagggaggagtgtacctcgacaacgccccccagagggttaccgcgccagaaggcgtagccgctgccggtccagcgaaacactgggctaggctttcgcctgggactctctacccccgtcgccgtggtccgttgcccgccaactctgataccaccagcttaacatcgttctatgaaattggaaacgttgctgaggcagtcaaaactttccaacagatggcaagtgccttgacgggagtgatgacatccgtcatcaacaagctcactgctcttcttgggaaggagtacatgaagttgaaaggagtacagggggaggtggagtttatgatagatgagctgagcagcatgaatgctctccttcataggctggcggaggaggaccaacaccttgatgtgcaaacgaaggagtggcgtaaccaagtgcgcgaaatgtattatgacattgaggactgtatcgatgacttcatgcatcaccttggccatactgacattgctgagtctgcagggcttgtccataggatggcccaacaccttaagactctgagggtgcgccaccaaattgccaaccaaatcgagaagctcaaagcacgcgttgaagatgcaagcaagcggcgattgaggtataagcttgatgagcgcaccttcaatcttagtactgcaggggccattgacccccggttaccttctctatatgctgagtcagacgggcttgttggaattgaacaaccaagggatgtggttatcaagttgctaacggagggagagggtgcatcatcgcagaagctaaaggtgatatccattgtgggtcctggaggtctaggtaaaactacacttgcgaatgaggtgtttcgcaaactagagagccagttccagtgtcgagcttttgtttctctgtcacagcagcctgatgtgaagaagattgtaagaaacatatactgtcaagtcagccagcaggagtatggtaacatagatatatgggatgaggaaaagctgataaacgcaacccgagaattcctaacgaacaagaggtactttgtcgtcattgatgatatatggagtactcaagcatggaagaccataagatgtgctttatttgtgaataattgtggaagcagaataatgacgacaacacgcaatatggcaatagccaagtcatgttgcactcctgaccatgatcgtgtctttgaaataatgcctcttagtatagataactcgaagagtttgtttttgaaacgaatatttggctcaaaggatgtgtgcattcctcaattggatgaggtttgttatgaaatattgaaaaaatgtggcgggtcgccattggctattattacaatagctagcttattggctaataaagctaataccaaggaagaatgggaaagggtgcgtaattctatcggttcaacactgcaaaaagatcctgatgtagaagagatgagaaggatattatccttgagctatgatgatcttccccaacatttgaagacatgcttactgtatctaagcatatttccagaagattatgagattgagagggatcgactagtagagaggtgggttgctgaaggattcattattacagagggggggcatgacttgaaggaaataggagactgttattttagtgatcttatcaatagaagcatgattgaaccggtgaaaatccaatacaatggtcgagttttttcctgccgagtccatgatatgattcttgatctccttacatgcaagtcaactgaagaaaattttgccaccttcatgggtggccaaaatcagaaattagtgctacagggtaaggttcgtcggctctctctcaactattacactcaagatcacatcatggttccatcaacagcaatcatcacacattgccgatctctcagtatttttgggtatgctgaacagaagcctcctctttcaatgtttccagttcttcgtgtacttgatatagaaaatggtgaagatatggaaagcagctataccaaacacataaggaagctgattcagttgaagtacctgcgactgaatgtaagaagcgtagctgaacttcctgaaaaacttggagagctacaacatttgcagactcttgatctcagacggacaaacataagaaaattgccagagagcttcgttcgtctgcaaaatttgacatatttgcgtgtcaataatctggatttgcctgaaggaattggacatctgcatgctctgcaggagctaacagagatcagaatcagccaggactgcttggcatcttccttgttggagctaagaaatctgacgaagcacacattgactacaaagttttcgccgataatttag

SEQ ID NO: 48578 - DNA, 460 bp, Oryza sativa
  Clone ID: PAT_MRT4530_5123C.1
aagaaagccataattcatgacagactggctagatgcaccaagacaggtataagtgtattaacaagcccacatggtgcgaatgcaaagtatgtcaacctatatcaagcactggttagtgggttactgttggaggctcgagactggcattttggactgcggttgcaaggagttgagtgcgtggtccgaagtttgttgacgaaacggaatatggacagtgagcgtgcattgtgtgatgcccatttgatgctgatgctgaatggcatgaggagcaaatgggttaatttttatagggtgtgtgcaactgagaatgataccttgcgtgacaaatgatgtagctgacctctcctaaaagtgcggcaacgaacagagtcttgtcgtgcttggttttcatttttcattgtggcttgtgttttgttttatggttgatacatgatactttacttttaaaaaaaaaaaaaaa

SEQ ID NO: 48579 - DNA, 3492 bp, Oryza sativa
  Clone ID: PAT_MRT4530_51240C.1
atggcgccggcggtcagtgcatcgcagggtgtcatcatgcggtccctgacgagcaagctcgactcgctgctgctgcagccgccggagccgccgccgcctgcgcaaccgtcgtcgctgcggaagggggagaggaagaagatcctcctcctcagaggcgatctccgacacctgctagatgactactacctcctcgtggagccgccgtcagacaccgcgccaccgccagactcgacggcggcgtgctgggctaaggaggttcgcgagctctcctacgacgtcgacgacttcctcgacgagctaacgacccagctcctccaccaccgcggcggcggcgatggcagtagcactgctggtgccaagaagatgatcagcagcatgatcgcccggcttcgaggggagcttaaccggcggcggtggatcgccgacgaggtcaccctgttcagcgcccgcgtgaaggaggccattcgccgccaggagagctaccatcttggcaggcgcacctcgagctcgaggccgagagaagaagtcgacgacgacgatcgcgaggactccgccggcaacgaacgccgccggtttctgtcgctgacgttcgggatggacgacgctgctgtgcacggccagctcgttggtagggatatttcgatgcaaaagctcgtccggtggctggccgacggcgagccgaagctcaaggtggcttccattgttggatccggaggtgttggcaagacgacgctggccacagaattctatcgtctgcatggccggcggttggatgcgccgttcgactgccgggctttcgtgcggacgccccggaagcctgacatgacgaagatcctcaccgacatgctgtcacagctgcggccacaacatcagcatcagtcttcggatgtttgggaggttgatcgactccttgaaactatccggacgcatttgcaagataaaaggtacttcatcataattgaagatttatgggcttcatcaatgtgggatattgttagccgtggtttgcctgataataatagttgcagtagaatactaataacaacagaaattgaacctgtagctttggcatgctgtggatataactcagagcacattattaagattgatccactgggtgatgatgtctcaagtcaattgtttttcagtggagttgttggccaaggaaatgaatttcctggacatcttactgaagtttctcatgacatgataaaaaaatgtggtggcttgccactagcaataactataacagccagacattttaaaagccagctgttagatggaatgcagcaatggaatcacatacaaaaatcattgactacttccaatttgaagaaaaatcctactttgcaggggatgaggcaagtactcaaccttatttacaataatcttcctcattgtttgaaagcatgtctgttataccttagcatctacaaagaggactacataattaggaaggccaacttggtgaggcaatggatggctgaaggtttcatcaattccatagaaaataaagtcatggaagaagttgcagggaactattttgatgaacttgttggtaggggcctggtccaaccagtagatgttaactgcaaaaatgaggtattgtcatgtgtagtgcaccacatggtattaaatttcatcaggtgtaagtcaatagaggagaatttcagcattacattggatcattctcagacgacagtaagacatgctgacaaggttcgccgactctcgcttcacttcagcaatgcacatgatacaacaccactagcaggtttgagactctcacaagttcgatcgatggcatttttcggacaagtcaagtgtatgccttccattgcagattataggcttcttcgagttctgattctttgtttttgggctgatcaagagaaaacaagctatgacctcacaagcatttctgaactgttacaactgagatatctgaagataacaggtaatatcacagttaaacttccagagaagatccaaggactacaacacttgcagacactggaagcagatgcaagagcaactgctgtcctattggatattgttcatacacagtgtttgttgcaccttcgtcttgtactacttgatctgctccctcactgtcacaggtacatcttcaccagcatccccaaatggactggaaagctcaacaatctccgcattttaaacattgcagtcatgcaaatttcccaggatgaccttgacactctcaaaggactgggatctctcactgctctttcgctgcttgttcgaacagcgcctgcgcaaagaatcgtcgctgcgaatgaggggttcgggtctctcaagtacttcatgtttgtctgtacagcaccatgcatgacttttgtggaaggagcaatgccgagtgtgcaaagattaaatctaaggttcaatgccaacgagttcaagcagtatgactctaaggagacagggttggaacacttggtcgcccttgcagagatctctgcaagaattgggggcactgatgatgatgaatcaaacaaaactgaagtggagtctgccttgaggactgcaattcgcaagcatccgacgccgagcactcttatggttgatatacaatgggtggattggatctttggtgctgaagggagagacttggatgaagatttggcacaacaagatgatcacgggttttgtatgctaccggaatcctcttcacgtcttcagagtagaggtaattttgtttcttgtcattttacagttacagttcatctacttaaggaattaatgggaggtcctatattttctcgggtacctagaaggtattgcgcatcttgggtgcattttagcgcaaacgtgtataatatatatcccatggtactaactcatgtcttaaccataattgcacaccaacacaaaacatacactactacagagataagtatcgaagaagacatgcccaccggtgcggaagggacggtgattgtgccccacacaatggagcagttcgccctccacatgagccaagccaagcaatcccacaagctcgtagtcatccagttcactacttcccggtgccctgcttcacgctacatcgcgccagctttcaccgagtatgcgaaggagttcgctggtgcggttttcattaaggtcaatgtcgacagcgatgagctggagagtgttacggactggtatgacatcgaagggatagtgccaacatttttcttcgtcaaggatggggagaagattgacaagattcctggtgctaacaaggagttgctccgagccaaaattcgaaggcacacagcttctccttacttcctccgttgataatgacttcttttatcgtctttgtctagtatatatatggcacttatatagttaactaggaaggacaccttgtttaatgtagctttcatttttattatgaatgttaaggatgatattatattgttgaagtatttttttactccttgtaaacatgtattggttaataacgaagtagtttggacattagtt

SEQ ID NO: 48580 - DNA, 323 bp, Oryza sativa
  Clone ID: PAT_MRT4530_51241C.1
acattgagtgattgcaaccggaggccttactagagatatttactggggtggggtatggtggggcataagatttgctcattgcaagcattaccactgccatgcactagatttgacattgtatagaaggtaaacagtgaataggaacttactttggatgttacaaacatttacaccaaggaaatataaccataagtgggaaaaagaaagtagcaagtatgtgctactgacctatattacttcacagaggccactattagcgccgatggatataaaactcttttatagaatatatgctgacatggcgaatgatttgaagcctttat

SEQ ID NO: 48581 - DNA, 660 bp, Oryza sativa
  Clone ID: PAT_MRT4530_51242C.1
atggtaacgaacacggcagaagagacatacgagaaagtgtgcacaacaaaaaacacaatggcccggcaagacacagaaaagaaagacccacacgccgcgtcgcgccacgggagacagcggacagggaccgcgacccgaaaacaaaggcgagcaacacacacaccgccaacacaacgcgcggcgactagaggagagcggggggacgcgacaagagcgcaccagcacgactccccagggcaagcgcaaagagcgcggggcaatgccgagacgagagaaaggaaggaggcttggcgccggaagaaaagacggcggacgaagacgtgggagcggagacgaggcaccgccgcgagcgcgaaacgaaccggcaacgaaccagaggcaggacaagggacgggagcaaaccaacttacacaccaaaccgcgcaagcaccaccggacgcggcaatacaaacaagggaaggcagaggacgacacacgcaagacgacgaacaacgaaaccgaacggacagagaaagaggaaagagggcgacgatatacaaaaagaggatgacggaagcgcatggagacgcaaagcgggataatgcgatatgcatgggtgggcgagatgagagaatgatcaggtgcacgcgggcgagtgatataaaggcatatagatactag

SEQ ID NO: 48582 - DNA, 314 bp, Oryza sativa
  Clone ID: PAT_MRT4530_51243C.1
gggaggcctgcgttggaagtggccaagtgacatgagcactggtgacaagtgtgttcacattgacatgaggaggtgcgagttgcatggctagtttgcttggagaatggtaaagcatattgttgttttgggttttttttacaactggtgaacatgacctggtgcacatgagaataatggcaagctgaaaatgtgtatcgattcattttgggtcgtttcccttctcctttttagaagagagaaatggaatttgatggatggcttaatcaaattgtcccgtttcgttgacatttaggggtaaaaaaaaaaaaaaaaaa

SEQ ID NO: 48583 - DNA, 485 bp, Oryza sativa
  unsure (1)..(485): unsure at all n locations
  Clone ID: PAT_MRT4530_51244C.1
tttttttttttttttttgggtactgaatttttctgtgtattctctattgtttcatgctcatgatcgtacagagtgtgatgaattctctgcagttgacagcatctgaaagctgttctcatgcaagtgcggatgctttacttattattcatcagtacagtacattgttgtacatatttgttctctcagtcctctcaaaggaatgaaggataccagcagacagagaacaaatttattcatccagacatggcatcaagggaagcaaactcatcacaatctacactaaactccacgcttactcttcttcgtgagaaaccttgctgggctgaacggcgcgagatcgacgatcttggcatcgccgtcgaggatgagctctgcgagagcggcaccggtggctggagcattgaggatcccccagcagctgtgcccggnggcgacatagcaacccttcactccaggcatntccccgatcaccggcaaaccgtnnt

SEQ ID NO: 48584 - DNA, 1173 bp, Oryza sativa
  Clone ID: PAT_MRT4530_51245C.1
gttctattgaacctatgttgtgcgctcatcatgtgcttcagcttgcgtattggttgatgaagatggagatcacagtttcatctcatacagtaaccaccatagggtcataattgatgatgataatcagaattttcttttgcagatttgataattcatttgctttgaagatggttaatttgaatctgtcaagttcttaagcactaatgcgtcatttataatgctgctgaagatcagaggtaattaaccataaaaggagaccgcactgttagaaaagcagatctgggattgggaaggaggatgttagaggcatctggagtttgattgttgataaactaggcttgagtgaaaaaagttgttgcagattcaatagcatttccatggtatttgctaaaggttgcagaggatgaattgttagtagcagatcacaagtatgtgcctcttcttgtcccttccagcttcttagttcttatactactgttgtgcaactttgaaacatcatggatattgaagcatgtcaactagggaagaaaaaggaaactggaagaggtcagtgttaggattaagttttcctagctcattgagttgttaaattattttgaaggtaggactgaaagaataaaaccatatcagcaagcaataaatgagagatgtgctctcctgatgcgctaaagaacattatgatctgttagtgctaaagaacgttctgatctgttagggaagatcccctgcaaggaacttgactaatctgtcacaagatttcagaaatacattgtcttctgctgtgaatctggtcaaagggtttcgaagcatgacttgcatacgaaggatacctcaaatattcaatttttaaatttttgggatccttttggtttgccactgtttgccatcttgagagtatcgacctggtaacattcaactggacaatttgaagagcatatccatcaaataaaggtgcttcctggaagatgcaatataaaagcctgcttagatataccagctaatattgaacttgccgcacctttggttgggatttgtatttgatgccaaataaggggatcaggtgctgagatttctggttctcattgaccagccacagaaacagaaaaggtggaaggagctcccccttctgcttctgctttgcagcacatgtccttttcttctgtaagaaattat

SEQ ID NO: 48585 - DNA, 777 bp, Oryza sativa
  Clone ID: PAT_MRT4530_51246C.1
atggtgcttgataatgatattgataccaccaaaaaattattattagaggcagatgccatattagcacaagtgccaaatgataaagtagcagacatacgagaagcgattagaaatgactgggagctactagccaatatgaatgtagtggatcaaaatagcttgatgcaacaactaacgacattagcaaatagcttagatgatttaccgatgctgtctagtgggcctacagaagatgatccgattaccaatagcaaagtgagtgattcgatcaatgattggcaacaaaatattgaaaagagtgcaagttcattcttagaccattttattcgtgtcactgatcgtaacaaagcagatgccaaagtatttattgcaccgaatcaagaaatttatttacgcgaaaatatccgcttgcgtttacaaattgctattttagccgtgccacgtcagcaaaatgaattatataaacagtcgattgatgcggttagcacttggattcgtagctattttgatacgcataatgagaatgtgaaaaacttcttaaaagaattagatgatttagctgaacaatctgtttatattgatgcgccaaaccgcttaggaagtttagttttacttgaacaattactgaataaaaccccaaaagcgatcgataaaattgaaataaaagctgaaaaagcgttgcctgagccgacagacagtgaagttaaaagaggtttagtcgcaggcccatatcttgctggaagtcaaggttatgttcgaattgagactgattcgaaa

SEQ ID NO: 48586 - DNA, 1633 bp, Oryza sativa
  Clone ID: PAT_MRT4530_51247C.1
ttgtttgctttttcttttttcttttttcgagttgggagaggccatccaggagttcttgggggcttgctttgatccggagccgcgccaattccggcgagggccgctcaaagattcggtatttggggcgggcggagtggttcatgtggctgaatcggtgaactcggctggtggatttttggtttcctcgtgacctattttggtttggttgatgatggagaagaagcagatgcaacagcagccgcagcagccggagtcagagccagagccagcggcgcccgcgcctgcagcagcagcagcggaggcgaaggcgacaccgccgcagccgcagccgcagcagaaaccggcggccccagtgcagcctcagatgcccacgccgaggccgtggccagtggccttcatccctccgaagccggtggctgaaattaagagtactccttcaacaaagagaaagaaacattgtaattgcaaaaattcacaatgtctaaagctagcatgctccagcatccttgacctttttactggacaaatagatcaattgtatgggtactgcgagtgttttgcagcaggtctttattgtgatggctgccattgtaaacaatgtggaaactatgttgggaatgaaagtgctaggcaggaggccattaacagtacgaagcaacggaatccaaaagccttccaacctaagattgaaaatggttcaaatgcacttaatcttagaaaggatgatgctggagcaccagcctcacttccaaagcataataaaggttgccattgcaagaagtcaggatgtctcaagaagtactgtgaatgctttcaagcaaatatcctttgctccaagaattgtaaatgccaggattgcaagaattttgaaggaagcgaggagctacggcttataactcaaggggacaactcatcagatcgaaataacattcaacatgctgccaatgttgctttgaatggtgcaattggatcctcagggtatagatattctccagtgcgtaggaaaaggcctccagaagatcatctttatcagaaactaaatggtgaaggaagcacgatgcaaacacagtttcaagaggctaaccatgtggactcttcagaaattacttcttcgactggactcgaagggtgttatagtaactaccagagtagatctaacgtggtctataggtctgcgttagcaaacactatcagccctacggatgctactggtctagccaagcatttggtgattgtatgcagaaaggcagcagacgcattcctgacgacagctgaaaacaaaggggagatggaagtagaaagggaaatccacacagattctgatggtgcaaccaatatggatcagcaaaatggaggtgattttggtccttgctgtaacagcctagaggattctaggccagcctctccaggaacacaagcattgatgtgtgatgagcaagatagtacatttggaacggattatagaatttcatttccagtggcattgcatgatcaagacacttcagaactaaatgctcagcaagaaaaagcagtgttgacagggtttcgagactacctccggacagtcatcacacgtggaaaaataaatggtacggaatttgctaagatatttctatcccttaaacgatgttga

SEQ ID NO: 48587 - DNA, 198 bp, Oryza sativa
  Clone ID: PAT_MRT4530_51248C.1
gtgcatgttcagtcagatcctgctgggcgtctggttataactggggacccagagcagcctgataatccttgggggatcactccattcaagaaggtggtcaatctgccattgaggatcgatcctcatcaaacatccgccgttgtcacgcttcatggccaactatttgttcgtgcaccatttgggcatgctgatatgtag

SEQ ID NO: 48588 - DNA, 243 bp, Oryza sativa
  Clone ID: PAT_MRT4530_51249C.1
atggtgtcatctggtactgcctgtagggaggaagtgggactggaagcggttgattctttcaatgttgtagcaccaggaaagtcccctaaggatgaaacatctgcaagaccagaggggagccgccgtgatctcatggacgtgcggccgcgcgtcggtggaggggcgatggatggatggggttggcctcctccggcggtgggggcgtcgccggcggccggcggacggtggcgtggcggggactag

SEQ ID NO: 48589 - DNA, 2516 bp, Oryza sativa
  Clone ID: PAT_MRT4530_5124C.1
atgcccaccccgccatcgccatgcctcttcttcctcttcctcctcttcttcatgtggtcgtctcactctcaccttggcgccgcctccgacgcggacgcgctgctcgccctcaagtccgccctcgaccgctccgaccgcctcccctggcgccgcgacaccgcccccgccttgtgctcctcctggctcggcgtgcgccagtgctcccaacctccccgggacaggagggtcaccaagctcgtcctcgagaacctcaacctcaccggcgtcctcaccgccaccctcctcgccccgctctccgagctgcgcgtcctcagcctcaagtccaacgccctcaccggccccatccccgacgccctccccgccgccctccctaacctcaagctgctctacctctccgccaaccgcctccagggccgcatcccgcccaccctcgccctcctccaccgcgccaccgtcctcgtcctctcctccaacctcctccatggcgaaatccccacctccctcaccacgctcccgcggctcacctcgctcctccttgacgacaaccgcctcaacggcatcctccctccgctgccgcagcccacgctccggctgctcaacgtctccgccaaccgcctctccggcgagatcccctccgtcctcgccaccaaattcaacgcatcgtccttcctcgccaatgccgacctctgcggcccaccgctgcgcatccaatgcgccgctccgaccgcgccggcggccgcggccgcattcacgccgctccccccgccacgctccaacaggagccgccgcgcgaagaacgcgggcatcgtggccggcgcgacggtggcgggtgtggtggtactgggaatcctggtggcggcggcggtgatggcgtcgcggcgcgggaggaacaagcgcgtggccggcgacgtggataagggagcaatgccagaggaggaagaagagcagcagcagcagcagccgcaggctcagcctcgggaggagatcaatgcgtcggcgtcggcgtcggcgtcggtggcatcggagaggagggggggtcgtgagttctcgtgggagagggaggggatcgggaagctggtgttctgcggcggcgtggcggagatgtacagcctggaggagctgctgcgggcgtcggcggagacgctggggcgcggggaggtgggcagcacgtacaaggcggtgatggagaccgggttcatcgtcacggtgaagcgcatgcgggagccggcggcgggggcggcggagcttgggcggcgagcggaggagctgggccgcctccgccacccaaacgtggtggcgctgagggcctacttccaggccaaggaggagcgactcctcgtctacgattactaccccaatggcagcctcttctccctcctccacggctctcatcaaaatccccttctcacaaggacaacagtatgcagatgtagacaagcagggtccagcagccggacgtcgagcaaggggaagcccctgcactggacgtcgtgcatgaagatcgcggaggatgtcgccgccgggctggtgcacctgcaccagtcgccgccggctggcatcgtgcacggcaacctcaagccctccaacgtcctcctcggccccgacttcgaatcgtgcctcaccgattacggtctggtgcccacgctgctcccctcccacgccgatctcgcctcctccacgtccgtcctataccgagcgccggaaactcgcaccgcccatgccttcacgccggcgtccgacgtgtacagcttcggcgtgctcctcctggagctgctcaccgggaaggcgccgttccaggacctgatggagatgcacagcgatgacatcccgagctgggtgcgggcagtgcgtgaggaagagacggagtccggcggggagtccgcgtccgctggcggcacggaggagaagctcggtgcgctgatcagcattgcggcggcctgcgtggtggcggacccggcgaggcggccaaccacaccggaggtgctacggatggtgagggaggcaagggcggaggcaatgtcgtcgtcgaacagcagcgaccggtcaccagcgcggtggtcagacgccgtgcaggtgcagatgggcatgggggtgccgcgagatcagggagagctaggaggactcacctgaatcgaatcgatcagcaagcttgaatcttcatcctgatcaagcaagctgatcaatcgcctggcttggccggcttgttgttactttacttcatgtaccgtagcagcaaaaaaagtgtagttaccactcaatttgtcttggctcaaagaatgactcattcttcaggcaacactttttaaataccaggggtctttgatttgggacttgtgtaggtttttagcagggaagggtggggcattgggagatactcctagcttagataggttcagagatgaagattctctgggctggatctgtctgtaaatcttttttggattgttgtaaacttgtcctttttattttttccggagtggagctaaactggtttatgtgtcaaaaaaaaaaaaaaa

SEQ ID NO: 48590 - DNA, 408 bp, Oryza sativa
  Clone ID: PAT_MRT4530_51250C.1
atggtgtcatctggtactgcctgtagggaggaagtgggactggaagcggttgattctttcaatgttgtagcaccaggaaagtcccctaaggatgaaacatctgcaagaccagagagaaaggatcgagggaggtgcaagggaagaggtggtggtcgtattgtgccggcaacaccgccggcggggatggatcgcgtcctgaggctaaatgccccacgagaatcgctgcacgctcgtgcgtcctcatcggtgaagcggggtcggaacaccgcatccgcacaggggagccgccgtgatctcatggacgtgcgcccgcgcgtcggtggaggggcgatggatggatggggttggcctcctccggcggtgggggcgtcgccggcggccggcggacggtggcgtggcggggactag

SEQ ID NO: 48591 - DNA, 470 bp, Oryza sativa
  Clone ID: PAT_MRT4530_51251C.1
atgtctatgcataattctgaaacttcatctgctaatagctctagccatgaattgtcttcacaaatctcaaacatgtaaaatagcaaaagtgagggaacattttgagcaaaagcttatcatgatagatggtcttcaaaaagcacagtgtaaatattgtggattaatgttatcatcaactagaaaatcaggaaccagccatctcataaaccatattttgtgaatcttgtccactagttgattgtgaagttagaaataggtagcaacagttaggaaacaacccgtggaaaatttcatgtttgatcctaaaaaaaactgaagagctgatgataaaatatttcatccatgctaagataccattccagaaaattgaggatccctaatggtgtagttcatctcatcccagccgtagcctagtaacccagtcgcgcgtgcgatcgatcatcagcaggagccagaggcgcgtcgctttg

SEQ ID NO: 48592 - DNA, 2997 bp, Oryza sativa
  Clone ID: PAT_MRT4530_51252C.1
atggagaccgcggtgctgagcgccgtgctcagaacgctggggccgaagctctacgcgttcctccgtgacgggcacgacctgttgcggcgggacctggagcgcgacgtccactacatccggaacgagctcgccatgatcgccgccgcgatcgaggagcacgaccgccgcccgccgcccgccgcaggcgacgtgcggagcgcctggatccgcggcgtgcgcgacctggcctgcgacatggaggactgcgtcgaccgcttcgtgcaccgcgccaccggccacggcctggcctccatgggcgcccgcgccaagttcgccgccgtgatccaggagctcaggaggaaatccgaggagctgtcccgcctcagagccagttacgccgccgccgccggcgagcccagctgctgggtggctacaggatcatccgcgttgaccctgccggcgtcgtcgtctgaggcgcacacccttgcatctgacatcgtggggatggacgggccccgggacgagattcttgagctgataggggaaacccagggccagctcaaggtgatctccattgttgggtttggtgggttagggaagacgcttcttgccaggcaaatctacgagagcgacgccgtcgccgcgcaattccatccacggatttgggttcgtgccgcggggaagaacgcagaggatgtcctcatggacattctccagcagctggggatgccggtacatcactgccatgccagcaatctcgttgtaaatctcagaaattgccttgaatccaagaggttctttgttgtaattgacgacatgcagagggaatattggaacagctctttcagaaatgcctttccttctgatacgggactgagcagcattgtgatcgtaacgacggccatccagtccatagcaaatgcctgcagctctcgcaacagccatgtgtacgtgatgagaaccctgaatgaggaacactcaagacagctattcttgaaagaagcatcatggaaagattacccaccaggttcagaagcaatcctgaagaaatgtgatggtctgccgcttgctctcgtcacaacagcccaattcttgcaaagcagatgtcagcagcagcctctgggatgcgcaaagctgtgcgacaacctgggtaagcatcttgtgacagaagacaccttagcaagaatgaagcgtgtgcttgttcaccattacagcagcctccctggccatgtcatcaaggcctgcttgctctacctgggaattttccccagtggtcatcctgtcaggagaaaaactctgataaggagatggtcagctgaaggattcgtgggagcagaccatcaccggagctctctagatgtcgccatcgacagcttcgaggagctcgttaaccggagcatcatccagcctgttgatgtgagcagcaacactgaggtgaagacctgccaaactcacggtatgatgcttgagttcatcctgcacaaatccatatgtgacaacttcatcacatttctgtacggtcaggctcgcctgcctgacaagatccgttgcgtttccatacaacagaacagtggtagtaagaccagagtggattcagacattgatctgtcccttgtccggtctctgacgatcttcggaaaagcgcacaagtctttcctgaatttctccaggtataaacttctccgggttttggatctcgaagagtgtgatgaattggaggacgagcatctgaagaagatatgcaagcggttgcttctcaagtacctaagcctcggccgtggaattacagtgcttccaaaggagatcgcaaagctgaaatttcttgagacgctcgatttacggcgaacggtgattaagtttcttcccatacaagtgctcgagctgccatgtctgattcatctgtttggagtgttcaagatccaagatgctgaccagcaaatgaggaagctcaaatccttcctgacggagaaaagcaagttggagacactggccggatttgtcaccgataggtgccaaacatttcctcagctcatgaaacatatgaccaacttggcaaaggtgaaaatatggtgcgagaacaccgcagatgccagcagcagcagcaactctgatgttcacctgtcagaggccattcaggagttcatccagagaggcacagatgtgaacgatgtccgatcactctctctcgatgtcggcgaatgctcccaagaatttctcaacttctctttaggagattcatgctacctaagctccctgaagctgaaaggaaacaagatatgcaggttgccaccgttcgtcacctcgctggccgttctcactgatctgtgcctctcatcctctgatcgcctcagctctgatgttcttgcggccctgagcaacgtccgcgcgctgcgttacctgaagctgatcgcgcgtcacctggacaggttcgtgatcgaacgcggcgatctgcagagcctgcgacgcctgcacatcgtggtggtgtccatgacgacgatgagcaagcagcagccagagatccaggagggagccctgccgaatctggagtcgttccatctcctctgcaaggatctggatggcccctgcggccatggaggcatcaggatcgactccctcgggctcgggtgcctcagggagattgttcttgacgacggagttcgtgagacggcgaaggagcagtggaaggacgcggcgaggcggcacccgaagcggcccaaggtggtgttcgtcggagcgggagacgtcgtcgatcggcggcgggtgggtgctgctgctgctgccgcgcctgcagcaggagagagcaattctgcgatggcaccggcggcggtggcttcggtggtggccgccggcgacgtcaagaggccggctagggaggaatccgatatctccgccgcgctggcgagccttccggcgaagatggcgaggctgctcggcgctgcgagcatccaccagagtagtgggactcagggcgagctgtcctgcggcgggaacggagcatcacagcgccatttcagctag

SEQ ID NO: 48593 - DNA, 1203 bp, Oryza sativa
  Clone ID: PAT_MRT4530_51253C.1
atggagacgctcacgatcatacccaaccaacatcaaccgggccggcggctggcgcacgcataccgcatatggacatttcctgctcacgcctcacgcctcacgctatctgctcctctgtctttggcgagcgccgtcaccctccgctcggctccggctccagctccggctccggcgctgtcccctgccgctccctcacctgctcctccccttccccctcccctttctgctcgcgtcgctgcctcagtctgctcgcgccgccacctgtctgctcacgccgtcaccccccgcatcggctccggctccggctccggctccggcaccggctccggcgccggcgccagcccccaacgcttccccacgtgctcccccctccccctttctgctcgcgccgtcgccgccccaatcattagcaccccctccacagccgccggcgccgccctctccccctcactgctcgccgccctccgcccgctccgccgcggcgcgcacgtcgccacacgtaaccgtgcacgcggtcgcggcatccaactccccgccttcttcgcgccgccgcatcaccgccaccgaggagcaatcggcggtggattcgtcgtcgtcggtgacgaggttagtcccgcgccaccagcccaccacgccagccccaccctcattggccccgcgccgccacgcccgccccaccctcgccatgcccacccgccggccactctcgcgctcccgacagcgtcctcaagagagaggaagaggacgcccaccaccacctgcaacgccggcgacacgggccggggcttcatcagtcccgtcgccgccctcttcttcgaggacacggccgccggggagttggacgccacagcggagcgaaggaggcggccgggcggggcgggcggagggcggcttgctaggagggggagagcagtggccggtgtccggtggacggggaggcggagagccgcgtctccatctcaatggactaccaccgaatccacccggtgggcgtcggcgcaggagccgcgggcggcggtgctgtcggccgggttcgtgccgctcacggtgtgggcgggcgtgccgatccgcatcaagttcggcgccatcaagctgtggaagatgaccgggaaggcgacctgcaacctcgtcgtcgacaacctcgtcgccggcaggcggatccgaatccgctccaacaactacagcttcaagctcaagaagtag

SEQ ID NO: 48594 - DNA, 771 bp, Oryza sativa
  Clone ID: PAT_MRT4530_51254C.1
atggcatccaaacgaggggaaaagaaaccgcaggccagaatgtctcgccggcggcagcagccgggctccgactccgacggcgaggacgacagcttcctctaccgctacccgctcccctccgccgccgctcccggcgcctcggggccctcctcgcacggcggcaagcccggcggcggcggcggctcgggcggcctcgcgccgtccaagtcgacggtgtacgtgtccaacctcgacttcgcgctcaccaactccgacctccacaccctcttctcccgcttcggccgcgtcgcccgcgtcaccgtcctcaaggaccgggactccccgcggagccggggcgtggcttccgtcctcttcgtccgccgcgaggacgccgccgcagccgccgcccgagatgcacggcaagccgagttcatccgccgccgcgtctaccgcgacaagtcccgctgctacgagtgcggcgaggagggccacctctcctacgagtgccctcgcaaccagctcggcccccgcgagaggccgccgccgtctaagaaatcgcggcgcggcggcggcagcggcggtggtggaggaggcggcggaggcggtcgcggggcttcctggcagtcggatgatgaggatagcgccgcggcgttcgaggacgacaggtgggcgtcagtggtggatacgagaggggaggaggagaaggcagctgggaagggcgaggggaaggcgatgaagaaggagaagaggaaaggctacttcagcgacgagagcgatgaggatgaggactga

SEQ ID NO: 48595 - DNA, 504 bp, Oryza sativa
  Clone ID: PAT_MRT4530_51255C.1
ctccttcgccgctcccggaagggatggtatgggagaagcagcgccggagaagatggaaggaatgaagcggcggcctcggtgacgaggtggtggcggcggcggctggtgcgtcggcggccgtggtggccgtggtatcgaggtggtcgtggagtcgtcggagccggcgatgtggcggcggcggcgggggctttggcggctgcagcggtgagggcacgacgccgtgagcttgtttgttgccgccttattctgcatcgatggcctctgtattcatcgttagcttatgttagttgcagcagtagaaaatttctttttttttttggctgcatgctcttcttctgcatttcttcttggatttgtgttgtctgatttattaggtgttttcatgagctcaattattgcttggtctctagctcctgtgaattgtgaatttatgcgtggtgttcgtgtaaaaggcatctttaagctagataaaaaaaaaaaaaaaaaaaaaaatgtgtttattat

SEQ ID NO: 48596 - DNA, 291 bp, Oryza sativa
  Clone ID: PAT_MRT4530_51256C.1
atggggttgatacagccgattccaatggcggtggcttcgaggctgtttctagaatctatcaacgcaaaagtctgccgcaaagacttatggatcaaaccaactagcacgctcacgaacctaaaggcgagattttggacctacataggagttaagcagatcttccaggccagtcggaaatcacgacgatacgccagggaggagatcaacaagagccacggcgcccgggtctccgcgaatgagttgaggctgatggtgatggtgaccggcgtcgatggggacaggctgggctga

SEQ ID NO: 48597 - DNA, 768 bp, Oryza sativa
  Clone ID: PAT_MRT4530_51257C.1
atggcatccaaacgaggggaaaagaaaccgcaggccagaatgtctcgccggcggcagcagccgggctccgactccgacggcgaggacgacagcttcctctaccgctacccgctcccctccgccgccgaccccggcctcgcgccgtccaagtcgacggtgtacgtgtccaacctcgacttcgcgctcaccaactccgacctccacaccctcttctcccgcttcggccgcgtcgcccgcgtcaccgtcctcaaggaccgggactcccgccgcagccggggcgtggccttcgtcctcttcgtccgccgcgaggacgccgccgccgccgccgccgagatgcacggcaaggtcctcaacggccgcaccctctccgcctccatcgcggaggacaacggccgcgcagccgagttcatccgccgccgcgtctaccgcgacaagtcccgctgctacgagtgcggcgaggagggccacctctcctacgagtgccctcgcaaccagctcggcccccgcgagaggccgccgccgtctaagaaatcgcggcgcggcggcggcagcggcggtggtggaggaggcggcggaggcggtcgcggggcttcctggcagtcggatgatgaggatagcgccgcggcgttcgaggacgacaggtgggcgtcagtggtggatacgagaggggaggaggagaaggcagctgggaagggcgaggggaaggcgatgaagaaggagaagaggaaaggctacttcagcgacgagagcgatgaggatgaggactga

SEQ ID NO: 48598 - DNA, 804 bp, Oryza sativa
  unsure (1)..(804): unsure at all n locations
  Clone ID: PAT_MRT4530_51258C.1
atggcatccaaacgaggggaaaagaaaccgcaggccagaatgtctcgccggcggcagcagccgggctccgactccgacggcgaggacgacagcttcctctaccgctacccgctcccctccgccgccgctcccggcgcctcggggccctcctcgcacggcggcaagcccggcggcggcggcggctcgggcggcctcgcgccgtccaagtcgacggtgtacgtgtccaacctcgacttcgcgctcaccaactccgaccttcacaccctcttcttccgcttcggccggggaccggacctcccccgcaggccggggggtggccttcgtcctcttcgtccgccgggaggagggccncccgccccccccgccgagatgcacggcaaggtcctcaacggccgcaccctctccgcctccatcgcggaggacaacggccgcgcagccgagttcatccgccgccgcgtctaccgcgacaagtcccgctgctacgagtgcggcgaggagggccacctctcctacgagtgccctcgcaaccagctcggcccccgcgagaggccgccgccgtctaagaaatcgcggcgcggcggcggcagcggcggtggtggaggaggcggcggaggcggtcgcggggcttcctggcagtcggatgatgaggatagcgccgcggcgttcgaggacgacaggtgggcgtcagtggtggatacgagaggggaggaggagaaggcagctgggaagggcgaggggaaggcgatgaagaaggagaagaggaaaggctacttcagcgacgagagcgatgaggatgaggactga

SEQ ID NO: 48599 - DNA, 216 bp, Oryza sativa
  Clone ID: PAT_MRT4530_51259C.1
atggcggtgacacaggccgtgactgtgctccgaaggaagaaggtcgatctacgcggtgccggtggaggtgactacggtggagaggccagcggcggcgtggacagcggagtaagccgaagacggcgccgtgggtctcagatccgctcgtgggtgctggagacccacacggagccgaggggactaggggcggaggaggtcgccggcgtgaatccatga

SEQ ID NO: 48600 - DNA, 598 bp, Oryza sativa
  Clone ID: PAT_MRT4530_5125C.1
gccatcccccgcccccccctccccgccacagacatggctgctgctatcaacagcgaggcgtccatgagctcgaggcccaagctcgcgtgcctctgctcgccgaccaaccacccgggctccttccgctgcatccgccaccgcccgatcccacgcgcccgccacctctcctcttcttcttccccgccaccaccgccgccgtcgtcgtcgccgtcgtcaggcggcgtcgcgtcggccggcgccagggcgaagggggggcggtcggtccgcgcgcacctgcttcggatgatcagctgcagcaacggcggccgccgccgccgccgcggcgacttccagcctcgcccttccaggcttcgccagtgcgcctcctgacgatcaccgacgacctcttcggatcgagtgatagtacgccactatttcgcgcgtacgcatcgagtgacactagagctagggtaatcagaatcagaatcatccagggcttggctaggaagccatgtgtgatgtgctctttgcttttctactactctactagtatctgtactcctttgtgtgtttttttcctcagaggaatgaatggatcagttcaattaaaaaaaaaaaa

SEQ ID NO: 48601 - DNA, 429 bp, Oryza sativa
  Clone ID: PAT_MRT4530_51260C.1
ctaggaggggccggcgatgggggccgaggctgattgacctcccttcacgtcggtttccactgcagtcactagcctgtagcccagcagcctcctctcagaagccgcccacatctctttcttcctcctcttcctctctctgctatggtaagtgataaggcccatgagtcggagatggatcgagcaagggagggacccgaggctagtggttgcaacagggccggtattgtcgaaggggaggtaaagcggtggggcagcgcaaagaggaagatgcttttctgcgagcttgattgcaaaatccattggagaagggatgggcccccgcgagcatgagactgcatcatcgtcgcatagggtggcagccagcaggtcacggctgtagccacagatgatactaccaatgctggaggagaaggcagcatagaggctcat

SEQ ID NO: 48602 - DNA, 303 bp, Oryza sativa
  Clone ID: PAT_MRT4530_51261C.1
ttgagttccttctcggccggtgatcacctcggggggggttattacactctgtggggcacgctcatgatgatcggtaccttcgtcagagtgggacacgttgaccggtgccggcggttgtttgcaagctgtacataaccgaactcgacgagcactatggatcagcgacgaacctggtgtagagacccgcttgctttgtaatctaatcaggatctaatgtcttcttaccgatggccattgatgctgggagggtatgactattgattgcttttggtttcttacgtctagatcgttattctagagggg

SEQ ID NO: 48603 - DNA, 585 bp, Oryza sativa
  Clone ID: PAT_MRT4530_51262C.1
atgcaggtgcaggtgcagccacagagccagcgcttgccgtcgctgatgcgcgagttgcgccattgcggacgccgagcggactgcgcggttgtggcatgcagcgggccgcttggagcgcgtggcgtgcgtgggctgctgcggctgctttgctttgctgggttgggcggcaccggcgcggcctgtatcagcgtgagcctgccgcccgccgcgcagcctgctgctccaaacgaattcagatcatgtgtgcagttatactacattgcaattgctaaagttgaaggcatagtaatgactgcacctgaactcaatccactccaagcggtgctccacgccaccacatctcttgtcgccatttcatcgaccaccttgttgacgtcactgcctccggcggtcagaccacgcgtcaccgacgccactccactcgcgtgccgccagcagtcagcccgcgcctgccaacgccgctccgctcgcgtgccgccgccagtcagcccgcgcgtcgccacctactgccacgcgcaccgcttcacaaccgcgacatgcgcccgccgtcgactccaccgcaacccttcgtcggtcgtcgcctag

SEQ ID NO: 48604 - DNA, 693 bp, Oryza sativa
  Clone ID: PAT_MRT4530_51263C.1
atggttacgagcaaaagatacatgggtggaatggaagcttcgttagtatctgggatattgaatattgtgggtaaaaatttagctccactggtgatcaaagagtttagctctatggcaggtgtgagcaacgatcttcaggaactccaggatctagttgaggagatcaacaattggttacaaacagtgggtgataaagctatgaggaatgaccggtcgtctaattggctcaaaaaactgaaagacgctgcttacgatgctgaagatttggtccatgagttccgtattgaggctgagaaacatgaagaaaatattgttagtgtcaagaatgttatcgtcaaacacttctggacaaaaccaaaatcagttgtcttcgaattcaagacagctcacaaaatcaaggcaataaagaagagatttgatgcaattgtaaagggaagaagttactacagcacaatagcaaatagtatacccgtggatcgtcctgctcagcatgtaagcaagacaattggggatgttatgaaaatagatgcacaacggagacacgaattttacgtggaaaacccttgcgggaaaaaaccacgggcgccgaccggcaataatcactatagaggagatgattacaaacgtaggggaatcacaatgggaatgtcacccctttcccgtacagcttataagagtatatataggggataa

SEQ ID NO: 48605 - DNA, 289 bp, Oryza sativa
  unsure (1)..(289): unsure at all n locations
  Clone ID: PAT_MRT4530_51264C.1
tttccccggcctgggcctgggccgcctccaaacngccccngggcgcggggttcccccgggggtgcggccccccgtttggccgggggagttcccggctgggggcccgttgccggccaaaaagggtaagggacgggaaaaaccatgaacagggaagcgaaaacaaaaggaggaaggccaagaaaaaaccgaccctgcaaagaggaggccagttcccggagaaaataaggcactaccggaccacaattggaaaaaacctaaaacaagggtttgggaagcaaagcaacaacgc

SEQ ID NO: 48606 - DNA, 399 bp, Oryza sativa
  Clone ID: PAT_MRT4530_51265C.1
ggcccagtgccaaccttgcatgacctgcagtcgactctaaagaatccccggcgttgcgcggcggcgaagcggcggcgtggcgcgtcgtcgtcatggcgcggcgtctcgtggcgggcggcgcgacggagagagatcgagatcggagagatcgagatgcatgaagggagatctggcggcggcggctctcaccccaaaaatgcggcggcagcggaggaggcggaggcggcggcgaggatgacgagctcgagacgacggcgagataaggcggcgtcggcgcggggatttgccctaggcagtggcggcgaaggagagaggccgagagagatcgatcggtcgaaaacgtctaagtgttggtgtctaaagccagggtgcgcccgaacaacaaaaaagacggaatag

SEQ ID NO: 48607 - DNA, 1327 bp, Oryza sativa
  unsure (1)..(1327): unsure at all n locations
  Clone ID: PAT_MRT4530_51266C.1
ccacgcgtccgcccacgcgtccgcccacgcgtccgcccacgcgtccggagtgctcgctcgctgctgtctcttcgagcttgctttgcgtttgcgttgcgttgctttgctcgatcgatcgatcgatcggtcactctctgtcttccccatatgctgaggtcagtgtccgggtccaactcgtcgaggggcatcgccgccgtggtcggcgtcggccccaggctcggctccgccgtnggctcgcaagttcgcctccgagggcatggtggatgtggttgtgtacgttggtgcagagaagctgtcgcagctggcggaggagatcgcgcaggaggcgaaggcgcaggtgttcgcgctgcgggtggactgcgccgacgcgcggtccgtgcgcgaggccttcgaaggggtgctctcgctcggccccgtcgaggtgctcgtctacaacgcctgcgagccacccgccgacggcgacggcgacgcctccccgcgcccgactcccttcctcgccatctcccccgacgccttccaccgcgccctcgccgtctccgccgccggcgccttctactgcgcccaccaagttataccggggatggtcgagcggggcaggggcaccgtcatcttcaccggctcgtcggcgtcggtcaccggctacgccggctactccgatctaagctgcggcaagttcgcgctgagagggctgtcccagtcgctggccaaggagttccagccggccggcgtccacattgctcacatgatcatcgacggcgtcatcggcgaacccaggtcagggagggggaggtgcggcggcgagacggcgtcgtcggcgggggcggacccggacgcggtggcgcagagctactggcacgtccacgcgcaggacaggagcgcgtggacgcaggagatggacatccggtcgccgtcgctcatgtagtcgnccggccgatcgggaaggtgganaggcatgcactgtagctccgncggcggaatctctactgttgccaaggaaggaaagaagaaaaaaagaaaattcattgatcgtgtcatcgtgtggtgtggtgtgcgtgtgcgcggctgcggaccgggcatcgtgtccccgttccgcgtcgcatgtcttctttttttcgcgctgcgtgcgcgcgccgcttggcgcttcgcgcgcctaatttttagtgtgtggttgatgcatcatccgtccgccgtccatcggcagcatccagcagccggtgcacggggaagttgccgacgacggcgacctgcaaaaattcatgtgatttttctgtacggttttctataaatgtatagtagtattatgtctcgtttaaaaaaaaaaaaaaaa

SEQ ID NO: 48608 - DNA, 270 bp, Oryza sativa
  Clone ID: PAT_MRT4530_51267C.1
tcaggatcaagtgtgggcaaaatccatagaatattcaagtggtcgaagtggagcatggtgaagttcatgcagaatttcctgaaaaaggaaacaacgtttcccaggaaccgttattggaagacgctagtaaaatccagtacaccggccaagaagctagagcaaccggctcagaagaagccatctcccgcaccaaaaccaaagagggtgtggaaggaaaagccaaagacgcccgctccatcacctccggagacgggtggaaaatctgcgaac

SEQ ID NO: 48609 - DNA, 168 bp, Oryza sativa
  Clone ID: PAT_MRT4530_51268C.1
ctacggtggggcaaccattggtagaaccgcgaggcgggtgtctacagtggtgtcgccatcggtaggattcctgagaggcgggaatgtggacgtcctcagaaaaccatgatgactcaatggcaggaagctatccttgggatcacaatggatggtggacagaaccgtcat

SEQ ID NO: 48610 - DNA, 834 bp, Oryza sativa
  Clone ID: PAT_MRT4530_51269C.1
atgagggctagcagcggcttggcgacgaggaggggaggcagcggcggcgctccaatcctccctcccttcctcctagatctatccatcggtggcagaggcagggcggaggaggagctgatggtggtggccatcgcagacaacgtcggcccctcccctcctagatctggacggaagaggggagccgggcagcggcggcggcgaacagaggaggagagccgtcggccacaaggagaggggctgtggatctaccactacgaagatggagatgttgcctacgaaaatgattttcacaggcctttgtgtacaagtggtcatttcccccgcctggaaaaactatttatggctgcctgggaaaacgattttcctagtagtggccctagcttaggaactgcgaaggtgagtcgccagcctcgccgccagagccattttgatctacacaccgaccagcgccacctcagcccccgcactaggaagcatggtggtggccagcgaaggatgataagagaagggggtatggcagtggtcacctccatagcgggaagacactgcgagaagctccgctggccaatgacgcccctatctatgctgccgatgtctattccgccgccccgaccatcacttcaagctgatccgcccgaccaccgctgttggcagatccactttcgcggccctgatacatgccgtgcctccttggtcttcttggtggtgctgccaaggagagtgggggaagaggtggctccaccaagaagtggagaggtcatgccaggaaggggagaggtgctaccaggaaggggaaaggcaatactgcctggaggagaaggggagaggtggtga

SEQ ID NO: 48611 - DNA, 267 bp, Oryza sativa
  Clone ID: PAT_MRT4530_5126C.1
atggcgtcctcctcctccgaccacggcccccgcttcacgctcgccttgtcgcagcacggcgacctccccatcgttaagttctctctctctctctccccaccaccaccaccgctcccgatcgagcacttcgcctcaccccactctgatcagaggaagaagcgaagcgcggccgtggttggtgaggccccggcgaggccgggggtttataacgagcacagcgtcagcgtgtggcatcgggagcgagagctgagagcaaagttgacctag

SEQ ID NO: 48612 - DNA, 318 bp, Oryza sativa
  Clone ID: PAT_MRT4530_51270C.1
gggagggccatccagacccatcatggcaagatgtggtcactttcgggcgcacaccgtaggttggtggctgcatatctcggccgggggcgggagggcaccggcgagacgttcggttgggcgatggcgaccccggtagttgctgcatcatcgcccaggagccgggcatatgagcagtgcctgccgccgctgcatcgccaagcttcatctgctcatcacctcgccaggaaatccgggagggatgcagtgctctccatggctccatctgtgcagctcacagttcggttcatctgctgcaacattgaaaaggatcttgattaa

SEQ ID NO: 48613 - DNA, 287 bp, Oryza sativa
  Clone ID: PAT_MRT4530_51271C.1
agcaggcacgcgtgcaggtgctggtatgctatacagcggtcgacctacgcgttcggtcgcctgttctgctacagcaacaggtgcttagcgcatatgatgagttcgtaaggcagcagtatggcatatcggcaagcccctttttgcaatcagctgtgtttcaactgagaaacaaccaagtctggcaacagatcgcgctggttgcgcatcaatctcactatcaggacattaacattgttcaggccatagcgcaacagctactacttcagcagtttggttgatctttactt

SEQ ID NO: 48614 - DNA, 304 bp, Oryza sativa
  unsure (1)..(304): unsure at all n locations
  Clone ID: PAT_MRT4530_51272C.1
gttcattagtactacaacagcgtggcatccataaatcgccccatagttttcttcacagtttgcttgttcctcttgtgctntggctctctagcccagcggctattaggccngagcactagtcattggcggagttctcgtcgtgtgggtccaggagantgcnggttcgttnggttgcntgcttttgtgccgnttcggtgtgtgaggtctcangctggctcttctgtgttcttcgttgtgttttttgagcggtttcaatgttccggtgtttctgttgtccgtcgggtttttgagcctgggggccttc

SEQ ID NO: 48615 - DNA, 374 bp, Oryza sativa
  unsure (1)..(374): unsure at all n locations
  Clone ID: PAT_MRT4530_51273C.1
ggggggggggnnnnggnnanagggagncgggaaggggccgcnagagaacggaccaaacancagaaaaagcccaaagcagaaaaaagaacgacgaggagagaagcccaaaaacaccgcncccacgcccggaaggaagggcggannnggacgnccggggacggagggaccaccaggcncggagaccacggcnngcaacccaaggccgccggagggacgggcaggaaccacnaaaaacgggncagccaccggagggcgggggngcaggggcgncggcgncgaacgcgnncacggggnccacgagagagaccgcgggcaacagcncanccccggagcacgcgaagaanaccnccaggaccagancgcgaacaaacccc

SEQ ID NO: 48616 - DNA, 222 bp, Oryza sativa
  Clone ID: PAT_MRT4530_51274C.1
atggagtttggatgggccctgcgacagcctatgcggcttccggattcacctaggcacgagaggggactgcccgctgccttgcgaggattgggggtgaaacctgaggatcaccgcgttggcttccttcgcgtcgagggacgcccgatgtgtgcaagcagattgaagcgattttccatcaacgctggcagcgccgccagtcgctccgccaccggccaggagtag

SEQ ID NO: 48617 - DNA, 624 bp, Oryza sativa
  Clone ID: PAT_MRT4530_51275C.1
gccagagagagagcaagaagaggaggaggaggaagaagaagacatactgtccatccatggcgggattgttgaagaggttgctggtggcgctggcgcttgccgtgctcatgttcacggccaccgcggtggccgggcacccggctccggcgaagaagcacggccacacgccggcgcaccaccacccggcgaagaagcacggggcgcgcaagcacggcggccatggcggccacaccaagcctcaccaccgcatgtaaccggatgccgacgcgcgcacgcatgcagcaatcagcaatgccatctcgccttcattctttttcattcttcttcttgttgttttgattagcgcccttactttatgatcatttggtttaatttgtacgcttaccatgagttgatttgatcttctccttcttctacctacgcgtatgtgtcatgtgggatgagtgaaatgaaatccatggaataaaatcagatgctcctcagcctgctctaatgtcagactactgttgtcatgcaggacccccaacaatctgttcttcagaaagaaagaaaaagggaggaaaaatatattatgcttccaaacattgtactaagaatgttcaaataaaaaaaaaaaaaaaaaaa

SEQ ID NO: 48618 - DNA, 308 bp, Oryza sativa
  Clone ID: PAT_MRT4530_51276C.1
tcgttctgtactaactagtaaagtttttttttttgggcttcgctttgcgctctctgtatctctctctcttccaaaaccctaaccctagcggcgggcgggagcggcggaggaggagggcgcggcggcggtggggtggtagtggtggtggctacaacagccataagtggggccccgcgcccgcggtcagggcccccacgtacacctacccacagaacgggttctgcgccgacaagccgggggccgcccgctcggctccggtgatggcactgctggaccttctgcggcgaggtcgattaccccaagaggct

SEQ ID NO: 48619 - DNA, 683 bp, Oryza sativa
  unsure (1)..(683): unsure at all n locations
  Clone ID: PAT_MRT4530_51277C.1
gcacccgacgaaacgaagctggaagcaagcaagcaggaaggggaggagaatccaatccaatcatgtgggcgtcgattaatcggccgccgaccccgaatcgggaggaggatccgcagaaggagctttccctcagagaaatcatcaacgtcaagttggtagagagtggggagaaggagaagctgatggagctcctccgggagcggctcgtcgagtgcggctggagggacgagatgaaagctctctgcagggcctatgcaaggaagaaaggaagaaataatgttacagtagatgatcttattcatgtcattactccaaaaggaagagcatcagtgcctgattctgtgaaggcagagctcctgcaacgcatccaatcctttctcatgtcttcttcctcacttcggtagtccatttgtcgtaatcactggagccgcaggtatgaaggttcgaagctgatcatgtggggaggagctatgcaggaatacaatgcatcctgtaatatcaacaccaaaacgatcgagtgatatttatagtgttgtcgacaatgtttctcttgtcaggcaggcagttgggcctgttctcagtctgtacacctctttaccctgcttagatgtgaaccttgaaaaatgtattttgaatggaagcttccagcttgttatgctgcgctattcccaaaaaaaaannna

SEQ ID NO: 48620 - DNA, 457 bp, Oryza sativa
  unsure (1)..(457): unsure at all n locations
  Clone ID: PAT_MRT4530_51278C.1
aatatggggtatatttttttttttttttttttttcttttttttttttattatttaaatttaatttttttttttgtgggaaaaggctgaaaattaattattttggggggccacgagcaaattaaagtcatacaaaattttttttattttttaatgcgctatcgggacaacaaaggggtttgaaaaataatattgggcgaactcctccttttttgttggtggaggggtcttgcaaanntacctttaggggtgggggtttatttaccacttttttcgggggtggaggggccccaacccccccgaaaagtaaaaaaaggagggggggccccttttttttttttttttataaaaaatccaattcaaaataaggggcccacccggcaaaaaaaaatatgtggacccaaaaaggggggaaaaaaaaaacccggggaaaattggctcccccatggtctgtggggg

SEQ ID NO: 48621 - DNA, 679 bp, Oryza sativa
  Clone ID: PAT_MRT4530_51279C.1
atggagaaagaaagggagccacgaaacgaagctggaagcaagcaagcaggaaggggaggagaatccaatccaatcatgtgggcgtcgattaatcggccgccgaccccgaatcgggaggaggatccgcagaaggagctttccctcagagaaatcatcaacgtcaagttcttgccacttggtgccgaaaaggcggtggactctccggctaccggtgacgtccaatcacccaagaagaggttggtagagagtggggagaaggagaagctgatggagctcctccgggagcggctcgtcgagtgcggctggagggacgagatgaaagctctctgcagggcctatgcaaggaagaaaggaagaaataatgttacagtagatgatcttattcatgtcattactccaaaaggaagaggcaggcagttgggcctgttctcagtctgtacacctctttaccctgcttagcttgtcccaccaaattcttgtatcgtttgtgatgagtatctgcttggtgatcctgaattccggcaacgattccgtgcctaagcctatgtgaacaatgatctctgtcttctgtctcctagcgcgtatagctaccagtttgcttaatgtacaaagcacaagcgtttgtacggctttaacatgaatgaatgaatgaacgaataattagcttcaacatattggt

SEQ ID NO: 48622 - DNA, 516 bp, Oryza sativa
  Clone ID: PAT_MRT4530_5127C.1
gggctgaggaatcggcacgaggggtactttctggtataatgaatgcacattggtccggcagctagcgatcgagctgtgctagtgctaccgctactaggaggcgactctgcgccagctgtcatggtcgacgccatgtccggcggcgtcctcgtcgcgctcatggtgttgctgctggtggctgcgcctgcgctgctctcgcggctggagccgcgccggcggccgccgcctgggcccgtggcgctgcccgtcgtgggacaccttgcaccttctggggaggccgttgcaccgcacccttgccgcggctcgcggctcgccatggcgcccgcgccgtgatgggccttcggttcggtcccggcgcgtcgccctcgtgtcgtcggcgccggcttgcgaagagtgccttggcccgaacgacctctcgttcgccgacaaagccgggcttccgtccggggagatcctgtcgtacgaatggccaccattggcaccgccagttaggttcgtactgggccacattcgccg

SEQ ID NO: 48623 - DNA, 121 bp, Oryza sativa
  Clone ID: PAT_MRT4530_51280C.1
agagaggaaggcctctccaaaaactggacgagcatttgatatcgacacatggggtgctgtgacaagagtccaaggggaaacactcgggcccaagctccccaatcctgatcagatatctttg

SEQ ID NO: 48624 - DNA, 427 bp, Oryza sativa
  Clone ID: PAT_MRT4530_51281C.1
cacaataactcaattataagcaaatgcggaaaatgatacaaccaaaatgcaacattctttgtgaaaacaactacatataacagtaccgcacatgaaatagtacgccgcttgtaagggccaggacaacacaggggaggcatcaaacaaggtgtacagcccatgcaatctgcaaaaaaagagtctggtgcatgacaaaccactgtgaaacttgttgaaacgctggaggatcaaagctactccgatagttagttggctttgccctcttaagcacctacctgaggaacatagtgagctgcgtacaaagcattaatacatggtgatccaacaccagacctagcccgattacactcatatgcttgcagatacggagcatgaaagacccctttcaccggacgcgtgagtacatctgggaaccccggcccaggac

SEQ ID NO: 48625 - DNA, 588 bp, Oryza sativa
  Clone ID: PAT_MRT4530_51282C.1
atggcggtcagaccggcggcgacagcaagcgcggcaggcgacttcggcggttcgaccgatcgatctacatcggtcagaccgacgttcatcaggcgggatggagccatcggtggggcttccgccgctggaaacccgcctctcccccactaccaggaaggctggaaacccaccgctggaaacccgtctctccctcgcctccgctgtggaccgccgcgccgccaccgtggactgccgccgagccccgcgccaccgccgctgtggacagcctcgccgccgcctgcaacctcctcgtcgccgctgtggaccgctgccacgccgccgtcgccgagcccccgcaccccgctggaaacccgcctctccctcgccaccgctgtggaccgccgcaccgccgccgtggaccgccgcctcgccgtcgcctgcaacctcctcgccgccgttgccgagccccgcaccaccgccgccgtggaccgccgcgccgccgccgggagagccgcctggattgggttcggtttagggttagcgttagaaattttcaccgtttcatctttctttttcttttaccgtgaaaactggtatatcctgcactga

SEQ ID NO: 48626 - DNA, 309 bp, Oryza sativa
  Clone ID: PAT_MRT4530_51283C.1
atgaatgcaagacggacgttttcatctctgaaggcgtttgtttctgccgaagggaagcgccttgcaagcgaaagtcttgcaaggtcaagaagaggcgctccttggaccatagggagagttgctccaaggatcgacgccgtggtcggcgaaggcttgggcgtcttcttcttcttcttcttctccagcgagctcacaagcagcccgaccatggaggaggacatcatcctcctcatcatcatcagccaagacgaaccagcctgggagccagctgggacaacagcaatggcgatgctctccattgcaaactag

SEQ ID NO: 48627 - DNA, 364 bp, Oryza sativa
  Clone ID: PAT_MRT4530_51284C.1
ttggttttttttttttttttggtttttttttttttttttttttttttttttttttttttgtatttttttttgtgatttattaatgctaatcctgaggcagaatggaaacaacaaaaagcaaacaacaaagactatactatgagaacgaagaacgcaaaacaagaagggacacaaagggaggcagaaacgccaggaaaagggaacaggaaacctcgaaaagaaaaaggcatcccgcagccattgctggaccttggaacgtcaaaggggaaaaaggcgcctcctactgggaaaacgggcacggggatgggaaaccaccaaaagggggcgccaaggggaacccccaattacgggcaccgaaacaagg

SEQ ID NO: 48628 - DNA, 369 bp, Oryza sativa
  Clone ID: PAT_MRT4530_51285C.1
atggctgggagacggacaaaggtggcatcggtgcctgagacatcctccgtcggtaccaacacctccggcttctgcttcacctcaactgatgcccccgccgcctttggtacctttcctccctatcttggaatacctcccttctctgcatctaggataagcgcggctgcgacgggtggccatatttccccatctccttcatggatacagacagacaaaagctcagataaagctgctacgccggatttgtcctcgccacatgcaaatatgcagagctggtctgtacagattaagttattgtacatctttggccatgctgaaactgaagagacctatagttgccatgttatgttatttctctgtacaaactaa

SEQ ID NO: 48629 - DNA, 356 bp, Oryza sativa
  unsure (1)..(356): unsure at all n locations
  Clone ID: PAT_MRT4530_51286C.1
ggcaaccagcgtgggtgggggtgganaaacaaccaantcatgcattagcagngnngccaacagctcatgctggtagcacaacaatctcactaccaggccattagtattgttcaagcgattgtgcaacagctacaactgcagcaatttatttttttctacttgggatgttgctcaanctcaatcccaaactctgtttaccttcaactttccatccatatttnntatctaccctaactactatantnctcccannatcatttccacttttnnttntttctttttcttaattnnaacaatataataattcccatnttaaaaataaattcatacatcatcattttttactttttaaactt

SEQ ID NO: 48630 - DNA, 576 bp, Oryza sativa
  Clone ID: PAT_MRT4530_51287C.1
atgggtgcgaccagcaaaaccatgcacccacagcccaccattcagtggctgacgtcatccaagggggggcggcgccgacatgcgggccccactggtcagcggcactacgagagggagagggggcggctggcaagcgggccccactggcagcggcacaaggggagagggaggggtggtccaccggctggtgggccccaccgggcagcggcacagggcgggagaggggcgtggctgttggcttggcacggctcaagccggccggccagccatggggcggcggcggcggcacgcgcggtcaccggcggtgaccggcagcgcgggagacggcggcggccggcgcgaaggcggcggcggcggccgaagacgacggcgcacgcgcggaggacggcggcgctcatgggagagagaggaaaggaaggaggagaggggattcctcaccttcgagcacggcggccggcgcgaaggaagaaagcggcggcggcgaccggtgatgcggaggcacggacgggcggcggcgacaccctaggagaagatggagaggcgttaggagaggagacgacgaccacggcggcttga

SEQ ID NO: 48631 - DNA, 903 bp, Oryza sativa
  Clone ID: PAT_MRT4530_51288C.1
atggcatatgggctgacgtcagcaaggggagggggtggcgccgacaggcgggccccactggtcagcggcactaagagagggagagggggcggctggcaagcgggccccactggcagcggcacaaggggagagggaggggtggtccaccggctggtgggccccaccgggcagcggcacagggcgggagaggggcgtggccgctggcttggcacggctcaagccggccggccatggcgaggcgacgacggcgcacgaccgccggcggtgaccggcggcgcggggagacggcggcagccggcgcgaaggcggcggcggcagccgaagacgacggcggacgcgcggagggcggcggcgctcacgggggagaggaaaggaaggaggaaaggggattcctcaccgaggcgatggcggcgaccggcgtgggaagagacgagcggcgatgaccggcgacgcggaggcacggacgggcggcggcgacaccctaggagaagatggagaggcgttaggagaggagacgacgaccacggcggcttgaattgccggccggagatggaggggaggggaaaaactcaccggctcgcgaggggagaggtgctccggcggcggcaagcggcggagctcgggtgcgacggcgcgagggcggtagacggcacgggagagcgcggcgagtgcgaaaaacgagagaggaagacgcggggagcgatttataggtgcgggagggggcggacgtggccggggaggcgcgcgagggcgggagaccccggggcgaggcggccacgtgggggggggagacccgggaaccgcccggcgtggccccgggaaaagcggaggaagccgcaacctggcggattcggcggcggctgccgtcggaggcgggtggctggaggcaagggcacgacctga

SEQ ID NO: 48632 - DNA, 633 bp, Oryza sativa
  unsure (1)..(633): unsure at all n locations
  Clone ID: PAT_MRT4530_51289C.1
aagcgcgaaaaacgcaaagagaaagccaaaggaagcacgagaggaaaacgaaagcaggaagggcaaagcaagcgaaggagggcggaaaaacgaagaaaagggagaaagccccggaaagcacgacagagaaacgacgcaaacgacaaggaaaagaagcaacaggagcggaagcaacgaaagcaacgaaggcagagaaagagggacgcggccgaacgaaaggaagggaacgaagggaacgcaagccgaaacgaaacgaggccgagggacgaagaaagaaggaagaaaacgaaagaaagcacaaagggaagcagcgaaaaacggagagccacaacgcacaacgaagaacaacggcgagcgacaggaaaccggaaggacaagggccaaaacccggcacgaggacgaagaaacaccagaaagaccggcacaaacagagcgacggcagcggggacacgaagacggaccgaagcacaaaagagagaaccgcccgggccgcacgacagaaggaaaaaacggggcacagggggcggcccncacccacgagnccggnncagggagnggccgccgcccggccncgggcccancccccctcgagggagggccacgggccattggggggcagcctcctccctctaa

SEQ ID NO: 48633 - DNA, 1243 bp, Oryza sativa
  Clone ID: PAT_MRT4530_5128C.1
ctcacgcgtccgctttttttttttttttgcacaaaaagtggaaatttgtattatattgaattcggttgaattaagaaagggcataatcgaaatcatttctttgatatgccatatgctttacgaaactgcatacacatcaagaaatgaaaattgcatacatgcataatacaactaccggctggtaggtatatataaaaagggaccttggaaaaccaacaagaacaagttccccatctgctaagcctggctacgtgatctatgaaccatcaaattcttctagcatatatatatactcagaagccggaggaggacggtggaggcgccaccaccaccaccacccttcgccatgcaggaccaggccgcccccgtcccatggtccaccgacctctttgactgcttcgacgacagcagcaactgttttatgacgtggttgtgcccgtgcatcacgttcgggcagatcgcggagatcgtcgaccgggggtcgtcgtcgtgcgggacgagcgggtcgctgtacgcgctggtgtttctcgtcacgggctgcagctgtatctactcctgcatctaccgctccaagctgcggtcccagtacggcctgcaggagacgccctgccccgactgcctcgtccacttgtggtgcgagccctgcgccctctgccaggagtaccgcgagctcaagaagcgcggcttcgacatgagcctcggtaagttgaagtttagcaatggcacgcaaacatggagaagcaagggcaaaacccggcggcgaccatggcgccggagatgtaccctgggatgacacgctgatcgatcggctaatcagtgggtgatgctggctgctgccctgctcggtcgttgttttttctgctaaaaatgggcaggacagggcagggcagggcagcttactacgtgcctacatacgagcgagatttttcttgcgggtttgccccaaaacaatacaaaaggtctataactatagtacgggtaatgcaatttgctaaaagaatttgatggttcatagatcccggagccaggcttagcagatggggaacttgttcttgttggttttccaaggtccctttttatataaacctaccagccggtagttgtattatgcatgtatgcaattttcatttcttcacgggtaagcagtttcgtaaagcatatggcatatcaaaaaaatgatttcgattatgcccttttttaattcaaccgaattcaatataaaacaaatttcccctttttgggc

SEQ ID NO: 48634 - DNA, 885 bp, Oryza sativa
  Clone ID: PAT_MRT4530_51290C.1
ccggccggggattcctcctccctcgccggcatataagtagccgcagccgccgcctccggctcccgaccttgctccacacccgcagcagcagcagcagcaaggagaagaagaagagccaagatgcagatcttcgtgaagaccctaacggggaagaccatcacgctcgaggtcgagagcagcgacaccatcgacaatgtcaaggccaagatccaggacaaggaaggcatccctccggaccagcagcgcctcatcttcgccggcaagcagctggaggatggccgcaccctggccgactacaacatccagaaggagtccacgctccacctcgtcctccgcctccgcggtggcatcatcgagccctccctccaggccctcgcccgcaagtacaatcaggacaagatgatctgccgcaagtgctatgctcggctgcaccccagggctgtcaactgccgcaagaagaagtgcggccacagcaaccagctgaggcccaagaagaagatcaagaactagagtttgagatatcatttccgcggatcattgaaatcaacaggaagatcagagtttaagtttttttgtagtgtaatgcctcatgttgtatgccgaactttctgtttatcctgttgtatgttaaccttggttacgctggagagtactccagcttattttgatgacataattgactacaaagtcaaggttatatggcccggccttaatttttgtccccttcgaagtttgcccctcattgttgtttgtggttgctaccatgctgtgatctgaattcaaattgtaagtttataaccgggccatctcagttactacgtgtgattcgtgtgttgtcaagtggtgattggctacacagctcttgtggtacaggctgcagattgg

SEQ ID NO: 48635 - DNA, 676 bp, Oryza sativa
  Clone ID: PAT_MRT4530_51291C.1
atggatccggccgtcgaagctcggcaggccaacgtcactgcgagcgcccacactccactgcaccgtcgccaccgcaaccgccggtgggcgcagccgctgtccccgcgccagcgaggccacgccggcccccacctcacccttggcagctcgttgtcatcacaggcggcggatctggcaaaggggcgccagaaccggccgtccatcaccgggccgagggccaccgtcgccacggccttcccggccggatcccggcgcttggggcggatccacggccgccctcgcaggggtgcgccgcttctgccctcgccgagccaacacgccgccccatgcctcctccggtcgccgtcgccacaagctccactgccatcggggaggccagatcggccgccagagggggcggatccgactccgccgtgcccggagccgccaagccgtccgccgtcttgccgccgccgagcagccccccgttgtcccgccgctgggcttctcgtggggagagcgccccgccgccgccgtccttgcagccgtccggctttgccgacgagccactcaggcggcggcaaggcgaagggcgggagggtggggagaggcagcggcgaggttgctgtcgccgtccgtgtcgccactgggacgggagcgacgcggacgaggacgctgtctcaccttctcctcgtgc

SEQ ID NO: 48636 - DNA, 465 bp, Oryza sativa
  Clone ID: PAT_MRT4530_51292C.1
gtcatcgtgacgttcaacatgatgttcgtcacgctcgccgtcgccacggacacgagagcggtacgcgtcgtccacggctttcacctccttgtcgtcgatcgatgatgactgaattttgccgtaaaatacatggactcttgtaagctggcggcggtaagtgcctgtaacatcccggcctagggtttaataggattaatagaatattcatatcaacaagttgcaacttcttttccggaagccaatctccaaataactccagggttaagcgtgcttggcctggaaccgggaaattcttcccgggtgcacacgagtgaggacaaaatgtgcagaaaagacatgtgttggtatgtgaggacagtctatgacctatgaaagctgccaaatgtaagtgggcccggcctgggagaggcgggtcgttacagtgcccctaccccaaccattggacagaaagaagcatattctggt

SEQ ID NO: 48637 - DNA, 678 bp, Oryza sativa
  Clone ID: PAT_MRT4530_51293C.1
gaaaccaggggaaaaggaatttttcattgcaaaaatgtatgctccatttatgttttggacaacacacatccttaatagattgcaggcaattttctctcccacattaataaaaggagagataaattaccaaacaattcctagaaggaccaacctgtaattttaaccctgtacaacaaataccatacaaatcagaactcttcaaatccacactttcccgaaaaatgaatggccttatattgcaattattcgctgactaatttctatgccgcagtaaattcttagttaccgagaatctctgtgctgctgcaaaattcaaaaatggaactgaagacgtcgaaaagagccttgaaaataaaaatcccttgtttgactataagctggtagctgatactctcacaggcttcaaaactcttagtaccctcctagcatgctcaagaataatataaaatactccaaagaagaaaagcaaaatgagttgcaacttcccaagtagattgtatataacgatgatgttgcattctcgtttagcaagacgactatctgatccagcaagaagtagatcatcagacttcttaggaaggtttgaccattccccctgatctgtatttgattttgatgcttttatcatctccatgagggacatattaacctgcaaggtagtttgtcaagttggaatgc

SEQ ID NO: 48638 - DNA, 240 bp, Oryza sativa
  Clone ID: PAT_MRT4530_51294C.1
atggcagatctgtcgatgcataaggttagcattttagtatggagcaacactcagaagtcagagtcacctgttcttacttggggcaagttcctacatacctggactaggcttgtccgtgagatccgacgaaacacattagatgacatcagcaaagatcttgggcgatttggattggaaatggaacctacaggaaaaatagttgttgagagcttgagctttcaagccgttgggagcccataa

SEQ ID NO: 48639 - DNA, 337 bp, Oryza sativa
  Clone ID: PAT_MRT4530_51295C.1
gcaacaaatcatcatgctactatgcttaccaaagaggtggggtgattatacagatgacggacttacatcctagactgatgcctatgcaacataaattgtacgaccgtaattacataccccaatagtaaacctatacaataagtgggtcgacgtaatgtacaatcatacacacacacctttactcttacacgcatccattcgttcatacacaaaaactctatggtaattaatatccctcaggatggcatcccttacttaactccaccatatacaggcatctaggtcagacaccatcacacatggtatcaacataaaaacgcaagtttccaacgctaaa

SEQ ID NO: 48640 - DNA, 532 bp, Oryza sativa
  Clone ID: PAT_MRT4530_51296C.1
tcgatttggtgcgaccttattttcttaggcgcaccaaggaaagtattgaaagccttttacctaataaagctgatcttgtcatctggctgaagctaacgccatatcagatataattatatgaaacatttatgaagagcaatttgattgataagacagtgaagggatcaacatttgttgcaacaatgctgctccaaaagatatgcaaccatcctcagaacttgacagctgtagattcctgtgaggaacaattagcgttgaaagaaaacaggacgttacagggcattgtcaaaaaacttgaagctttgattgcaaagaataccacaaagacatcaaattgtctcaagttcatgcaagcttacatttatactgcaattgttggaaaaacttaaggaagaagggcacaaggtgctaattttctcacagacgcgcctaatgcttgatgaaatagaggaggcactaaccaacaagggagtacattctgctcgtatggatgggactgttacagcttctaaagagaagctattattaaggg

SEQ ID NO: 48641 - DNA, 783 bp, Oryza sativa
  Clone ID: PAT_MRT4530_51297C.1
tcagtgcctatcaatcgctgaaatcagcttatcataccgaaacaatgataggtcaaagtatggtgaaggactttgtgattgacaagtgtaaggtagtgacgccatcatctttttaacaaactgctgatagagtgaaacaatatctgtcgtctccatgttgtacacagcaaagaatgctaaattctgttcactgctgcgagaaactttgttgtaataagatcttaacataaagggcagatctagcatatcaattaagcatgtaagatataaagctaaatcaggtaagatcggctgaaacctcgatactacccttgtccaactcggactctgccgatcccggtcatagcagatgcggactttagcagatccttgctctgtttccagaacgacttccatcttggattccgcctcaattttatctccatctctgataattgtgaaatggaggaagtagcagttagcactattgttagcaagatggcagcaccatatcataactaaacttgaaccattaatagtgcaggtgagtatttgatggcactggtgcaaatcagcttcctctagatggtagcaaaaagaatatctctccaattttgagcatgtacttatgtatatatgtaatacttcaaatccaagcttgaacatttctttgatatatccgtagaactcagttctatcactgtcttttccctgtcctattgtcactaagccactatttattgtaactgcctttgtcatcaccttctcatgtttatctgctggtagaaccacgccaagcaccat

SEQ ID NO: 48642 - DNA, 387 bp, Oryza sativa
  Clone ID: PAT_MRT4530_51298C.1
ggttacggataaggcataccctctatcatatgacttatggaatataccgataaggtatacattcacgtatacgggttgtttccgtatacgctttaggaatttatctcaagttatggaaaatatatctataagtttaggaatttccgaagtcctactcggaattttacttgggggttaaggtattccacggtataaaagggacccctagggagaggcaaagggcatcgcatctcatcaccaacacactcaccaaagtttacgaagccagagtccacgggaaccaactcgccgggagatctcgtcgaatccctcgactacgatctcatcgctgctccaacgtaccttaatactctattcatccagtccgcgagtatcactcgttgacaa

SEQ ID NO: 48643 - DNA, 405 bp, Oryza sativa
  unsure (1)..(405): unsure at all n locations
  Clone ID: PAT_MRT4530_51299C.1
atggttcaaccggttgaaccagtgaaccatcgaaccaagagccttgtcngctcaattactagtccggtctcaataactataacccttgcccactcgagcgcgctcatattgccaaagatagattttattgtgttttggatgagcttctcgaagatgttgatgaagaaggagttcatggtgggcatagctttagacaagaccccggtatccgtcagtgtctgctttagcaccttgaagatgatcttgatcgagaaagtagactcatattacaagtggtacggagaagagagcttgggccaccaggacgacgatatgatgcggctattgccacaaaaagccaacgcggacaagaagcttgagcctgcttggctggctcctccgtggaaaatgatgctaagctggtaa

SEQ ID NO: 48644 - DNA, 217 bp, Oryza sativa
  Clone ID: PAT_MRT4530_5129C.1
atcgtcgatatctcggaacaccgtagcataacgactccccgcccagagaactcgtgaactccgttcaacatggtagccttcaggttccatcagtaccaagatgatggatgaggctcctgtcgactccccagcagagacatgagatctaccgcatgaatactggagtccccgccatgggcattgcaggttcctatggtgcgactatctcggctctgtg

SEQ ID NO: 48645 - DNA, 116 bp, Oryza sativa
  Clone ID: PAT_MRT4530_512C.1
gtcatttttgaaacggatcaagctaaacatcatcagcaaatctttggatccgaggcatcgagctaagcctagggatgagagacaggaacacattcaggtaggctacaagcgttttt

SEQ ID NO: 48646 - DNA, 426 bp, Oryza sativa
  Clone ID: PAT_MRT4530_51300C.1
tcgtgatcgcgctcaccattatgcgggactgcctgacgtgcaaccccagcacgttccgcacgatgaacgagaggcttgtcggaggctgcgtggagaccaccacctgtgtcaagaggctctaccagatgcaggagaccgtcgccctcctgttccgctccatcaacagtaacgactccgtgaccaagagcaagtttgacaacctgtctgggtgccgccactgtatccctgaaggactcatgagggctaccgatgttatgaccgttggcaaggttgccgtgctctgcggctatggagatgatatcatgggctgcgctgctgctctcaagcgagctggggcccttgtcattgatactgagatggaccccatatgtgccctccatgctcttatggagggtttccaggttcttaccttggaggatgttgagt

SEQ ID NO: 48647 - DNA, 223 bp, Oryza sativa
  unsure (1)..(223): unsure at all n locations
  Clone ID: PAT_MRT4530_51301C.1
ccgatggagaaaggggtgaggttgcccggcggggnatgctggccttcaccgacgcgtggttccccccgcngcggccntcgtcaaccgtcctccacccgtngtngccaccccccccccttttcccctatntggggcctcttcccgacctcatgcctgcacgagcgccggccgcntcccgtgctcctttcctggcggcggcntcgnagccggcgcccggtgccgt

SEQ ID NO: 48648 - DNA, 8811 bp, Oryza sativa
  Clone ID: PAT_MRT4530_51302C.1
tcacgttctaaaatatccataaaaacaaatcgtttctcttgactgtcaactagacaaggtgagcatgaacctgacaacacctcggcagtcgaagagtagcacggcattgcttgtatcatgctcaagcgaaaatattaattcaaaaataattttcctccatctaagcaaaacctgaagtatgttgccagaaccctccctagaatttgtgggctgagcttacaggtagaaaataagctttcaagtgagtgatcttgtaacatcctatttcccatgggtcaattctactgtcacgaaatcctcccacaatacatccgagattacaagcacggatccattgcaggactgaactttctctgggtcatcattgggacccttaggtagcataaaatgatcctcataaacatcagtagatgcaaactttccccggactttgaaaaggtcaacttggccaagaaatgtagcatattcagctaattgtaagatagcctggccagctgctttatggtcgtcataaggatagagcaagctatcaccaccaatggctcgagggagacgcctacgagccaactgctcctcagccattatagctgatgatattttcattttcacagcatttgcaccttctgtagttttcgacaaaagatcaagaactccactcactggctgagcggctgcaccaattaaaccttttccgacaccttgcacaaagccctcaacaccagaagattttgcaccctcaatgggctttgtcaatatgcctgtaacacctctgaagatgccctttgcgagagccccacctccatctcgtatgacatcaccaaagtcttccactcctttgctatcctgtctcattcggccctgaatgaatttcttgtccatggataatgctgctatacccttactcatattactcaaagcgctacttgcattgccaagaatgtcaacacccgaaagtaattgaagaggttggctgagaatatctttcggcatgtgctccatgtttcccagtgccgtcattaaggaagaccagaacccaagaacccctctcggcctctgggtaggggacattgccattgagactctaaatcgtatttcagaaatattaagaagcccaatcttcagtatagggtcaactgagacagcagaagactctgaactggatatcctatcaaattttaggttctgaatcatctcatggaggcgccaaataattggctcatggatattaacaaaaaacacacagttctcaggaacctgcacaccaagatatggataaacacaaaattcgagagaattattggtctgcaatgtcatagagaacttgatgatgtagtctgattgattctccatcctttgaggacaaaaaaggacaggcataagaacgaaaggtaactgattgtccacttgaatccaatgcatctgcattttgagcctattgattccagagcccattccagatgagtaggctagtaatagttgctgcactgagaggaaaagaatttcctcaggcatatggtcaattatggaaagtccaaactctgttagctccaaagtaacatgaaattcactatccagatctggagatgactgcccactgtcgacctctgatggctgaaatattggtgataatagcctttctgttgtctgttcccgagttctattatcaggcagccaatcattaatttgggtaacatgaaactttccctccttaagaacagtgacacgcaaagccttcttcaccctgcttgatgcagctagcggttggtgatccatgacaacatcaatgtcatatgtcatggaggttgtagggtcacttccatctactaatacttccaaaagacgccttctgccaatatcctcccaaaagaaggaagccgatgaatttggaggcagactacgccatgaataatcatcaccaccaacctgccgaaaccgtacaggcaagaacatggagcggttctctaccctgtaagggctggaccagcaagcgagctgaaatacaacttcataacgtgaacattttgttccacttctaacgtttactctcaccaaagcttgatcatttcctgtagtgttgttcatgagcacacacataaccccattagcatcaatgctaaaaggtgtactccatttgtatccctccaaccgcaacttagttctgtctgaagtcatcttcagctgagccgagaaccagtaatatgacccatcagaagtaaatgctttgacatcaacatgctccttgttctcaagatcaaaaagggacactcctatactgtattgtttgcaactgccaacagccacacaaatcgcaactcgtgctgggctggaattgttatcccgagattcaaagcgcacacctgcagagcggttcatgtaatcctccaatatgtgcatatttctctgtgccactgggcctcttctgataagagattttgaagaatatctgagggaaaattttgaagatttagctgctctgcttagtgagtctggtctgctaagtgactctgcatctgagttttctgttggttccacctcaacgatgcgatatgatagtggaattgaagaaatattttttatccaatatggaacaaataatctcagtgtcttcggtgcagcatcacttgctcccagatcatgttcaacactaacacgaagtctcctctggctcctattttgaaccatccagaatgaagtaacatgttccagggacattaagtccagtattaatacagtgtccttctctataatccagccattttggacaaacatagttaggtaaattggtttccggatatctgctgaatagataaatgcacttccaccagacgagacaataccatgctgcctttcaaccatactaccttccgtggacttctcccagatagcatactcggcttcatatggaagcttattttcgagtctaagaattgagttgaaacaaattttccagtcataaataggcatatttaagtctgtgtgaagaatggaagcatcaattccaacactaagccagaaattttgtttaatgccaacaggaggacagcaatatgaaagcatatcctttttctcaagatcagccagtctaagaactgaattctttgagggcacagatgactgctttaaggtgctttgccttgaaagtgaagattgttgttgcttgggaatgctctcagaacctagtgaaagaacctgactccaactatatgattcctgtgatttttcagaaaaagggcgaacttgcaagcacaaatccatatccttgatcatcgctgtccaaggcaatgcagtagatgcatgaggctccataacagcaattattttcctaggaatttctgcactttgttcttgcattgactgccgtgaacgcacccaccgccttcgcctaacaaagtcatgtggtgatttggaagatttccaggaagatggccagttcaaattttgaaaattggcagcatacgcccatccatcactatccacggaactagatatttcaattttccatggtgacgtccatttccagccaggtggaagacgaggttcaaagaatgccttagatgagtaagagccgtcctttgtgctccatggccctacatcacaaccctgatcactagcagggttacttccccaccctgaagttggtcggtaccactgattttcaaatacttcatcaataatgcttgtggaactggtggaaccagcatttgacacagagctactatgcatggttacaggacagacagatacttcaagctttatgtcaaaaccatttgcaataatagcaagagcccttaagcttgcatgtttctttccattcctcatggtgacctcaagtgcaaaatggctgttgttaagtgatttggggatggttgacaatggcaaagctgcagtaaaacattcccatggaccatctgggccaagccctatccagaaaccactctttgcattgcttaagctgtctttccagctctggaagttcgtctgcgtagatctttctacgtaacaacttgaaagtactaacataccacagtgtttcacattttcatgattgagtgcttggcccttccttgtaagaggacatgttagcacacgcttgacatcagcagcttgctgaatgatcctcatagaagcagctcgtttcaatattgttgcaccccgtccaataggaattgacaatgaaccaagtacttcacctttcccagcctttgatgcaagatttgttacctcaatctctaaatgagcggatgcctgctctggcacttcaaatataaaatgttcattccacttagcatgatgtgtctgtgattcacaagttttcaaaggttttacacatcttgtcctggcactctgagggaatatcttgtactggtcagaaacatcacttccaacaagcaagcgcaaagcacagaagtagctgtgatcattgccatcatccataataggcaaacccttggattcaaagatctgtatgataacataatatcttgattccgtagaattggacagtacacttagtttatcagaaaacctgggaggtggcataaacaatgagacttgattctcatgctgtagcagctcaataatgtcttcattgtcttcaagtttcttaacataaatatcacatcctaatttgttctcaaaaactattctctgaaaatcatcttcatccaaagcagagcaggacaaatcatcagcatttttcacactgtcaactgtatcatttagaggacttgtggcagcaacacgaatcctcttaccgacttttgaaggagggtgtttactggtatcatatgtctcaaacttgaatatcccatcaaatggctcaacaaaaggttcccatgcttccaggtgtctattgaatgttgatgcagaaatcgaacagatcaatacagcattcattgtctcaaattttccatgtgttgcaagatttatatttgcgattgtagtgtcaaaaattggcgtgaccattccacaggaactgtcaagaatgctgactgacaagcatccaaacttcagctcagcagtaatattttcccgcacctttggtttagcatggtctgctattctgtatgccatttgagctggtggttttttcgtatcagatgttgccaggaaagtgcagccctggtttgaaactttccaaatgctccagcagttaggtcccttcgagctagaggacctggatataggatcctctaagatatttgcatgattcaccagacccatcttcggacagcaaacggaatcattgcttggcatttcatctgtttttgttgcaacacatccaagagaagcatatccaggaggcggcactggataccagaagaataatatttcatcagaaccctttctatcaatctgggctacttttttaaactgagtaggcctttcagaaacaattgcgctgtcgcacttaaaaagaataccaagagtaggtggttcaaacccttcagttatacaatcaccaactgaggaaaacccaaaacgaggtattggccgccatatagaaaatggtctttttgtatctccacctttgtcccaccatattctttcaaagtgtggagtagacatgcaatagctgcttggccttgacaaatttctaacagcatcccaaccagaagtactcttgcgatgagttaactgatcagcaggctggttactccgaacagaagaatctgcattcaaatctttaacaatatagcagttgggattccggagaagaacatggtgcaaatcaagagcttcaactctagtgggttgttcaatagaattgtgtgcatggaaggaagcaatcacattgtcgacacgccagatgctaaatccaggagttactcctagagctatgtatccaggtggtggaacaggaatccagatagaacactcattgtcctcagctgcctgagatgaattcatttgctctagagatacaggtaatacatgaacaagcctaaatccaagaggtttccgtacacggccataggtattacttacagcaaccacaacctgagaaggtggcacacaccttgaggacacacaatcacccaaaataacataatttgaaggagcttgtggcctccaaaaggtgagattgtacccaggcaactcaccattaggtgatgtccaaactcgcttaaagttaatacaagaaaccaatgggttattattgccaaactgcaatgcagcaagagtttgattttgcagtttgagcaagagagaagccacactcagagaaagatgaatgtatacatcagtagatgcaagtactatgtttgtcttttcactgacagaagtatatttccatgaaacatcaacaggttcaagaacaagaagaccagagccagcttcgatcgtaaggtctttaacaactgatcgagcccatatgtctttttcctttgaggcatacatgaaactgaaatccatcttggcgcgaagaagcttctcgatgtgcaaggaatcatcaattgataactttgaactgtcgtaaaaggtaaattctggggatacaaccgtcttaagaaaaagaacagaaaaaaggtcctgagcctcaaatgtaaaattcagcatttgggccgagggggtatctgcaccaggctgaagagcattaattctcttatattcttcattttgcgtattatcatcttcattatcatttagagaactttctaatactgaaacttcaacgccatcttcagcagaaattgagtagctgcttccagcattcaaatatacacacctccgcagtaatgcaccgttctcaatcttaacatttttgaatctaagttttttgccccgccccaaaataattatagtccctgagtataactggcccttcttgtcatattcgtcacataaagatatggtgcctccacagccatcgtaagtgaaatcatcaatatcgcaaccatcaactattagctgcctcccaggagatagttgaataaaattctctctcatggtgaggttggaaacccccacatcagatgaagggtcctgagtactcagcttagaagtctcagaataagatccaagcataaggcgcatctcggactttgtatcttccagcacaagctctgctagaggtgactcagcatctggaccattgcgaagctcaaacaatgcatactggacatccacagtcattactacaacagtacgcgatagtaacaaatggttgttgagattaactttatctgcaagtagacgaattgaatcttttgtccgatttacattatcacggaaacctggggggaggttgggcgcttctgataggtttgtcgaaatgcaacttgtgatgacattgtattccttatctgacatgataccatggagcaaccctatctgaaatttcatgcagagcatcgggacccttttgaaaacatcccgcaagctacgtcgcacttctatattgatgccatgaccttctctaatcatactctttcctagaataccattgactccaaccgccatgttgattccattaatctctgcttgaagaatatcaaggcgtacagcagaaggatcactctcttcacctccacgccagcaaaaaccattcctaactttcagttgtcccagatccagttgtatatagtctttgctctgggagttctttggaacaataattatgggtgtgtcaagtgaaagatccagctttatagcagaagcaccatctatttcatatttctgaatcaaccactcgaaacctccaactttgtcgatgaacttgattgcttcttcagtgtgaggggtggcaagctccatgaagtaagaggtgaactcctgaacaaaacgataaaggaatacaattcgcacagcagaaagttgcccaatcagactatagttgtaaccttcatagtcatcatcgtcaacgctgtaagactggaacgcaaactttataagagattcaacacctggtttccgtatatcacatagccaaccccaacgatgttctggcccaagagacatgtcacaaaatctcatattacccagcataccatcaattgaaaatgaacctggatgaaccttcagatcaaacagaaatttctcctgcacaaacatcgcaagctgagaaccatcttccttgttaagaaacatagatacccgatccacatccatcttcatgttgaagatagttcggcgttttccatagcctagcaaacctttaacaaaattgcgagcattatcttccatccctgtaggtttgacgttgcgtactgcaggtgttgtatcagagtcaccctttggggcagaattaaccatgctaagatcaaatccaaactcaatcagagcaacaagagttggtctgttacagtagaattccagtgcagacatacggatacacatctgcgaatctataccatcataaagacaagaatcaggagtcctggtcaaaaatgtaaggacaacaaaatcgttaatattattgtcttgtgcctcgtaaaatacttccgtaggcttcactttctgctgatccccatcaaagcttaaaccatctttcgaacttaattgagtatgcccatctggatcaaatattgagttggaaggaatttccaaatcttgaagatttggactttggtcaggagtgaaatctgtcagcgcatccatgaaagaatcttcctcaacagagaaggattttcgatgatcctcctcatcaggtgaactagaatctacagtttccaaattgtcattgataacagagcatgctagataatttgaagacatagagagacgaccctgaagctcatcctttatcttcaaagaatgcagttttgtttttacactcaaaccacgagaagattgaacaacattaaccat

SEQ ID NO: 48649 - DNA, 918 bp, Oryza sativa
  Clone ID: PAT_MRT4530_51303C.1
aaagaaatggccttgctggccatgtaaattggaccgcccacttgcattatacatatataaaatatatctacaaataaagctcttgttgcattatgactaagactgctatatcccaaaatttcacatataacacaaaaatttacaacaccgaattgggtccgcctaaaaagttatatatgcaatgcactggtatgtgccttcacgttctgaaatatccatacaaacaaatcggctctcttgactgccaactagtcaaggtgagcatgaacctgacaacacctctgcagtcgaagagtagcacggcattgcttgtatcatgctcaagcgcaaatattaattcaaaaataattttctgagacatcatcatgcaagtgtatctagtgtcgatcctttgatgagagcatttgtcatctaaccatatgataagtcctgaacggtacgaccactagtgttgcgaggggcatatggtcttggtaccttccatctcagcaattcctttgttgattttggaccataggccttatacgctccgtcaattgatgagtaaatcagtgtagcttgatcagacccacgattacacttgaccaaccgaacaacctccctagaatttgtgggcttagctttcaggtacaaaataagctttgaaggtaaggatcctggagcatcctttttcccatgggtcatttctacagtcaccaaatcatcccacaatacatcccagattacagagcacggatcctttgcaggactgaactttctctgggtcatcattgggacctgaagcagtagtactcttctgtgagtaattaaaagaattttacccttaggtagcataaaatgatcctcataagcatcagtagatgcaaactttccccggactttgaaaaggtcaacttggccaagaacccacagcgtccg

SEQ ID NO: 48650 - DNA, 1595 bp, Oryza sativa
  Clone ID: PAT_MRT4530_51304C.1
atgcgtaaggagaaaataccgcatcaggcgccattcgccattcaggctgcgcaactgttgggaagggcgatcggtgcgggcctcttcgctattacgccaactagtgattcccccgggtgtccctttcttcttcctcgcccatgcgcgtggcgccgccgccgcagagctcgattcagaccatggcgtcgccgtccatcccggcggctctccgccacccgcatgcccacgccgccggcctccgcctcctccgctcctcgggagacccctgcccgccctgcacccttccgtttaggttatgtggagtgccattaaaaaagggccatgtgtacgctggtgctgtatctgctaccaggagtcctggcttgggcaatgcagagaatctgcgtgagagtccaagcttgtcaaggagctggggtatgaatgggcagattggcgatgatcatgatattcttatagaatgtagggatgtgcacaaatccttcggtaacaagaaggtattgaatggcattagcttcaagattagacacggagaagccgttggaataattggtccttcgggaacaggaaagtcaactgttttgaaggttatggctgggctactggctccagacaagggcgatgttattatttgcggaagaaaaagacatgggctagttagtgatgatgtttcaaagtgcagctttgtttgattctctcacggttcgtgaaaatgttggattccttttatatgaaaattccagcctgcctgaggagagaatagctacactagtgacagaaacattggccgcagtaggccttaaaggcgttgaagatcgaatgccatctgaattgtctggtggcatgaaaaagcgtgtagctctagctcgttcaataatatacgatgatacaaaggaaacaatagagccagaggttattttgtacgatgagcctactgctggacttgaccctattgcatccaccgttgttgaagaccttatacgttccgtacatgtaacagggaaagatgctcttggtaagcctggaaagatagcatcttatgtggttgtcactcatcagcatagcacaataaaacgagccgttgacaggttgttatttctccatgaggggaaggtagtgtgggaaggaatgacacaagaatttactacatcaacaaatcctattgtaaaacagtttgcatctggtagcttggatggaccgatacggtacttctgagaattataatccaagttttcttaatgctccctgccctaccaacctgcacattctgccatatctacagaaggcatcccagaacaagaggacgacatgtgacttgtatctggttaccttaggcaggtctggaggtacacagcaaagtttctgccttggcattattaagcaaccaatagttgcgttagcacacaggaatataacccttgagatttgttggaccttgttaagtgaaataaacaggaagaagagcttgtaaaatggaacagtttgttggttgagttgtgtaaatgtaaccttgattgtagcagctgcttgggtgttggtgtcatagatgagagattctatattcaattattgataaaggctctacaattttgcgagcc

SEQ ID NO: 48651 - DNA, 506 bp, Oryza sativa
  unsure (1)..(506): unsure at all n locations
  Clone ID: PAT_MRT4530_51305C.1
ctaatgtccntnaacaaaagcacttatgtgtttaaccacaaaattttgcttggttcgcaaattgttataccttactctgttagccagnggggcataagtnagcaanttaactaaaaaaaaagaaataattgggttttcaaacaacaaaaaaacaaaaacaacaacaaaccaaagtaaaagnaactaaaaaaaaaaaacaanaaccnccaaaggggggggggccccaganaccccaaatncnccctnaantantnaaanttctctntttanaaatnccactgggccnncccttttnaaaaaactccttnaanatgaggaaaaaacacctgggnttttacccnaaattnaaatccccntttgntncaaaaaatccccccnttttcccccnannttgggnnttaantaannaaaaaaaanngcccccccccctatttccccccctcncccaaanatttttgccccaccccttaaaaatggggaaaanttggnaaaaatttnnttaaacc

SEQ ID NO: 48652 - DNA, 406 bp, Oryza sativa
  Clone ID: PAT_MRT4530_51306C.1
gtggtaaccgtaagatgcatctagctagataaatagataacagtggataaaccaagcagtgtttaacagcagtagaataattctctcaaaaagaaaatattaatagaatcaataataaaggatcactaatactagctagctataggtagggtactaaccaatggcatcctccgaggaaacaagctggccagaaaggaaggtgtagagcagcaggaccaggaagaagccaagcaggaacccgatcacggccttgtggtgctgcgccagcgtcttcgctacgccctttaccgccggaggcgccgatggcatcttcgtcgtcgacggctccggcgccggcgtcttggaactggctaaccatccgccttttcttctcttctcttctcttcctcctcctctacgtaagaga

SEQ ID NO: 48653 - DNA, 966 bp, Oryza sativa
  Clone ID: PAT_MRT4530_51307C.1
aactagtggatccccgggcggtagggctgaaatctctttgagagaagtatccatcacataaggcaagtctcttacgtagaggaggaggaagagaagagaagagaagaaaaggacggatggttagccagtccaagacgccggcgccggagccgtcgacgacgaagatgccatcggcgcctccggcggtaaagggcgtagcgaagacgctggcgcagcaccacaaggccgtgatcgggttcctgcttggcttcttcctggtcctgctgctctacaccttcctttctggccagcttgtttcctcggaggatgccattgtgagggccgtcacacaacagtccacgcctgccgtgcataccgatcaagacggcaggaccacatctccgacttcaccaacgtccacgtccagcaatacgacacaagataacttggaagggaaaaatactgagcggtctagccagccagctgtgaacgacgaagcaagtgacaagatggaggaggatcttatccggcaagacattgatcaagctggaacgaaaaatggcacaaaccataaacccggtgcaccacgcaagccaatatgcgacctgttagatcccaggtatgacatctgtgagatctccggcgacgcacggaccatgggcaccaatcggaccatactctacgtgccgaccgtcggagagcgtgggcttgccgacgacagccatgaatggagcatccgagatcagtctcgcaagtacctggagtacataaacaaggtgacggtaaggtcattggatgccagtcagcgccgggatgcaccttgacacgccgtcccggacgtggtgttcgtgaacgggcttacctcgaacccgtggcacgacgtgacgttagtaccctacctatagctagctagtattagtgatcctttattattgattctattaatattttctttttgagagaataattctactgctgttaaacact

SEQ ID NO: 48654 - DNA, 492 bp, Oryza sativa
  Clone ID: PAT_MRT4530_51308C.1
atggggacggttgggtggagcgtgaagaaggcgtccagttgcccgcgcccctcctcgccgtacaacttgtggatgaggaggtggaagggcccctgctcggagaggggccgtgacggcaagcgcccccaccgccaactcgtgcgtctttggttctccccacctatcgccgccagcgctctccccctaccgccgatcactaagaagaaagcggcagcagcagctggcagcggcggcagcaacagcagcggcggcagcagcagtagcagccccagtagcaagcagcagcggcggcagcaagagcgccagcagctagccggcaacggcggcagcaacagcagcggcagtagcagcccgctccacgcaatattcaacgggatttgcacggattggttagagttcgccggaaaaataggagatgaaatccgcttcgaatccacgcaatattcaaagggatttgctccaattcttgaggggaatgaaagaggaggataa

SEQ ID NO: 48655 - DNA, 265 bp, Oryza sativa
  Clone ID: PAT_MRT4530_51309C.1
gtcaaagttatagcaatatcaactcaatcgcctatccgtgcctacaacaacaggtgcttacccatataatgaggtttctgtaaggcacccgctattgccagtacggccagagaccccttcattacaaatacacccatgcctgttcaatctgagcaaacaaccataatctgagcaacatctcagctctggctggcaccaaactaatctcactagtcacggacaattaaacagtgttcaagcaccatatgcccacacgcctacaagc

SEQ ID NO: 48656 - DNA, 240 bp, Oryza sativa
  Clone ID: PAT_MRT4530_5130C.1
ttcgatccacgcgtgcgtccacgcgtccgcatagatcaggtagaacagtgagagtgaggtgcataaaaatttgagctgaatctgaggatggcaacatccatgatcacctctcctttggtggcgccggcccgggccaaggaccttccgtccatctcccgccggtgatccttcttcgccatcgtttgcagctgttggaataagatcaagaccgtcaagccctactggattggaggtggcatg

SEQ ID NO: 48657 - DNA, 402 bp, Oryza sativa
  Clone ID: PAT_MRT4530_51310C.1
aaatcataagaacacagaagaacatcgaagatcatcattaagtcaccacgtatatatacatagatgctcactgacaaaagaaagccctaactatgtagtacccccacatagttacacacacacagttaactatagtagcctagcgaccgtatcttggggtcctaggatacccaagcgagtaatagacaccacccaccccattgaagatgtgcaggttgcacaacgcccggtggatggccgctgtgcgctacaagtggaatatctgggacacggggaacacctcatccatggggtgcccggccttggagacgcctagctccatgtggatgcctgacagaatgtgatacaacgtgccgtacatggaccagaggtggcggacggaggccagctggaggtagtagt

SEQ ID NO: 48658 - DNA, 406 bp, Oryza sativa
  unsure (1)..(406): unsure at all n locations
  Clone ID: PAT_MRT4530_51311C.1
taaatattaccaccaaagtctcttgtttatatagctatatgaactcagaaagctgagaagctgcaagtctgctgctactagcaacatgatttagatgcttagtggaagtttgctcaaatatttgaaccgcataagcttgctttgctttttacgtgaagcctaaacaagacattctattcttctatagttgtattttggggggatcgatttcatgtatgcctgatttccaatgtatttggatgtcagttttgcctaggtttattttatctattttgggttcagcttatatttttgctgtctgttatcatgctatattattctagatatttcaaaaactaacagtgattttgtctcttctatgagatgcacctccttgcatcanntttcacggcccttacagggtttt

SEQ ID NO: 48659 - DNA, 270 bp, Oryza sativa
  Clone ID: PAT_MRT4530_51312C.1
atggctctccaggccaaatttgggcaattccagcaaaacaatcttgctccagctggccattcgccacggaggagccgtggacatgccctcgaggtgtcgttgctggaggtgctcaaggaggacttcgtgacggaggtggaggcgaaggtgaggggacacgcgggactgcaggaggcaccgtctagcagtgccagcattgccataggaggaggatggagacagtgtggacttgggcgcggcatgatgacaacgacaaagatttggccgtag

SEQ ID NO: 48660 - DNA, 882 bp, Oryza sativa
  Clone ID: PAT_MRT4530_51313C.1
atggacgcgccgtgtggatggacgacgtcggcggcggcggcggtggcggaggaggaggatgttcggagagggccgtggacggtggaggaggacgcggtgctggccgggtacgtggcggcgaacggcgaggggcggtggaacgagctggcgcgggcggcggggctgaggcgcacggggaagagctgccgcctccggtggctcaactacctccgccccgacgtgcgccgcggcgacttcaccccgcaggagcagctgctcatcctcgagctccacttccggtgggggaaccgctggtccaggatcgcgcagcacatgccggggaggacggacaacgagatcaagaactactggcggaccagggtgcagaagcacgccaagcagctcggctgcgacgtcaatagccgccagttcaaggacgtcatgaggcacctctggatgccgcgcctcgtcgagaggatccacgccgccgccgcctcgtcggaacgcgccgcgccgccgccgtgtgccgccgcgccggctagtcacagcggcatgtgccactcacctgacccgtcaaccacgacgtcgagcatggcagggtcgtcggtgacgcacggcgagcagttcccgtcgtcgacgaaccaccacctgatgaccatggccagcgtcaccaccgcagcggcagattggtccagcgagcaatgcggcagcggcagcgccaccagcacgagcgttgggatcagttatgacatgttcgaggggagctggtcggagctcctcgcccgcgcctacgacgacgacggcgccgattcttcgctgctgccggacttccaaatggcagacaccggagacaactgctggtggagtaatttggaggacatctggtcacagcagccgtactga

SEQ ID NO: 48661 - DNA, 385 bp, Oryza sativa
  Clone ID: PAT_MRT4530_51314C.1
atggcggccgtagattttgatcttcggtttacttatgtcttggctggttcggaggggacaacacatgatgctgtagttttaagagatgctttggaacgtgaaaatggccttcatgtcccacaaggcgacagaataggcggcggtggcggcggaagaggcggcggcggcggaagaggcggcggcgagcccacttgtcgtgtcggcgcggcggccgaacctatcaagaacatcgtgtcggtgcggcggcgcgggggcgggggcgggggcggggggagcggcggcgagcgcgtgctgctggccgcgccgcggttggcttcccgcctcgccgcggacgtggagccgacgaaggagaagacggccacggcgtcgaccccgacgggcgcgg

SEQ ID NO: 48662 - DNA, 963 bp, Oryza sativa
  Clone ID: PAT_MRT4530_51315C.1
tcagaagcaggggacgatgcgtgaagaagccttgacgacgccatcaaccccgaccaccttgctctgcttcgcgtgctcttcatcgctcgcgcgcttcagcttcttcctggccacctcctcctcgtcggcggcgaacatctccagcagccgctgcgcctgctccatggcggtgcccagcccgggaatcttcagctgctcggtggcctccagcgcggccaccatctcccgcacctcctgcctcgaccgcgccgccaggtacctcgtcacggacgcgagtggccgccccgacaccacgagcgacgcggcgtggacggcgtcctccatgccgacgggctcgcgctcgccgccgccgccgccaccgcggcgcctgatgcttgggcgggcggcgaggccgacgcggagctcgcggccgcggaggaggtggccgtggaggttgcggagggcgctgcgggccgtctcgtcgtcggcgtactcgacgaaggcgtagcccttgcgcttgttggtggccgggtcgagggcggcgaggcggagggagcggacggggccgatgagctcgcaggcgtcgcggagctcggcctcggtggcgtggaaggcgatgttgccgacgtagacgacgcggctgcagcggcagttcacgtcggccatggcggcagcgggctcgggcagtggcacagccatgctaggtctcagagcggcgcgagacggggagagaagtctagaagagatggcggagattcgcaacgcgcgcgcggagcgggagatggatggctcgcgggcatcgggcccggcccatttatcgaggcgatcctcctttccgcactcggagtcgggctccgactcggagtccaattgcggtggcggtggcgtgagcagggcgcggactccgactccgagacgggtgcgtattggtccgtttctatgcttaaatgactttttctttaattttttcgctaatcgagccat

SEQ ID NO: 48663 - DNA, 231 bp, Oryza sativa
  Clone ID: PAT_MRT4530_51316C.1
atggcggcagtggatggggacagagcccgagcgacggcggtgatggagggggcggagcccgagcgcccggcgagtgatgggagcaaaacccgagcggcagcggcgaatggcggtaccgcggcagtggatggagatggagcccgagtggcggcggcgacggtagatggtggcgacgagagggtgaatggggaggctgttggagtaaacaacgagtttgacttgataaattag

SEQ ID NO: 48664 - DNA, 328 bp, Oryza sativa
  Clone ID: PAT_MRT4530_51317C.1
atggctagatccacacaaggtgaggccagtggacggttggagggccgagccaacacatgctgtgattgaggatggcagagtaatggtcatagaggtggcggtggggatgctagatcaacatcctattggccagatcttatgtccttctagacggatcctgtgtgtctccagtgagaggtacagatccttgaaagcaactcttgatgacgacgagaacgacgtgggtggtgggcatatgctctgcagacatggcgtggtggccggtagtgatatggagagaggcgtaaaacggtgtagccacggtgtcaagggtggccgtgggcattga

SEQ ID NO: 48665 - DNA, 666 bp, Oryza sativa
  Clone ID: PAT_MRT4530_51318C.1
tcaagaggttaaaactcttgctaagttaaacaagggtttatttactataaccgttgcaattttcacgcacgagcccactgtcccgcgtgtcgtttgctcgtttttgagccgaacttcgccacactttatagcgaactatttcatacaccatactttattggcttcccgcactttgacagatttagttgtgacaaagttagtcaccaacgaaaaaaggccctaaacatcagaactcacaacagctatcaggtaatattcctgtcaagatccttggcgaaagagccgataatcattcatcagaggtttaatcatctaatatattgagcaggactaaagatctgccatatccgccaatgagctaccatctgtgagtgaaaaagataacaaaacaaccggtcagttaaatatacccaaaagttcaaaactaccacacactccttcaatatcatgaactgataaacaaagtcatctgctaaaccaacgtcaggccctcgccctcgaaacaacataaaccatttaaataagttgcaacggagatcatgcatgcttcgacttaacactcagatgcatgttcatgtgaagtaaaattgcttgccattatataacaaggaaataaaaaagactaaataaaatcgtactagtggttaaatgtgcacattaacactc

SEQ ID NO: 48666 - DNA, 411 bp, Oryza sativa
  unsure (1)..(411): unsure at all n locations
  Clone ID: PAT_MRT4530_51319C.1
ccacgcgtccgcccactctcgtctcggagaggcaacgtcgccctcgccgccgcggcggccggatccggcggatggcgaactcgaagcggctcccgtactccacggccggcggcggcgggggaggaggaggaggaggggggagngcgcggcgncnccttcnnctcctgcgtggtggcgccgctggtggtcctcgtgttgctcttcgtgctcgcgccgtctgtcttctttgtcgcgcgccttgggggccncctttccgttgccttcgattccntggcttgggcttgttttccggtttctgtttggttttttattttggggnnnnnnngnntgnggtttgtttttttttttgtgttgtttttttgttttttttttttttttcttgttcgggtcctttttttgtttttttttttt

SEQ ID NO: 48667 - DNA, 504 bp, Oryza sativa
  Clone ID: PAT_MRT4530_5131C.1
atgaagaagaaatcgattgatttgaagactttgtgggatagacattcaaagtctaggaaggtagggtcaggttctggttctggatcaacagcacagcccgttagaattgatagcgaagttgctgttccttttgttcagccgattacatatgcaaatgagagtccagttcagattcagattactgcagttgaggttgtgcctgaggtttacttaaaagccgtgggattgctgggagagcgccacgtcagcgattttttagaaaacccctcatcatctggtgaaatagcaaacacgttcgaattcacgtggaccgtactatctgatacgaggcttgatccaaccatccatgtggccctgtgtgccgacccttccaccaccgttgaatcagagaaaaaggaacgaaggctcagatcccttgagccaagcctcctaacaaaaaccctagttttctttaagcagacactcttcaacttctttcctctatcatgccctcgtgaaaactaa

SEQ ID NO: 48668 - DNA, 5296 bp, Oryza sativa
  Clone ID: PAT_MRT4530_51320C.1
atgtcgtactacgtagatccctattccagcgtaccccaattccctattctttcggtccgcgagtatcagtcgtcgacagtggcgcgccaggtagggggacttggtgctcaaggatctaccagcatgacttcaaggcttcccgacaacagtcccatcatcagcgccaatcaaggagtttctacctcgacaccgctaatgtggactcaagtcggatctattgtctttccggtctacaccgttacaccaatctctactggcccgatcatcattgggagcgagaaaggtacggcgacaactgagagaaacgacgccccgccgacaattcctcccactccgatggagaatggaacatcgacaatcccaacacctgggaggaaccctcaagcggctgaatttcaccctccatgtgaaagaacgaagccgacaaggataacctccctaaaaccgagaacttggtgtcctgtgcataagacaaccaagcatactctcgaggactgtccggtgatactccatgtgcaagctgaagtctacgcctgttgagaacgagggatacagcgcacttcaccaacgagtaccacctattgtccgatccacagatctagagtgcacgatctcacccactacaggatcttcctcaggaccctcaaaccggcgcatcatcgtgtccagcaaccacgagttcaaactccgtgcgttgccaaggaaccagatgcagccccgatcccagatcggtttgtgggattcgtcgacgccaacgagccatccgtgttacacctcttggagggctacgaatcctcatcgcagtcacctagagatgtgaacgtggtcgacaacaccgagacgagaatgtccgcagctatgagaacgccggcacacaaattgcgcaacctggacgcgatattacgggagaccgtgaccaacctcaacactgcgttcgctgaagccgcaggcggtccagagctgaacaaggacggagaacgacctcccgagaacaaggatggagaagacctcaccgcaagacatgtcaccggcgaccggtcccctcgaaggcgtgaccctacaccaccgcgccgtgaagatggcgaccttcgcgagcatcttaacggacgtcggcgtaataggaggcaacgcaacgagaacgagcatcaccgccatcattctcctcgtcgccgagagcggcacaacggccggaggaacatccccaatgagaatcgcgaccgtccaccccgggacgaccgacgcgacgacgacaacaaccgagatcgggaggacagtccccgaaggcgggagaaggacgaaggcaatcgttgagatcgaaattcccaatctcctcatccgagtcgagatcgaggtcgtgatcatcgttcaagaagccgagctcctgatccgagcgacccctcatcctcgtcttcatcatcttcttcggatcggcctcaaagacgacgtcgcgaccatagaccacatctagcctgggcaacggacgcagggcattcacacccgcacttcgcaacgtgcgatggcccgagaagttccgaccagggtcgattgagaagtatgatggaagtacaaagccagaaaaatttctgcaagtctactccacaaacccgggcgagacattacgggactatacatgcttcaacgagtgcagaaatacgatccccgagataaccgatgcttctgtcatccgagcgttcaagtctggcattcgagatcgatacaccacctaggaattggcaacgcgccggatcacatccacccgaaaacttttcgcgatcatcgataggtgcgcccacgctgacgacgctctgagacacaaggagggaaagagcaaagcgggagacgagaagaagaagtcgacggataaagacgcaccagagtcaagcaagaagagaagtcacagaagcgggaagcacaagtcttctggagaggtccttgccgcagagcaagcagaaccctccaaacgctccaacccctagggcgatgactcccgcaagccgtggtgcccaatccacaagacaagtaatcacgctttggaagattgctatgtcgtcaaaaaggagctcgcgaaacagctagcgatcgaaagaggaaagcgagtacgagtcgtcgagatggcagaacaggccaccaccgacaactctaactctgccttcccggagtacgatctgcatgtttctcacatcttcagaggattctgctccacttcacaagcgactaccgccaagatgaagtggtcccagcacaagatcgagttctcggaagcggaccaccccaagatcgcgactacacctggtaggtatccgatcatggtagaacccactattcggaacatcaaggtggcaagagttctcatcgatggcgggagctcgatcaacctactcttcgctagcactttagacacgatgggaataccccgaagcgagctgacgcccacagatcagcccttccacaagatcacctcggagtcgttgtctaaaccgttgggaaagatcacgctacccgtcactttcggacacgccgaaaacttccggacagagcagatcacctttgacgttgcggggttcgacaccgcatataacgtcatcattgggagaactgcacttgcgaagtttatggcggcctcgcattacgcataccaagtgctcaagatgccaggaccgaaagggacaatcactatccaggggaacgccaagctggcggtgcagtgtgataagcggagcctcgacatggtcgagcatactcccaacccgcccgccacaaccaagaacccgaagaaaccgtcagacatgccaggagtacccagggaggtgattgagcacaaactgatggtgcgacccgatgccaagctagttaagcaaaaactgcggagattcgcacctgatcgaaaacaaaccatacgagaagagctcaacaaacttctcaaagctggcttaataagagaagttctccatccagagtggctcacaaacccggtaatggtacgcaaagccaacgggaagtggaggatgttcatcaacttcaccgatctcaacaaggcgtgccccaaggaccacatcctcttcctcgaatagaccaactggtggactcaacggctggttgcatggcaaaagaggacgaggagaagacagtgttcatcacgcctttcggtgtattctgttataccaagatgccctttggattgataagcgcaggcaacacatatcagcgcagcatccaaggagcactcggtactcagcttggacaaaacgtcgaggcatacgtgcaggatatcgtcgtcaaaaccaagaagagcgactcattgatcaacgacctcagggaaacgttcgacaacctccgaagataccaaatgaagctcaacccggagaagtgtatgttcggagtatcgtcagggaagctgctcggtttcttggtttcaggacgaggaatcgaggcaaaccccaagaagatcaaggcgatcgagaacatgaagtcgccgacaaggcttaaggaggtccagcggctaacaggatgcatggcttcgttaagccgattcgtcgcaaggatgggagaacaaggacaacccttcttcaccctgctcaagaagcaggacaagttcgagtggaaccaagaagctgagaacgcattaatcgtgctcaagcgctacttgtcgaatccccctgtactcgttgctcctcaaatcaatgaagaatcattcctgtatatcgctgccaccccttattctgtgagtacagttatcgtcgtagagagggaaaaagtacaacaccccgtgtactacgtaagcgaggccctccacgatgcaaaaactagatacccacagatccaaaaactgctctacgttgtcgtcatgacatcgagaaagctatgtcactacttctaggctcataaggtcaccatcgtctcctccttccctttgggtgaagttgtcaggaataaagacgtggtcggccgaatcgccaaatgggtagtcgagctaagccaattcgacgtccacttcgtgccaagaacagccatcaagtcacaggtcctcgccgaccaaacggacaacgagacctggaccatggaatttgacggagcactgaacagccaaggagcaggcgctggattcatcttgacatcggccaccggtgataagttcaagcatgcaatccatctaaacttccgggcgacaaacaacacggccgagtacgaaggactactcgcagggataaaagcagcagcagcacttggcgtcaagcaactaatcgtgaagggagactccgagttggtcgcgaacaaagtacacaaagactacaaatgctctagccccgagttagccaaatatctcgtcgaagtcagaaaactggaacgcaagttcgacggaatcgaagttcgacacgtctatcgaaaagacaatgtcgaaccagacgacctcgcatgacacgcttccagacgagaaccgctcaagcccggaacgttcttggacgtcctaacgaaaccatccgtcaaggacacgcacgacgatagttcagacgagctgccggacgacgacacaaaggctgagaaattgtcccgtcaggccaagatatattgtatgatcggcaacgatatatacaaaaaggccccgaacggagtcctcctcaagtgcatatcatccgacgacggaaaagctcttctcctcgacatccatgaaggcatttgcggatctcacgtcggcgcgcgtactttggtcggaaaagcttttagataaggcttcttctggccaaccgctctcaaagacgcatgtgaaatagtgcaacgatgtgaagcttgccagttctttagcaaacacaccaagttgccagcacaagcgctccagactatccctttgatatggccgttctcgtgctgggggctcgacatactcgggccgttcccacgaggacaagggggctacaaattcatgttcgtggcaatcgataaattcaccaagtggattgaagcagagccgacaagagaaattaaagccgacaacgccatcaaattcatcagagggatattctgcagatatgggttgcctcatcgcatccttacggacaacggatcccaattcaccagcggcgatttccaagattactgcattgaactcggggtcaaaatattatttgcctcagtgtcccatcctcagagcaatggacaagtcaagcgggccaacagaatagtactacaagggattaaaactcacgtccacgataggctcatggcctatgataaaaagtgggtcgaagaacttccctcagtcctatgggccgtacaaaccacgccgactacatccaacaag

SEQ ID NO: 48669 - DNA, 1047 bp, Oryza sativa
  Clone ID: PAT_MRT4530_51321C.1
cttgaggtaacaactaaaaagttggcttaatttgcacaggaatgtttttttgtttctgtgggtcaggtaacaactggcacgttggctttctttgcacaggaaagaatatttgatacagtgggacaaaaaagaacaggcacaaggggtttcccatcaattcaatctccctatcgaattttacaaagaagtatagcaaaagcggtaaaaactctacgtcgccatgggtatgagcaaagtgaatcaatcctcttgcgcgctgagagcgcgcgcgcgtcttaagtcgtttttggtcaaagccgcgcagatcacagcgcgatggtgaggctgtcacggcgcgcggcggcggaggcggaggcggcgaggtccagccatgaggtgggcgtcttcttctcctccggctcggaggccttggtctccgccggcgacgggcgggcgtagggggtggtcgccgcgaggcggtccttgcgcttggcgaagaaccgctgcagcgacgccttcctcatgatgggcatgtccgcgagcgcggcgccctcccgctgagccggcgccgccgccatcccggaggaggccatgcgcatcacctccgccgccttgtccgcggggaagtcctcgaagacgaccatcctcccaccgtagaagatggtcagcggcgcggccggcgccgtcgctggccccgcctcctcctccccaacctccctccgctcctcctcctcgacgaccacctccgccccaggcatcaggctcagcgtcgtcaccgccctcgccggtgccgcccccgccgccgccgccatcttctgctccgccctcacgtactggctgagcaccccgcacgccaccgcgaacctcctgctcttcccctccatcgccatatcaacaaacactttcgcgagaaacaaaacgcggcttctcttcaccttccttcttgttcttcctcgctggtgctttgcttggtgagttttggtggttttgagtcgtgggatttgacggggtgggaagagctgtgttatatagggaggtggagggttggaacttggaattggaggcaag

SEQ ID NO: 48670 - DNA, 113 bp, Oryza sativa
  Clone ID: PAT_MRT4530_51322C.1
aggatcgggagagcataggcacttaggcagcaggtaactacccaccgggcaaggatggccggagcgcgcaaaaaaaggctatctataatggcttcacatactacatgtaaaac

SEQ ID NO: 48671 - DNA, 3009 bp, Oryza sativa
  Clone ID: PAT_MRT4530_51323C.1
gtcgacccacgcgtccccacgcgtccagctagcggctatcaaacccccacaccactgctcgatcgatcgtcgcagccggagtaactaaggcagagatcagatcaggcgaattaggagcatatggcgctgtcgacggcgcagacaggggagtcgatgcactcctcgacgttcgcgtcgcggtacgtgcgcacggcgctgccgaggttcaggatgccggagaagtcgatccccaaggacgcggcgtaccagatcatcaacgacgagctgatgctcgacggcaacccgcgcctgaacctggcgtccttcgtcaccacgtggatggagcccgagtgcgacaagctcatgatggccgccatcaacaagaactacgtcgacatggatgagtaccccgtcaccaccgagctccagaaccggtgcgtgaacatgatcgcgcatctgttcaacgcgccgatcggggacgacgagacggcggtcggggtgggcacggtggggtcgtcggaggccatcatgctggcggggctggcgttcaagaggaagtggcagaacaggatgaaggccgaggggaagccccacgacaagcccaacatcgtgacgggggccaacgtgcaggtgtgctgggagaagttcgcgcgctacttcgaggtggagctcaaggaggtgaagctgacccaagggtactacgtgatgaacccggagaaggccgtggagatggtcgacgagaacaccatctgcgtcgccgccatcctcggctccaccctcaacggcgagttcgaggacgtcaagatgctcaacgacctcctcaccgccaagaacgccgagacagggtggaacacgccgatccatgtggacgcggcgagcggcgggttcatcgcgccgttcatctacccggagctggagtgggacttccggctgccgctggtgaagagcatcaacgtcagcggccacaagtacgggctcgtctacgccggcgtcgggtgggtcatctggcgcaacaaggaggacctccccgatgagctcatcttccacatcaactacctcggcgccgaccagccaaccttcacgctcaacttctccaaaggatcgaaccagataattgcgcagtattaccagctcattcgtctcggattcgaggggtacaaggacatcatgcagaactgccgggacaacgcgacggtgctccgggaggggatcgagaagacgggccacttcgacgtggtgtccaaggactccggcgtgccgctggtggccttctccctcaaggactcgtcgcggtacacggtgttcgaggtggccgagagcctccgccgcttcggctggatcgtgccggcgtacaccatgcccgccgacgctgagcacgtcgccgtgatgcgcgtcgtcatccgcgaggacttcagccgcggcctcgccgagcgcctcatcaccgacctcaccaagacggtggccgatatggacgcccacgccgtcaagaaggccgccgccgagccggccaagaagaccgtgcgggagatagagaaggaggtgaccacctactggcggagtttcgtcgccaggaagaagagcagcctctgggaggacgagggcaatggtggtagcggcggcccaagatgttgctcgtcgtcctcgccctcgcaattaccggtgcggtcttcgacggctcgcgagtcgctggaccacatctccatcaactgcactggcggggtcggggccacatccggctgccgctccgtccactcgcgccgttcagcaccgacgaggagggcgaggctcctcgtccccgctcagccgcggctttgcttggatagtcccgactggaggcagtcggcggcggggagggagtgggaacaggagcgggacgacggcgacgacagaagaggaagttggctcgcgtcggaatcttggtggttcgtaggcgatgatgccaccgccgccgctgccacccgagttcgacgcgagaaacggcgtgcctgcgccggggcaggcggagcaggaggcgatggagctgcacgggcgccgccatcctcctcctcggcgagcacgagggcggcggcctcaactccgggcggtgggatgcgcggttcgcgcatgcactacctacggtactacgacgcggcattcgacgcggtggacgcggcggggttgctggagactagacccgcgagggccaaggtggaggagatgttcgcgcgggagatccgcaacgcagtggcgttcgagggcgcggagcggtttgagcgccacgagagcttcgccgggcggcggcggcgcatggaggacggtggcggtttgcagtggggttcgaaggcggaggagaaatgtttattgccgtcgtcctccttggctcgtcgtcccagacgccaaccgtcgcccccggtttcgctgcgccccgatgggagcttgccaccagccgtcgccgccgctccactcgtcctcccactgccacgagcctccgcggccgagccgccgcgctgcgccccgatgccgccaaccgccgctcccctcgtcctcccgccaccgctgccaacagagaaagagagaatatagcgccgtcaagaaggccgccgccgagccggccaagaagaccgtgcgggagatagagaaggaggtgaccacctactggcggagtttcgtcgccaggaagaagagcagcctcgtttgctgatcatcgactcctgcactcgcgcgtacataaagtgcaggaacgaataattcttgacccgtcttgcattgagttcttcgtttgctgctgcttcttttctttttttttttccttttcacccgctgaattttgagttcagtttcaaattcgcttcgatagatttgtgtatgtcacaccgatttgtggcattcttgcagacaagttaccaatatgaaatgcgtataggcatgtacacgcagagacgtgtcaggcagaacagaagtgagatgcaccgatctgtaccggccatggcatggaattggtttgtcatgggctatagttggttgacagaataagttcattttgtgaccctt

SEQ ID NO: 48672 - DNA, 254 bp, Oryza sativa
  Clone ID: PAT_MRT4530_51324C.1
gcacgaggcaccccccggcgccactcgactccattcgtcgccttcccgatccggagagatgcccccccgcgcgccctcaatatctgggagcagccgccgactcctcctctctcgtcgtcttcccctagtccgcgtccgcgatgcagtcgcgcgtggcgtccatggacgacgtcaaggacgcccgccccgccgccctgacgccgctccagccgcaggggagggtgttcccgacggggatgctcaaggtgttcctc

SEQ ID NO: 48673 - DNA, 1236 bp, Oryza sativa
  Clone ID: PAT_MRT4530_51325C.1
atccccatcgcctccattccaccgccgccacaagcctcgcctcgccgcgccgcgttctcggccacggcggcgccaatggccgaccgcgtctacccggccgcgaagcccaacccaccgccggcaatggcgaacgcgggcggcggcggcgcgacggcgtcgttcccggcgcccaagtcgcagatgtaccagcggccaatctaccggccgcaggcggcggcggcgaagcggcggcgcgggcgttcctgccgatgcagcttctgctgctgcttctgctgggcgctgctggtcgtcatcctcctggcgctcgtcgccgccgtcgccggcggcgcgttctacctgctctaccgcccgcaccgccccagcttcaccgtctcgtccgtcaagctcaccgcgctcaacctctcgtcgtcgcccacctcgccgtcgctcaccgactccatccagctcaccgtcaccgccaagaaccccaacaagaaggtcgtctacctctacgacgacttctccttctccgcctccaccgccgccaacgccgtcccgctcggcgccgccacgtcgccgggcttcacccacgacgccggcaacaccaccgtcttcaccgccaccatcgccgccaacgccgtcgccgtcgacccggccgccgccgcctccgacatcaagaagtccggcgccttctccgtcgccgtcgacgccgagacgcgcgccggcgtcagggtgggcagcctcaagaccaagaagatcggcatccaggtgcactgcgagggcatcaaggtgacgccgccgccgcccgccgccctgccgcgccccaaggcggtgaaggggaagaacggcaccgtgctggctccggcgccggcgccggcggactccgacacggcggcgaccaccgccgcgacggtgagcaccgcggcgcactcgtgcaaggtcagagtccgtgtcaagatctggaagtggaccttttaggtacagaatttcgcgaaagtttaggggctcggatgcaaaattttcagaaaaaaggattttcactttatcatttattatatattggagtagaaataccatgcgtcggtggggtgtaaattctctcaaacatttgtttttttgtttttttgcttttcgttttcttctatattatcttattaaatacttttttcctcctctttgtagcgaatgtactgtataattttgtgatttattatttgtaacattataatttgaattttatatttaaattttctacct

SEQ ID NO: 48674 - DNA, 276 bp, Oryza sativa
  Clone ID: PAT_MRT4530_51326C.1
atggagagcagcagcctgtggggcgtgcttgggcaggcgtcaaacgtggcgcagctggtcggcgtcaacgcgctcgggctggtctccatggtggtgcaggcggcgctggcagtgcgcctccaccgggacgcgtgccggcggctggggcagcacgtggagctagtctgctgcctgctgagggagctggagctcgccaagctgatgcggcgaggaggccaccagcgcagtccctcaagcagctcaagggcgcgctgcggcggtgctacgcactcgtaa

SEQ ID NO: 48675 - DNA, 243 bp, Oryza sativa
  Clone ID: PAT_MRT4530_51327C.1
atgacggcggcggcggcggcggcggcggcggcggagtcgtggaggggaggggaaagggacagaaatgcgttggtttttcgcggcgtgacgcgcgagagcgcaccgcccgtccaccgagtggacgagactgcccctccggtccgcggcatcgagcacgcgagcaggggtgagccgtcggcggccacggcggtgtccaaccagcctccatccgccgtcggcctccaatgtcagcagcatgcgtga

SEQ ID NO: 48676 - DNA, 170 bp, Oryza sativa
  Clone ID: PAT_MRT4530_51328C.1
gtgccctaggtggccgggcacgatccagcaacgactcggaggcggcagcgcgatttatcggcaacccgatcgatggtgcgatccatcggcgtacatggcaccaccatcagagaaacaaggcggcgacagaagtgcccaaggtaacgccggcgacgaaaaccggcgcctga

SEQ ID NO: 48677 - DNA, 553 bp, Oryza sativa
  Clone ID: PAT_MRT4530_51329C.1
atgacggcggcggcggcggcggcggcggcggcggagtcgtggaggggaggggaaagggacagaaatgcgttggtttttcgcggcgtgacgcgcgagagcgcaccgcccgtccaccgagtggacgagactgcccctccggtccgcggcatcgtgtggcggagctcgtgtggccagccgctgcctgccgtcccagtccagccacacgagagccgcatcacgctcggaactttctttctttttgaaatagagcacgcgagcaggggtgagccgtcggcggccacggcggtgtccaaccagcctccatccgccgtcggcctccaatgtcagcagcatgcgtgatgttccttctccaatcctcctagaatcccaacgacagcattggatggggatttcgtttcagatctgtacatgttctttcagtagatatttttttcatgtgagcaagaattagtttgtgatgtgtgcaagtaatttgtgatgagatgattaattagtgcttgagcatgatatggcaacatatttatctttttgttaaaaaaaaaaaaaaaaaaaa

SEQ ID NO: 48678 - DNA, 775 bp, Oryza sativa
  Clone ID: PAT_MRT4530_5132C.1
tccacgcgtccgcccacgcgtccgcaacagtgcattaattgatagggagtggaaagttgctgaggtgtgccagaaactagagcacagcttagagattcttggtgtcagtgctatagaggaccgcctccaggctggtgtaccagaaactattgaaatactgaggcagtcaggaataaacttttggatgttaactggcgataaacaaagcactgctattcaaatcgcgcttttgtgcaatctcatttcttcagagcccaaggggcaactcttgtatatcaatggaagaactgtggatgaagttgctagaagcttggaaagagttctacttactatgcggataactacttctgaacctaaggagctagcttttgttgtggatggttgggctcttgaaatcatcctgtcacgctacaatgaagcctttactgaattagcagctctttcaaaaacagcaatatgctgccgggttacaccgtctcagaaagcacagcttgtaaagcttctaaaatcatgtgactatcgaactttggctattggagatgggggaatgatgtcaggatgatacaacaggctgatattggtgtaggaattagtggcagagaaggtcttcaagcagcaagggctgctgactatagcgttggcaagttcagatttttgaaaaggctgattcttgtccatgggcgatactcatacaaccgtacagcttttctttctcagtattctttctacaagtcattgttaatttgctttatccagatacttttttcttttcttc

SEQ ID NO: 48679 - DNA, 487 bp, Oryza sativa
  Clone ID: PAT_MRT4530_51330C.1
cccacgcgtccgaaagattcctgactctagtcaatttcttatatgggatctcgaccgcactacacatctgttcctcattgaacatagtcccggtcctcaccattgaccaaggctgacctcaagtcacctacacaaaatcagacaaaacaaccatttctgggcacagaaatcacaacctgatccacattagtcacacgcacttacaccaacatccacacattttttcaaaccaattcatcgattaaatcatttgcatagctaattgttcatcacaaatattaatcatgacaatattcttttcgataatatgatgcttgcttgcatagctttccatgaagattatattgcacccatgccttctcatcagcattggctactcactgcctaaatttcataaaattgccgtctcacagctcctccttccccctcctctcttttttgttaactttggttttcatagttcaagaatatgacacactttgggcat

SEQ ID NO: 48680 - DNA, 316 bp, Oryza sativa
  Clone ID: PAT_MRT4530_51331C.1
gcaattttaaatttgatctctactactccgtcctagaaaaaaacaaattctaggtacgaatctggatatgcacactggtggagaaacgatccttagtcggtccaccagatttcacaatagtcccggttatattaaaaaccgggactaaaaacatctttagtcccggtttgaaagctcagaggaattttttgatctttagtaccggttggtgttaccaaccgggactaaagatctatttatagtcccggttggtaacaccaactgagaaaaaagatcgatataagctttactttcggttgatgttaccaaccgggac

SEQ ID NO: 48681 - DNA, 173 bp, Oryza sativa
  Clone ID: PAT_MRT4530_51332C.1
tttgtgtttttatttagtaatgtgattttttttattttattttttatgttctttatgagacccccctataggaatgttaaaaccgcatataaaaatattcgatccatgaaagcactttatggcagttcaaaaccacctttacttgggggcatacaaggacatcccagaaagct

SEQ ID NO: 48682 - DNA, 507 bp, Oryza sativa
  Clone ID: PAT_MRT4530_51333C.1
atgggtaagcatggggatccccgaaccctccccaacggcaggtgtttgaggtctttggatgactggaggttgaagaaagcgcagaagcgcgcggcgcggcggcgggcggcggcagcaggcagcaggcgaagcgcgcggcgctgcgagcgcgagcagccgcaggccagtggcggcggaggctgcaggccggcgccggcgacgccacggcagcatgtgaaggaccaggcgagcagcaggcagccccttagcccgacggctgcaaaatacaagaaagtggagccaggaaacatcatcgtccgccaaagaggaacccgcttccatcctgggaactacgttggcatggggaaggaccatactctcttctgtctgaaagaaggacatgtgcgattcgagcgcaacaagctgactggcaggaaatgggttcatgttgatcctgttgctgggcatgtgctccaccctgtctacaccagtgattcgacccctgcagctgaaatggagccattgtaa

SEQ ID NO: 48683 - DNA, 459 bp, Oryza sativa
  Clone ID: PAT_MRT4530_51334C.1
atggctggtttgtccaccggtgaaaatcctcgtgtgaagagccagggcgttatcggaatcttcctaactctaactctagagctcaacgaggcggaggagccgtggtggatccttgcctcccacgactacgagcacgagcccttcttcggggagccggtggggggaggcgcgctggtggggggaggaggcggcactggaggtggggcggcggcggcgctggtggggggaggcggtggcgctggtgggggccggcgaggagtggaggaggcggcggcgaggagtgaaggaggtggcggcgaaaatgctacgcgcctgcgcgcgcgcttcctgacggtggtgaggtcgctgtccccgaaggtgatggtgctgacggacaggagaggcaaaccacaagaacggtgcgttacagaagcagttcgcgacgaggtgctcaacactatggatggccatatggactaa

SEQ ID NO: 48684 - DNA, 485 bp, Oryza sativa
  unsure (1)..(485): unsure at all n locations
  Clone ID: PAT_MRT4530_51335C.1
ggaaccatggataccaacatttacgttaaaaaaaaatggatggagtgaaaaattcattattcttagagccacatcagcntattatcggggcgactcggattgatacccttttcgtcatgaaaaagacaggaaatatcaccctgtcttaagctagctgctgattgccctgataaaacagtaacggtgaggaccttgttgcccgacaaagtgcatccatctggatccttaactttgaggttaagtgggtgcttgacgattgtgttaactgggctaaccatttccttcggcgagctaaacccttccgtgcgagagtgcaacctgcgaacatgcttggacattttccacaacagatgcttggatggcctaagaacagaaccctgttctccaggggccaattttaacaaggtccttgctgcaagggcatatggatttcgggcctttcattatacccttgagtatggagagggaaccaccactgtgatgaa

SEQ ID NO: 48685 - DNA, 2007 bp, Oryza sativa
  Clone ID: PAT_MRT4530_51336C.1
atgtcgtcctcgcctctaaccgccacgccttcccctctccttcccgccaaatccaagaacccaccaccccaccaccaccaccacaacccgctcctcgcctacctcccgcactgcacgagcctccgcgcgctcgcgcagctccacgccgtcgccgtcaaggccggcggcggcctccaggcgcacccggccttcgtcacgaggctcctcacgctctgcacggagcagggggcggaggcgcccgcgcacctcgcgtacgcgcgccaggtgttcgacagaatcccccacccgggcgacgtcgtctggtacaacacgctgctgcgcgggtacgcgcgcgggggtgggggcgggggcggcgcggaggaggccgcgcgggtgttcgtccggatgatggaggagggggtggcgcccgacacgtacacgttcgtgtcgctgctcaaggcgtgcgcgtccgcgcgggccggcgaggaagggcggcaggcgcacggcgtggcggtcaaggccggcgccgcggagcacgagtacgtcgcgcccacgctgatcaacatgtacgccgagtgcggggacgtgcgcgccgcgcgcgtgatgttcgacaggatggacggggagtgcgtcgtctcgtacaatgccatgatcaccgcgtccgtcaggagcagcctgcccggcgaggcgctggtgctgttccgggagatgcaggccaaggggctcaagccgacgtccgtgacgttgattagtgtgctctcggcgtgcgcattgctcggagctctggaacttgggaggtggatccacgactatatcaggaagatgaggcttgattcacttgtgaaggtcaacactgcgctgatcgacatgtatgcgaagtgtgggagcttggaggatgccattggcgtgttccaggatatggaatcaagggataaacaagcttggtctgtgatgatggtggcatatgctaaccatggctatggcagagaggccatttcaatgttcgaagagatgaagaaacaaggtatgaaacctgatgatgttacattccttggggtgctctatgcctgcagccactctggtatggtgagcgaagggctccaatactttgacagcatgagggaatatggcattgtttcagggatcaagcactatggttgtgtgactgatttgctggctcgatcaggtcagctagaaagggcttacaagttcattgatgaactgccaataaaaccaactgccatcttatggaggacgctgctttctgcttgtgcgggtcatggagatgtcgatatgggaaaacgtgtctttgagaggattctggagctggatgattctcatggtggtgactatgtaatattctcaaatttgtgtgccaatactgggagatgggaagagatgaacatggtaaggaagcttatgagtgaaaagggggtggtgaaggtgccagggtgtagctcaattgagatagataacatggttcatgagttcttcgcaggagatggaagtcacccacactcacaggaggcacgcagaatggttgatgaagttattgagcagctaaaacttgtcggttatgtccctaatacttcacatgtgtttcatgttgaaatgggtgaggaggagaaagcaacaagcctaagataccatagtgagaagctggcaatctcttttgggcttctaaatacagcaccgggaactacccttcgtattgttaagaatcttcgtgtgtgtccagattgccattcgatggcaaagcttgtttctatggtctttaacaggcgaatcatactcagagacctaaatcgtttccaccactttgaagatggggtctgctcttgtggtgactactggtagagtttaggaacataactgctgtaccaaaataccttatccttccagtaacacaaaggctttatccattcaggtatgattaacttgtacacccatgagaaacttactgatgattgaagattcattttctgaagattgatgataccgagacaataaaaaaaaaaaaaaaaaaaa

SEQ ID NO: 48686 - DNA, 564 bp, Oryza sativa
  Clone ID: PAT_MRT4530_51337C.1
atggcacactgcttccactacgtgcttgcatccaagaacctaaacatcacaaagcgctggcacgcagggcggggtgtggcggtggactgggcttccatacctgaatacctgcactgtgtgaagcgaggaatcgcgcgcggtggactccgcggtggtggaggaggaggactgcgagctgttggctccggcggaaggaggggcgcggcggccttcgtcggcgccggcgaagagcctccaggtgccatggcccacggggtcacggggaggtccagcggtggcggccggcgacgcaacagcctcccgccccgacgagctccacctactcccccccgatcggcgttgctgttgggatggaagttgcgcatggcggccttgtacgccgaagtcagccttccacttgaggagcacgccgtcctcgatgccgagctcgccggtgggcagctcgatgtggaggcggtgcaaacctcagacggcgagtggtgtgagacgtccacggcggcaggagtggatggcgtcgaagtcggcgccgtccatgctcaccagcctcatcgccgggatccctag

SEQ ID NO: 48687 - DNA, 217 bp, Oryza sativa
  unsure (1)..(217): unsure at all n locations
  Clone ID: PAT_MRT4530_51338C.1
aagcgagacgattatagagcaagcatttcctaggagtatataagttaataaactggttgatgtaagcggcaacatttttttnccagcttgattagaggcgataggataatgagctgcctgagatggctcattcttatattcttatattcacaattcatggcccgtagcaagtcgtgaagtctggtccatagtgggccgngacgattccagtgtattc

SEQ ID NO: 48688 - DNA, 837 bp, Oryza sativa
  Clone ID: PAT_MRT4530_51339C.1
atggccgccggcgcgccggtgccacccgacctcctcctccacctccgccaccgcgccgccgccgccgccgccgccgacgtcgacaccgtcccctccctcgccttccctccccatcacctggggtgggggtgctatggcgcggcggcggcgcagtacgggaggagggtggaggacccggagccggggcggtgccggcgtacggacggcaagaagtggcggtgctcgagggaggcgtacggcgagtccaagtactgcgagaagcacatgcaccgcggcaagaaccgttcaagaaagcctgtggaaatgccgccccccgccgccgccgccgtctaccgcccgtccgcgctctccatctcgccgccgccgcacgacgccgacgcgcccagctacggcgccggcgccggcgctcctctccagctccacctcgactccttccacgcctcgacgtcgccgccgccgtcctaccacaggtacgcgcacaccagcagcgcgccgctcttcccgtcgtccgccgccggctacggcggcggctggtcgttgtccaaggagcactgcctcaccctcggcggcgccgccgccgacctgagcctcgacaagccggcggatcaccaccacgacgccacgtcggcgacgacggagaagcccctgcggcgattcttcgacgagtggccgcgcagcgacgacgggaggacgccgtgggacggcacgcagctctccatctccatccccaccgccgccgccgcgtcccccgacctcgccatcgccggcgccgcctcgcgctaccacagcaacgctctagtctacatcaggttgatgctaacgccgtacttctgctag

SEQ ID NO: 48689 - DNA, 279 bp, Oryza sativa
  unsure (1)..(279): unsure at all n locations
  Clone ID: PAT_MRT4530_5133C.1
cagtaaggtaacatctacaacanggtgatgaattctgtgctactaccatnnttcanggctgcacatgcacatattgatctcgctttttcaaagaaactgacttgtaaataaacaagataattttgctttcttttntaaggtttgctcccaatgataggattcagagggagtncaaatttgaagtgttctcagcaggtcaccacgcctggtcactgtcagcaatctaacacatactgtcaacggaatagcggtgcagccgacaggtcacacatctccagg

SEQ ID NO: 48690 - DNA, 589 bp, Oryza sativa
  Clone ID: PAT_MRT4530_51340C.1
tcatcgcggcttcgggttgtacaacctcccgcccacgactcggcgtcctccgcggccttcaacccaaagtacatcctcgactacttccgccgcaacggacgccacggctgggtctccctcggcggcgtcctcctctgcttcaccggcaccgaggcactcttcgccgacctcggctgcttcagcatccgctccatccagctcagcttcgccttcggcctcgtcccggccgtgctgctggcctacgccgggcaggccgcctacctgcgcgtgtacccggaccacgtcggcgacgccttctacgcgtcgacgccgcaggtgctgttctggccaaccctggtgctggcgctggcggcgtccgtggtgggcagccaggccatgatctcctgcgccttcgccaccatctcccactcgcaggccatggggtgcttcccgcgcgtgaaggtggtgcacacgtccaggcagtaccaggggcaggtgtacatcccggagatcaacctcctgctgggcgcgccgctctagaggatccaagcttacgtacgcgtgcatgcgacgtcatagctcttctatagtgtcacctaatcatctgctt

SEQ ID NO: 48691 - DNA, 327 bp, Oryza sativa
  unsure (1)..(327): unsure at all n locations
  Clone ID: PAT_MRT4530_51341C.1
cccacacgagatgtgcatgaatggctgtgtcctcgtgagggaggggatagacactggtgttcttctgttcttcgttgncagncttgtctggaaacttggtatgatagcttttggtggagtggtggtggacagctcctgggatgtctgctgcctgctagctggccacctttctgcctgtgaatgtgctggtgacttgcatgtggctgtgccccatgtgccccgtgtgcaaagggtggaaattagcgtttgattggactgagcattggcgtgacactggctgaatacaggaaaaaaaagttatgatcccaaaaaaaaaaaaaaaaaaaa

SEQ ID NO: 48692 - DNA, 998 bp, Oryza sativa
  Clone ID: PAT_MRT4530_51342C.1
ctcccgagcccatccgtgcggagcagcagccgccgccactccctccaccctccggctccgctgctctcaccctccacaagccattgtcgcttcactgtgcaccgatgctcccttcctctgtgagccgccgccgccagtgctccctccctcaccgaagcaccaccgtctccccactaagtcccgccaccgctgcgtgcgtgcctcggtgccactagatccgtagccgagcctccgccggatccaccctaacactgttgcccctcctcctcctcatcgtcaagccatcgccactgctcctcttcgtcaagccaccactcctcgtcaagccaccgttgtccctcctcctcctcgtcgagctgccgccaccactcctcctcctcgtctagccatcatcgcccctcctcctccttgtcgagccgccgctgccgctcctccatctcatcaagccgctgccagccttcctcctcgtaaagccgccgccatctgtggaccccatatcctgtcctcctccttctccctctactcgctcagatcgatgcattccagtagccagcctcccacaccaccgccatccccaccaccacccttccctccaccggattcaggagggagggaggtctccgccgaccacctctgtgccgcctctgccatcgctccccttcctccggccggatctacaaggggaggtctctgccaccgccaccaccatccccgccgcttcctccaccgtcgtcaccgtcgccgcgtctgcgccaccactgtcgctccccctcatccagctagagagagggggaaccgcctctgcaccacctccacgtcgcaccaccgccaccctcccctcctccgagacggaggccaccgacgccgccaccgccgctacaaccgccacccatcccatcactattatccgcccgatccccccgccgccaccgccccaccacgccgccgcccgcctcgccgactggccggagggcgtcaacggcgccggtgagacctcc

SEQ ID NO: 48693 - DNA, 579 bp, Oryza sativa
  Clone ID: PAT_MRT4530_51343C.1
atgagggaggggagggccctccggccgctgttgttgcatgcggtggcccccaccaccacccttccctccaccggattcaggagggagggaggtctccgccgaccacctctgtgccgcctctgccatcgctccccttcctccggccggatctacaaggggaggtctctgccaccgccaccaccatccccgctccttgctctggctggatctaggatagggaggggaggggtgctgcctccgcaccgccaccgtcgctccgtgccgccgccgtcgctcgggaggggagtcgcctctacgtcgccaccattgcacgccgccaccgtcactccccttcgtccggccggatctaggagcggggaaggagggagtagccgccactgtcgcttcctccaccgtcgtcaccgtcgccgcgtctgcgccaccactgtcgctccccctcatccagctagagagagggggaaccgcctctgcaccacctccacgtcgcaccaccgccaccctcccctcctccgatcggatctggagggagggaggggagggggaaggacaacacgcatgagaatgggggagatcgggtga

SEQ ID NO: 48694 - DNA, 959 bp, Oryza sativa
  unsure (1)..(959): unsure at all n locations
  Clone ID: PAT_MRT4530_51344C.1
ctggctgaggcattgacctaccttggnccttggcagagagagagagagactccccctcactccttccccgacgacctgctcgatccgatccaatccgctcctctccagnccagatcggacggaagccagcaatggggcacccccacccccacccttacgcgccggcggagcttcacctcccgggcttcatgcctctccacccgccccaggcccaaatcctcgcgccctacctcccccacctccctctccctcccccccgcccgcccgcctcaccccccggcgcaccccccgcccccccccccaccccccccgccccccccccgcgccgccggcccccccccccccccccccccccccccncnccccgcgcccccncccccccccgcccccccacacccccccccccacccccccacccccccccacccccgcacgcccggccncgagccgccgnncccgccacccccgcgcccccccacaacccggcccncccgaccccccncgccccnccgcccaccccccgaccggnacccccccccgccccccccccgcagccccccccccccccccccccccccccccccccccccccccncnnccacccnncncccnccngcacccccaccacaccccccccccccgccccccccccncnnccnncncacncccnncnnnacccnnnnccccnnnnccccnccccccccccnccccaccccccccccccccccccccgccncccccccccccccacacccccccccccccccccccccccccccccccccccnccccnncnccnnnnccnccnnnccaccnccccccccccccacccccccccccccccccccnccccccccccccnnnncccnncncnnccccccncccnnnncncnnnnccncccccccccnnnccccccccccccccccccccccccccccccccccccnnnccccccccc

SEQ ID NO: 48695 - DNA, 390 bp, Oryza sativa
  Clone ID: PAT_MRT4530_51345C.1
atgcagaggggcaggcggcggaaagtggcgcgcgggggtggcagacgacggtggcgcgcggtgggcggcggcgcgtgggccggcactcaagcggacagcggccagcgggagtggacgtgggaggcgtccttctcctctaccccctcgccgtcccccttcgccatcgccgccgcggcctccgccccctcgcctcacggccgccacccatccctccacgtgctcggggccacgctcggtgcagcgtgtggacgggaggtgggcgccggcgcgcgggaatgcacggtgggcaacgagcagcaactcgacggtggcttggctgtgcccgagcaggcggcggcatgagacggttagcgccatcgcttgcctgagagcgtcgtcgtctttgagctt

SEQ ID NO: 48696 - DNA, 484 bp, Oryza sativa
  Clone ID: PAT_MRT4530_51346C.1
tttggggcaagggggggggagtagcaccttgctctgctttgcctgcagcgtgaccggaagcaatggcgtctgctactctactgacgaaatctatcgttcccaggatgtctgaatgggttgccagccgccaggctgccgcgcctaagccggagactgtctgcatggctgcccgcactggtgcctacgacgatgagcttgtcaagaccgatagaaccattgggtcaccaggaaggggtatctcgtgccatgcgatgagatctaacgcgacctgccctaagaggccagagtcaattgccctcgacaacaccgaggccaacctccaggcttaccggaccgtacttgtcaccgcaccttgcttgatacagtaggatctacggtgctatcctctgtgaggagactctgtaccagtcaactgtacatggcaagaagagtgtccacatcctcactgagcataaaagcgtccaggtatcaatgtcgacagggg

SEQ ID NO: 48697 - DNA, 910 bp, Oryza sativa
  Clone ID: PAT_MRT4530_51347C.1
actcggccacgccccgggcgctatcatccccgtcctctcgccgcttccgcctggcgcctccgccgctgccgcgagtcccgctgctcccggctgtttccgtccatgttggaaggggaatcactccccaagattccctctctcattccccccacttacccctctctctccctcatcaacgcgatcagatttagtccggcaaatctcgctggcaccattgatggcggcaaaatttgccgccatcgtttccctctctcctcggctctctctctctctctcccccattgctacaaaaaccctcaccgcaacccctctctcgttttcgccaccttgtgcttcctctcatccatagaatcgagccaccgccgtctctctctctctctctctccgtcatcaccgccgagctccagccaagcctcgccgccgttcaggacacccctcgcctcggtgccaccaccactggcatcaccatcgccgccgacctcgtccaccccctccccgcgccagcgatcgctggaaccccgtccgcaccgttgacctgagtcgcgccatcgtcttcctcctctctggtcaccattttcgccacctgccgccgtttggggtgaaccacaaatgtaacatcccggcccagagctataaaagctgccagatgtaagtgggcctggcctgggacaaggtgtgtcaacaagttgcaacttcttttccggaagcccgtctcaaaagaactctgtgacgtggccaaccttatcgacctataaaagctgccagatgtaagtgggcctggcctgggacaaggtgtgtcaacaagttgcaacttcttttccggaagcccgtctccaaagaactctgtgacgtggccaaccttcgggcgcaccgtgtggccgccgcgtgaggcctgcccgtcagccaccat

SEQ ID NO: 48698 - DNA, 366 bp, Oryza sativa
  unsure (1)..(366): unsure at all n locations
  Clone ID: PAT_MRT4530_51348C.1
ttccgacccacgcgccacgaaaaagccctactgacacttctagcgattgtctgattgatcatcaatggctagcaaggtcggcttgggggcggggggtctgatggtgtnctttctacccatacttattccgacacttagcagagtacctgacaagcaggtttggatatgaaaggatgtcggggatgaatactggtgctgatggagtgagaacagctatcaaatcggcgaggaaatggggtcatcaaaaaaaaacgataccagaaagcgacgcttttattgtcttgtggtgtggatgatgacatggacaaacattaggtgtcatatagttgagttgtgggatggtgcaactagtgcctcccgcccatt

SEQ ID NO: 48699 - DNA, 224 bp, Oryza sativa
  Clone ID: PAT_MRT4530_51349C.1
aaatgttcgtgttttttttttttttttttttaaatacaagttttttttggtttacgcgtgtttgcgttatagtttcattgtacaggccatttgaatcattactgggcaaattctggtttaaaggcatataaaccttttctattcatgcaaggcagaaatttttgactcattttctacacctttttacacattttattcgccgtaaaaatggttactattggatg

SEQ ID NO: 48700 - DNA, 1424 bp, Oryza sativa
  Clone ID: PAT_MRT4530_5134C.1
ggatcacattctgcctctgattttgtagccatccagagttccccatgaagcaaggctgacatgcttctttaatccagtgctgcattttataagcagctttgttgccaattcacttgcataacctgcacatataaagagggactgcaggctaggcgtgctagaagcagactctcaagctgtgagggagtcgtaactgaattttgatcagttcattcagttgcatgtccttgcatgccatggcctgtctcaagctcagacatgtgtgcctcactgtggtgctcttctccattggtatctccagctgtagagggcaaggaggagggggagcaggtggtggtggtgcagtagttccagggacacaggatgcaatccagattgtggcacaagctgctctctgctttgacaatagacaagtgatcaacgggtgcctgcaatcgatgggcatcaacgtcaccaccacaaccggtggcagcggcgccaccacgtcggctccggcggcggcgaacgggtcggcggcggcgaccatgtgcagcgcgccgtgcttcgggcagatgaccatgatgatggggtgcgtgaacggcatcttcggcaacttcgccggctacagcccgggcctcatgcagggagtccaggccgtcttccagatggcctgcggcaacgtcaatggccagggcggcgccggcgccgccgccggtggcggtggcggtggcagtgcaggagcctccggcggtagtggtggtggtggcggcggcgccggcggtgctactggtggtggcgctggatcggggaatgcttctcctaattcagaggcatggccgtggaggacccgagccagccgcacgggctccggctgctcatcgaggaatacccgtacgccgccgatgggctgcctctggtcggcgatctcgcggtggagcgaggcgtacgtggcggcctactacccgagcgacaaggccgtgcaggcggactacgagctgcagtcatggtacgccgaggccgtgcagagcaggcacgcggacaagcgcgacgcgccgtggtggtcacgcctctccatgcccggcgctcgccgagggcgacctggagtacgcgcacctcgtcgccgacccgcaccgcttcttcctctcggcgctgcccagcctgacgcagaccacgacgacatgactgtcatcgacacgctgtccacgcactccgctgctccgccgccggattccccatcgacggccgcacctccttccttgccgtcggctgcgtgttggtgtagtccggctgtccagaccaccgcgcctccttcctgcctccgccacaactcccatcgcgagcggaacctcgccacgccggcagacgacgcagacgtcgcggcgcacggccaagccgttggcgccagcctcaccgaggaagtcctcccgatgctggaggaggtgtga

SEQ ID NO: 48701 - DNA, 391 bp, Oryza sativa
  Clone ID: PAT_MRT4530_51350C.1
ccacgcgtccggtgtgatagtgttcctaggctaagccggggtttggtatcagagcctggagatgaagatcggagatggctcgacctccgatgcctccgtggagcgcgtcgtgcccaattccagcgtcatggagctgctgctgctaaccagggccaactaccatcagtgggccttggttatgcgggtgagcttggaggcgctggagttgtgggacgcggtggaagcggtcaccaaggataggctggcgttggccaccatcttgcacgcggtaccaccgaagatgaaggtcgggctcgccgtgatgacgtcggcgaaggaagcgtgggactcggtgaagatgatgcgagccggcgacgaccgcgtgaagtctgcgagtgtgcctcgcttcctg

SEQ ID NO: 48702 - DNA, 168 bp, Oryza sativa
  Clone ID: PAT_MRT4530_51351C.1
ggtgtgacaggagccccggggagtgtttttataggcctcggggtgcggcatgaggcaggaaatggcagaaattgccggcgaagtgggggcggcgatgtcggggtggtggtggctgattttagggggacaagtgggaagggcaatggccgcgggatgggcgcgaggtag

SEQ ID NO: 48703 - DNA, 125 bp, Oryza sativa
  Clone ID: PAT_MRT4530_51352C.1
tggtaggcgacgtacccgtcgacagcgagacgcctacggtgacttcatcaatctctccaggatttgccggcccagtcttcgaagatgctcataggagtagggtttgcgtgcgtgcgttcataggg

SEQ ID NO: 48704 - DNA, 678 bp, Oryza sativa
  Clone ID: PAT_MRT4530_51353C.1
atgccgacgacgaagaaggacaacaaggttggggacgccgtgaaggagaggaggcgctatgacggcggcgagaggggatcgaggttcagggcgcggcggcagaagcagaggtcggcgtggctccccgatgacatggacccgttgaagagcgacgccaacggagaaccagccgcagacgccgacggggacgccgaagctgtaggcagtggagcggaaggcatagaagccagccaaggagcccccgtccccgccgcagtcgcagcaaccaaagccgacagcgtggaggctgatcgacaaacaacggtgaggagcgggcatgtgcggaggggcgacgacggctgcaaatcgagcacgcagaggcaacgggtgggcgcacaagggcaacgcgcgggcgacggcgcgcatgagcaacggcgggagcgtccgatgttgcggtgcggcgtggatgggtgcatggcggccgctggtagcacagctgctgccaacagcccacctccagatctggtacacccctccctctccatcctcactcctccacagctacaccagccagtgagccaccgctacctctctaccctcactcctccacggaatttcggatggaggcgggagcttgttttagaggcggctattgcaatatcgcgtgaagagaaaggaacgatcctctctcctgtttag

SEQ ID NO: 48705 - DNA, 347 bp, Oryza sativa
  Clone ID: PAT_MRT4530_51354C.1
cactgacagtccccaaccaccggggcaccgcccagagaagtgagagagagaagggatagaagagaggaaagagaggtgttgacgtgcccacgctgacatgcgggaccccaacataggtcccacgctaactcaccgcacacgtaggtataaaaccggagtcaaaacaccacccgaaggacactcaagtgaacaggttttgttagttgaggggctcccaggtatctgttttgtgcttgagggacgattttggtaactcgatgacaagttgagggacacttcggtgtacttttccacctggaatggaaaggaaagctaagttaccaagtctaaaaaaaaaaaaaaaaaaa

SEQ ID NO: 48706 - DNA, 390 bp, Oryza sativa
  Clone ID: PAT_MRT4530_51355C.1
atgggatccacagggcaggtggtgacaggctgtgggcatgggccgggcgggcggcctttcggggcagcaccttactttactattgcgggtgctcttagtactattattttagtgaaggggatgccgggatggtcactcgtgatgcttgtcaaacctggcttcttccaggatgaaacgatgccgttgctggatgtgtggcagtgggacactatgaccaccgcaaagggacggacagcgcaacgggaatcaagtgacacggcgtgtaggagagaacagttggagcccttgttttttgacgagccctttcccacagagattgacggtggaagtacaatgcgtgtgctcgagaactttcgcatttcccagggtgcagctgccacgcctgactag

SEQ ID NO: 48707 - DNA, 483 bp, Oryza sativa
  Clone ID: PAT_MRT4530_51356C.1
atgacgccgatgactcctaccagatgttgtggcgctctcctcgaccgaattgcatttcctgctcaagctgttgttgcagttccgcatatggcgttgttgcagtactccgaccagcacttctgctaccaccagtggtgcccaaccaccattgcggagggcggcaaactgatgagggccaacgggaagacgatgttggtaaaggccgccgctttccacaccttgccattgctctgtgccaccactcgtcgtcgcgttgcgctgccgcttgatgtgaaaggcttgcagccacatcaggttgctatcgctacccagctccctcgagctcttccgacacgtcaccccactatcacctatcaccaccctatcctgatatcctcaacctcccgacgccctacaaccaccgagaaaacatggagagtgtgggggaagaaaaggaatgatagacaggaggatgaagtgtgggtcatgctttattttttttaa

SEQ ID NO: 48708 - DNA, 426 bp, Oryza sativa
  Clone ID: PAT_MRT4530_51357C.1
ggagcggtggtgaggagcgatgtggggagaggagcgcttgacgagggaatggtgaggaccgcagaaggcgagcagtttaagggtgggggaatggacagggacgcgtcaaaacgggggaataaagtcgacttgtccagcttcaattgcgtggagcgtggctgcaaacgatcctctggatttttgtccgacgttatccattcccgttttagcaggcaacgggtggcttttcactcgattcccgacctcgacaccttatcacctgacgtgtgggccatgcacgcacgccggtgtgctctcctgctttgcaccggccggcgagctgccaactccggcgagttttctgctcgctcgagcccgtctgagcaagcgatcgccggccatggcggcggcggcggcggcctcaacagctgcaaaagatcaacatga

SEQ ID NO: 48709 - DNA, 4500 bp, Oryza sativa
  Clone ID: PAT_MRT4530_51358C.1
atggctactcccgctaggttttcaactaagcctcatgttttcgatggaacggattttactcattggtgtagtaggatgcagtcttacattatggctaaagattatgatatttggagaaaagtttctcatgcttatgtgattcctgaagttattaatactgctgctgaaaaaactgcttttgaacaaaattgcaaagctcgcaacatttttttgagtgggatttctcgttctcattatgatcgtgttgcacatcttgaaactgctcatgagatttggaatgctttgaagaattttcatcaaggaacaaataacattaaagagcttcgtcgagatctttttaaaaaggagtacattaagtttgagatgaaacatggagaagctttagatgactatctttctaggtttaataaaattttgagtgatcttagatctgttgattcttcttatgatgttaattatccacaatctgagatttcttgtcactttttgaatggtctcgacatgtctatttgggagatgaaagttacatctattcaggagtctgttaacatgaacaggaaaagaggtggtccaaatcgttgctttgaatgtggttcaattgatcatcttcgttcgcattgtcctaagcttgggagaggcaaaagagaaggcaaagatggtgagaagaccaacaacaacaagcccaacaactacaagtcgaagggttctaaccaagggaggaagatggagaatcttaggaaggcttttcaacaagtttgcgccgctttcgagccactaagtgatgtagatggtgaaagtggagatgatgacaagggaaagaacgtctccgatgtttgcttcatggcgcgtggtgaatctgacacagagtatgaagacaatgaggtgagtgcttttgaggaagctattaatattttgagtgcaaaaaataaaaagtgtgagaagatgtataaaaaacaggagtttatcattaaatctcttaaatctgaaattgatagattaaaatctcttattcctaatgatgatgattgtgaaaattgtgaggttttaatgaatgagatttcaaaaattagagatgttaatgctgcacatgatttgaaaaatagaccttctcttgcttgtagttttgctctgcacacacgcactttggatgagttgtttttaactaaaaagttgttgcaaaaatatcaaattgctttttatgctagtttgatgtttaacatgatttctgctaaaaagttaaaacaacatcatgatgttttggattgctcaacatgtaatttgaataacatgaaactaaaagatgctttaggtcatgttgagtacatggaagatgttgtgaaaaacaatgaagtgctttcttgccccaaatgtcggaaaagcaaaggtgtaatggtagattgtgaaaattgtgttaatttggaaaaagaggtttcttatttgaaaaattctttgctaagattttctgatggtgttggtgctagaagtggtgagattttgattaaacctgatacaaataaaactgtgtttaaatctgctggtatcatgtctactatgagtgcatcttcttcaaaatccaatgttgtgcatgcaaaacctcctgtttctgcttgtgttgctaaatcttctagctctaacaatgtgtctaaacaacgtgaaaaatatacttgttctttttgtggaaaagatggacatattgttgatttttgtttcagattagctcataaacagaaaaaggagagagagattgcttttgcaaaatcaaagtggcaaaaatctggttttccctcgaagaaaccggtcagaccgcagtgggtcccgcggtcagactggcgaccggtcagaccggctgaacagcctcgatcagaccgggcaccggtcagaccggcggtacagaggcggtcagaccggcccccggctttggtggcaaggaaggagaacgtgtggattgtggattccggttgttcgtggcacatgaccggtgataaagattggttctcctccctcaaaaaggcatccaagactgaatcaattgtctttgctgatgcttctactagtgtcgttgtcgctacaggtatggttaaggatgaagcttttcaacactttcgtggtttgtttcttcgattggagcttgaatttcctggtttgagaagaattcgaagtgataatggtggagagtttaaaaatgcttcatttgaacaattttgcaacgaaagaggtcttgaacatgaattttcttctccttgtgttcctcaacaaaacggtgttgttgaaaggaaaaatcgtgttttggttgagatggctagaacaatgttggatgaatacaaaactcctagaaaattttgggctgaggctattaacattgcttgttatatttcaaatcgagttttcttgcgatctaaacttggaaaaacttcttatgaacttcgatttggtcatcaacccaaagtttcacatttgcgtgttttcggttgcaagtgctttgtcttgaaatctggaaatttggataagtttgaggcacgccctaccgatggattgtttcttggttaccccgcacacactcgtggctatcgtgtacttattttagggactaacaagattgttgagacttgcgaagtttcttttgatgacgctagtccaggtactagacccgatatttcaggtacactgtcacaggttcagggggaggatggtcgtatttttgaagacgagagcgactacgacgacaacgatgaggttggctcggccggtcagaccgggcgccaggccagtcagaccgccggcacacctccggtcagaccggctcatgaggagcggtcagaccggccaggttcgtcgggttcgggtactgttgatgctgatcaagatggtcctccagagaattcaacttcgaacagtactgatacagaacgtggatcaacttcagaagtcgctgctcctttgcacattcaacgacgacatccgccggaacaaattattggtaatataggtgagcggactacaaggtcaaaggtaacggctcatgatgtttgtgcaaattctgcatttgttgcttcttttgaacccaaagatgtgtcacatgcattaactgatgaatcgtgtattaacgccatgcatgaagaacttgaaaattttgagagaaataaagtttggactttagttgaaccaccttctggacataatgtcattggaaccaagtgggttttcaaaaataaacaaaatgaggatggtttgattgtgagaaataaagctagacttgttgctaaaggttttactcaagttgagggtttggattttgatgaaacttttgctcctgtttctagaattgaggcaattagacttttgttggcttttgctgcttcaaaaggttttaaattgtatcaaatggatgtgaaaagtgcttttctaaatggttttatacaggaggaagtttatgtcaaacaaccaccaggttttgaaaatcctgattttcccaaccatgtttttaaattgtctaaagctttgtatggtttaaaacaagctcctagggcatggtatgatagacttaagaactttttgcttgcgaaaggttttacaatgggtaatgttgataaaatgctttttgttcttaagcatggtgataatcaacttttcgttcagatatatgtggatgatatcatctttggttgttcgactcacgctttggttgtagattttgctgagactatgcgcagggaatttgagatgagcatgatgggtgagttatcgtactttttgggattgcaaattaagcaaacacctcaaggtacttttgtgcatcaaacgaagtatacgaaggatcttttgagacggttcaagatggagaattgcaagtcaatttcaataccaattggttctacagctgtgctggatcctgatgaagatggtgaagctgttgatcaaaaggaatatagaagtatgattggatctttattgtatctaactgcttctaggccagacatacaatttgttgtgtgtttgtgtgcacgctttcaagcttctcctcgtgcttcacatcgtcaagcggtcaagcgaataatgaggtatttgaatcatacacttgagtttggaatttggtattctacttcatcttctatatgcttaagtggatattccgatgctgattttggaggttgtagaattgataggaaaagtactagtggaacatgtcattttcttggtacatcattgattgcatggtcttctaggaaacaatctagtgttgctcaatcaactgctgaatctgaatatgttgctgctgctagttgttgttcacagattctttggcttttatcaactttgaaagattatggtcttacttttgagaaagtacctctattttgtgataatactagtgctatcaatattgctaagaatcctgttcaacactcacgcacaaaacacattgatattcgttttcactttttgaggaatcatgttgagaaaggagatattgagttgcagtttttggacacaaagttgtaa

SEQ ID NO: 48710 - DNA, 2328 bp, Oryza sativa
  Clone ID: PAT_MRT4530_51359C.1
atggcgagcaggctcaaggaggacgagaggaacgagcggatcatacgcgggctgctcaagctgcccgccaacaagaggtgcatcaactgcaacaatttgacgacaaatgttgctactttctgccagatatacatcacgcgttacgacttaggactagaacaatggccaagagggaccacaatatgtctgtacaaatttctggaccttcatttgtaccaattgcagtggagcacagatgataaggatgagtatagtgaaaacaggagatctgatggaaattggggtggttcaagaagtccgccatacaatgaaagctattctgatcgtcgcagttatagtggaaggagcgatgacagaaattccagatattcctatggagaacgaagtcctggctatgaacataatgattataagaaaagcccccgctactttgaagttgatgatagaaatcgtgaggatagatctggaaaaacaactccagttcaacggtttgaggaccgcaggccttctgaaccacagaggccagataatgggtctccaaattaccagaaggaaaccgatggatctagccctgttgtacggccagtgagggatatactgggtgataatgcacctcaactacgggttggtgagcctcctaagccaaatgtagcgagaacgattgatcctccgagaccaatcgatcctccaagaccgattgatcctccaagaccgattgatcctccaaggccaattgatcctccaagaccaaatggaaccagaaccatcgaacctccaccacagatgcagaggacatcaactgccagcagtattggttcttcagaggggacctccgaacagataaaagtggcaagtacgataagtttaattgatttcagtgctgatcctgagccttctgcatctgtgccacctccacaatctacacctacatcacaacagcagcctgctagtgcacagccagtgcaacctgttaatgcaccagcacaacagcctgctgtggaacaagggaaaaatgtgtcatcagtgagcagtggtggtggtgactgggcatcgtttgattctttcggccagcaacaaacaccacaaactggcaatagtgtagatccccttgagtctgcacttgctcaactatcattttctgaaacaccctctgcacccaattcatcagcttttccagcttcggtcatgcccacttcagttccaaatgatggagggtcatccatgatggggcagtcacattcttcattttttggtgcaccccctggagtctcaggtcaccaggcctcaacaggaatgtctatccatggatcttcagttcaacaaactggtctagctgctccggcagctggacttccgttccaggtctctgcgaattcccgagcaactagtggcattcaagaagcagcacctaatactgacagtagatccattggccggaaagaacttccagcggatatctttacttcgttatatccaccaggacctcaaacaatagggggttggcagagaacaccccaatttggaatgggatatgccatgccatatcagactgcaatgggaatgcaagcatatcctcagatggcatttgctcaacctgcatatcaacaacctgtatatccgcaacagcaacatgcatacccccaacctgcgaaagcatcaaatccttttgatcttgggaatgagccagctccagttcaagctcacacgcagcagcccctacctggaccactgggagcatctgctggcatgactcccccaggtttacttggtacctcgagttttggagtccttccacagcaacctcagcagctgtaccagtcacctgcacctccaaatcattacatgatgcagcaagttccaaacatgtctgagcagttacctaataccatgcttccaatgcaacaaggaggtttgggttccctcaacatgggctttgatcaacaagctgctcccagttggttgtacaactcgtttccacaaggacaatggtcgagcgtaactgcgtctgagcataagctccacccttcggagttcttgatgcgcattccaatagtgtttgtatatttgtgtttgatgcggttgcaacatgttgtttatttacccccagtgcagttggctattaaaatttatgtggatgattgcatcaaagaaacattctggatccagcaagcatacttttaccctatgtactcttgtgtaaaatatggatcctctttagctaatcaaattcaacctcaacgagaagggaacatccccctgagaatccacaatggaaaaacacttcacctttacaagctgaatcagtgtatcaggttgctgtcccgctga

SEQ ID NO: 48711 - DNA, 2988 bp, Oryza sativa
  Clone ID: PAT_MRT4530_5135C.1
aaggctaacgaaaaatgtccaataataatactagtaatattttattactactgctcctcttcttcttggggtccggtgctgagctcgatgacggcggcgagctccaaacacttctaaccatcaagagagattggggtagccctgctgcactcagctcatggaagtgagaaactccagttctttcagtcactgtaattgggcaggaattggttgtagtacagatggccaggttacgtccctctccttccagagcttccaaatagccaatccaatcccagcttctatttgtagccttaagaacctgaagtacttagacctctcttacaacaacctcaccggtgatttccccacagtgctctacaattgctcagctttgcaattccttgacctgtcaaacaatgaattgaccggaagccttcctagcaacatcgacaagttgtccttggggatgcagcacctcaacttgtcaagcaattattttattggtgatgttccctcggctattgccaggttcttgaagctcaagtcactggtccttgacactaacagctttaatgggagctatccaggtgcttccattggaggccttgtggagcttgagatactgacgttggcatccaacccgttcatgccgggtccaattccgaatgagtttagcaagcttacaaagctgacatatctgtggttatcctggatgaatctgactggtgacatccctgatgctctgtcagcattgaaggagctcatactattggatttgtcaaagaataagatgcaaggaaagatcccgaagtggatatggaagcttcagaagctcgagatgttgtacctctttgcaagcaatttcagtggcgagattggtccttacatctcaacactcaatatgcaggagcttgatctatccatgaacaagctcaccggatcaataccagaggacattgcaaacttgaagaacttgagactgctatacttgtactacaacaacctcactggatccattccaaaaggtgtcagtatgcttccaaaccttaccgacattcggctcttcaataataagctctccgggcccttaccccctgagcttgggaaatattcagaattgggaaattttgaggtgtccaacaacaacctgtctggtgagttgcctgatacgctctgcttcaacaaaaagctctacgaccttgtggtgttcaacaatagcttctccggcgtgttcccaatgaaccttggggactgcgacaccatcaacaacatcatggcatacaacaaccactttgtcggggacttccctgagaatatatggtcattcgcaaagctcatcaacatcatgatttacaacaacaacttcaccggcaatctaccgagtgagatatcattcaacatcactagaattgagatagggaacaatatgttctccggtgccctcccatccgccgccatcgccctgaagaacttcatggcggagaacaaccagttctctggagcactaccagatgacatgtcaaggttcgctaatctcaccgagctggaccttgctgggaataggttgtccggcttgattccaccatctatgcaatctttgacaaagctgacctccctcaaccttagcagcaaccagatttccggagagatccctgcagtacttgggttaatggatctaaacattcttgacctttcgaacaacaagctcactggtcacatacctcaggaattcaatgatctacatgtcaactttctcaacctctcatccaaccagctctccggtgaggtcccagcagcattgcaaacgctagcatacgaggacagcttcttggataaccctagtctctgttgtcaatcagaatccggcatgcacatcaggacatgtccctggagtcaaagcatgagccatgatcaccttgcactgagcataagagccatattggtcattcttccttgcattactcttgctagtgtcgccatcaccggatggcttctcctcctcaggcgcaagaaaggtccacaagatgtcacgtcgtggaagatgacacaattcagaacgatagatttcaccgagcatgacatcgtcagcaatatcagcgagtgcaatgtgattggtaggggtggctcagggaaagtgtaccgtatccaccttggcggcgacatcaaggcgggacgacatggcggtggctgtaccccaaggacggtggccgtgaagaggatcggcaacaccagcaagctggacacgaacctcgacaaggagtttgagtcggaggtgaggacgttgggtgacctccggcatagcaacatcgtcgacctgctctgctgcatctctagccaggagacgaagctgctcgtctacgagcacatggagaacgggagcctggatcaatggctgcaacgctacaagcgagccggcaaaagcgggccgttggactggccgacaagggtggccatcgccattgatgttgctagaggcctcagctacatgcatgaggattttgtgcagccggtcatccaccgcgatgtcaagtgtagcaacattcttctcgaccgcgagttcagggccaagatcgctgattttgggcttgctcgtatccttgccaagtctggtgagtcggaatcggcctccgccgtctgtggcacctttggctacattgctccagagtacgcatacaggtcaaaggtaagcgttaaggtggacgtatacagcttcggtgtggtgctgctagagctggccaccggccgagggccgcaagatggtggcacggagtctggcagctgcttggccaaatgggcatcgaagcggtacaacaatggtggcccggtcgccgacttggtcgacggcgagattcaggatccttcctacctggatgacatggtggccgtgttcgagctcggcgtggtttgcaccagtgaggagccggcgtcgaggcctccgatgagtgatgttctccaccggctcatgcagtgtagcctctctagtcatattcaaaccaagcctctcta

SEQ ID NO: 48712 - DNA, 4429 bp, Oryza sativa
  Clone ID: PAT_MRT4530_51360C.1
ttattgtgtgcgtatggaatgcggggtcgaatttgaaagaagtccaaatttggtacgttgggttatgtaaagtttctttcttcgatttgtgtttcaccgagtttcggcggtccaaccggcgacatactggctgtcagaccggcggcatacgggcggtcagactggcggcatctactcggtcagaccggcagatcaatctcggtcagaccgatctccatcgatttcaagggtaacttttatttccgctaaaagttttttgtttttgggtataccaacctttcaccccccctctggttggcttaattcttgaggaaagtttctcatccttatgtgattcctgaagcaattaatattgatgctttaaaaactgaatttgaaaataattgcaaagctcgtaatattcttttgagtgggatttctcgtgctgattatgatcgtgttgtacatcttgaaactgctcatgagatttggaattctttgaagaattttcatcaaggaacaaataacataaaagagcatcgtcgagatctttttaaaaatgaatacattaaatttgagatgaaacctggaaaagctttggatgactatctttctaggtttaataaaattttgagtgatcttagatctgctgattcttcttatgatgctaattatccacaatctgagatttctcgtcactttttgaatggtctcgacatgtctatttgggagatgaaagttacatctattcaggagtttgttaacatgtctacgttgactttggattcactttatactaaattgaaaacacatgagatgaatattctttctcgcaaagttgattctaaatcgagtgccttggtttcttcttcttcttctttggatgttgatgcttcttcatctaagtcgttttttcttgctgtttttaatgccacatccgatgatcaactcgaacaaatcgaggaggacgatttagctttggttgctaacagaattgctcgagctatgaataatgccaggaacaggaaaagaggtggtccaaatcgttgctttgaatgtggttcaattgatcatcttcgttcgcattgtcctaagcttgggagaggcaaaagagaagataaagatggtgagaagaccaacaaacaacaagcccaacaacaacaagtcgaagggttctatccaagggaggaagacggagaatcttaggaaggcttttcaacaagtttgcgccgccttcgagccactaagtgatgtagatggtgaaagtggagatgatgacaagggaaagaacgtctccgatatttgcttcatggcgcgtggtgaatctgacacagagtatgaagataatgaggtgagtgcttttgaggaagctattaatattctgagtgcaaaaaataaaaagtgtgagaagatgtataaaaaacaagaatttatcattgaatctcttaaatctgaaattgataggttaaaatcttttattcctaatgatgatgattgtgaaaattgtgaggttttaatgaatgagatttcaaaaattagagatgttaatgttgcacatgatttgaaaaataaatcttctcttgcttgtagttttgctttgcacacacgcactttggatgagttgtttttaaccaaaaagttgttgcaaaaatatcaaattgcttttcatgctagtttgatgtttagcatgatttctgctaaaaagttaaaacaacctcatgatgttttggattgctcaacgtgtaatttgaataagatgaaactaaaagatgctttaggtcgtgttgagtacatggaagatgttgtgaaaaacaatgaagtgctttcttgccctaaatgtcgtaaaagcaaaggtgtcatggtttcttatttgaaaaattctttgctaagattttctgatggtaaaaagaacctcaacatgattttggatcaatcaaaggctttggtggcaaggaaggagaacgtgtggatcgtggattccggttgttcgcggcacatgaccggtgataaaaattggttctcctccctaaagaacgcatctaagactgaatcgattatctttggtgatgctgctacaagtgccgttctcgctacaggtttggttaaggtaaatgaaaaatttgaattgaagaatgtagctttggttgaggacttaaagtacaatttgctttcagtttcgcaaattgttgatgaaaattttgaggttcactttaagaaaactggaagtaaagtttttgattcttgtggtgattctgtgttgaatatttctcgctatggaagagtgtttaaagctgattttgaaaatcctgtttcacctgtgataacatgtttggttgctaagtttgataaagatgtgatgttttggcatcgtagacttggacatgttggttttgatcatctcactaggttaagtggtttggatcttgttcgtggtttgcctaaacttaagaaagatcttgatttggtttgtacaccgtgttgtcatgctaagatggtttctacttcacatgctcctattgtttctatgatgacggatgcaccgggacaactattacatatggacactgttggttcagctagagtgcaatctgttggaggaaagtggtatgtgttggttattgttgacgatttttctcgatattcttgggttttctttatggcaactaaggacgaagcttttcaatactttcgtggtttgtttcttcgattggagcttgaatttcctggttctttgaaaagaattagaagtgataatggtggtgagtttaaaaatgcttcatttgaacaattttgcaacgaaagaggtcttgaacatgaattttcttctcctcgtgttcctcaacaaaacggtgttgttgaaaggaaaaatcgtgttttggttgagatggctagaacgatgttggatgagtatgttatattttgggctgaagcaattaacactgcatgttatatttcaaatcgggttttcttgagatctaaacttggaaaaacttcttatgaacttcgatttggacatcaacccaaagtttcacatttgtgtgtttttggttgcaagtgctttgtcttgaaatctggaaatttggataagtttgaggcacgctctactgatggattgtttcttggttaccccgcacatactagtggctatcgtgtacttattttggggactaacaaaatcgtggagacttgtgaagtttcttttaatgaggctagttcaggtactagacccgaaattgcaggtacactgtcacaggttcagggggaggatggtcgtatttttgaagacgagagcgactacgacgacgacgacgaggtcggctcggccggtcagaccgggcgccaggccggtcagaccgccggcacacctccggtcagaccggcccatgaggagcggtcagaccggccagggtcgtcgggttcgggtactgttgatgctgatcgtgatggtcctccggaaattactacttcgaccagtactgatacagaacgtggatcaacttcagaagtcgctgctcctttgcacattcaacgacgacatccgccggaacaaattattggtaatataggtgagcggactacaaggtctaaggaggaagtttatatcaaacaaccaccaggttttgaaaatcctgattttcccaaccatgtttttaaattgtctaaggctttgtatggtttgaaacaagctcctagggcatggtatgataggcttaagaactttttgcttgcgaaaggttttacaatgggaaaggttgacaaaacgctttttgttcttaagtatggtgataatcaacttttcgttcagatttatgtggatgatattatctttggttgttcaactcacgctttggttgtagattttgctgagactatgcgcagggaatttgagatgagcatgatgggtgagttatcgtactttttgggattgcaaattaagcaaacacctcaaggtacttttgtgcatcaaacgaagtatacgaaggatcttttgagacggttcaagatggagaattgcaaaccaatttcaacaccaattggttctacagctgtgttgggtcctgatgaagatggtgaagctgttgatcaaaaagagtatagaagtatgattggatctttgttgtatctaactgcttctaggccagacatacaatttgctgtgtgtttgtgtgcacgctttcaagcttctcctcgtgcttcacatcgtcaagcggtcaagcgaataatgagtgctatcaatattgctaagaatcctgttcaatactcacgcacaaagcatattgatattcgttttcactttttgagggatcatgttgagaagggagatgttgaattgcagtttttggacacaaagttacaacttgctgatatttttactaaacctttggattctaatcgctttgcttttcttcgtggtgaattgggcataattcatccttttggcatggtttga

SEQ ID NO: 48713 - DNA, 1911 bp, Oryza sativa
  Clone ID: PAT_MRT4530_51361C.1
ggagagagagaactagtctcgagttttttttttttttttttttttttttttttgtttttttttttggtgaaaacaacttagaagtttcgttttgtcctgagtatcatacaacattccaaaaatggaccttacacaattatacatatcaaccataatccggtattaccatccacataaattttaatagccaactgcactgggggtaaataaacaacctgggccaataagaatacatgatttgcacatggtccatggagaatccgaaaagaaagtcaaaaaaccattcgaggccccgaggcctcatccttcccaaatatacatgttgcaaccgcatcaaacacaaatatacaaacactattggaatgcgcatcaagaactccgaagggtggagcttatgctcagacgcagttacgctcgaccattgtccttgtggaaacgagttgtacaaccaactacagcggataaatacacaaccagtagtatgaattaacaaattctctcgagggctagtatggttcctgatcccgctgggcactgcaaaccctttgtccgatgatgcacaagaactccaaaagagcagataatatcgcacgtcgattgtataatgaccttacccaaaaggatttcccccaacagagccataggaaggtggggtgcttggctgggggtacctgggagcagcttgttgatcaaagcccatgttgagggaacccaaacctccttgttgcattggaagcatggtattaggtaactgctcagacatgtttggaacttgctgcatcatgtaatgatttggaggtgcaggtgactggtacagctgctgaggttgctgtggaaggactccaaaactcgaggtaccaagtaaacctgggggagtcatgccagcagatgctcccagtggtccaggtaggggctgctgcgtgtgagcttgaactggagctggctcattcccaagatcaaaaggatttgatgctttcgcaggttgggggtatgcatgttgctgttgcggatatacaggttgttgatatgcaggttgagcaaatgccatctgaggatatgcttgcattcccattgcagtctgatatggcatggcatatcccattccaaattggggtgttctctgccaaccccctattgtttgaggtcctggtggatataacgaagtaaagatatccgctggaagttctttccggccaatggatctactgtcagtattaggtgctgcttcttgaatgccactagttgctcgggaattcgcagagacctggaacggaagtcctagtgccggagcagctagaccagtttgttgaactgaagatccatggatagacattcctgttgaggcctggtgacctgagactccagggggtgcaccaaaaaatgaagaatgtgactgccccatcatggatgaccctccatcatttggaactgaagtgggcatgaccgaagctggaaaagctgatgaattgggtgcagagggtgtttcagaaaatgatagttgagcaagtgcagactcaaggggatctacactattgccagtttgtggtgtttgttgctggccgaaagaatcaaacgatgcccagtcaccaccaccactgctcactgatgacacatttttcccttgttccacagcaggctgttgtgctggtgcattaacaggttgctctggctgtgcactagcaggctgctgttgtgatgtaggtgtagattgtggaggtggcacagatgcagaaggctcaggatcagcactgaaatcaattaaacttatcgtacttgccacttttatctgttcggaggtcccctctgaagaaccaatactgctggcagttgatgtcctctgcatctgtggtggaggttcgatggttctggttccatttggtcttggaggatcaatcggtcctcgtgccgaat

SEQ ID NO: 48714 - DNA, 1340 bp, Oryza sativa
  Clone ID: PAT_MRT4530_51362C.1
cggcacgggctagtcccacgactccccatccctcctccctctctcgaccactcccgtggactcctctctcctccccttccctcccctcccccgcgcgcggtggtggttcgccggagcgcagcagcagcagcagcaaaaggccgcgagggccgccgtcgggatccccgccgccgccaagatgaacgacgccgatgtcgccaagcagatccagcagatggtgcggttcatccgccaggaggccgaggagaaggccagcgagatctccgtctccgccgaggaggagttcaatattgagaagcttcaacttgttgaagctgagaaaaagaagatcaggcaagaatatgaacggaaagagaagcaagtcgaagttagaaagaaaattgagtactctatgcagctgaatgcttctcgcatcaaagtgcttcaagctcaggatgatttggttaattccatgaaagaggatgctacaaagcaactcctgcgtgtcagccacaaccaccatgaatacaagaaccttttgaaagaactcgtcgttcagggtttgcttcggttgaaagagccagcggtacttctccgttgccgcaaagaagaccatcatcatgtggaatctgtactgcattcagcaaagaatgaatatgcgtcaaaagcagaagttcatcacccagagatacttgttgaccacgatgtgtacctaccgccttctccaagctctcatgattcccatgagaggttttgctctggaggtgttgtgctggcttctcgagatggaaagattgtgtgtgagaacacacttgatgccaggctggaagttgtcttccgcaagaaattaccggagatccggaagcttctttttggtcaggtgacggcataatctgtgcatgtaatttcagctgcggtatagctgcttccatgtaattagctgcaggttcgaacctgcagctgcaaggaatttcacctgtttgtgccaaattgattgtttaaagtattcatccgctatgtaaaacactacctatttgttcattattatcgccgagcaccaactattcgcacgcttgtttgctcagaggtataataataataataaaggacggtcaaacgttccattgctgtgtaaaaaaaaaaaaaaaaaaaaaaaagcctgttggtctgtaattccgtataggttgtgtaactctggtgtgggcctatttgattctctaccctacctatttattggtagtgctaaaatctaggcatattgtggcactaccaattttttggtagggtaaagttaattagcctacttttagtttgataccaatatggagccaaattttagtaaaaaaaaaaaaaaaaaaaaa

SEQ ID NO: 48715 - DNA, 6106 bp, Oryza sativa
  Clone ID: PAT_MRT4530_51363C.1
atggggagaagtaatgtgaaaatttttggatttttggagaagcaaggcattggagattattggttttgttatttagaatttattcacgaagtggttttggagatgattgggtttcacagatttatcttgcatcagaatgagctgtccattagaccacagaatgtaagaaaatattgtatcagtgtgcttggccacaactgggtcattcaagagggaatgggtcagaaaccatttatttatccctcaatccagtggaattggcatctggtgatgcgtgaaaggtggagcaatgtggctcaggagggacgtggaaatatattgaagaaagattatcgtcgaactggttttgaagataatcaattttcaggtgatgaacagggtttgctgttttgtcgggaccggtcagaccgggcggaggttgccggtgactcgatgcctcgggagagtatttgcggtgatggaccgggagtcggcttggtggtaagacgatgtccgtggtggtcagatatcatgtgggatactaaggctagagttgatgcacgtggttgatggagattccatatggcatacgatggaggtattgtgtgcgtatgggatgcggagtcgaatttggaaggagtccaaatttgagagaagcaataaagttgtcatctactttgagagttcttcgatttgtgtttcattgggtttcggcggtctaaccggcatctcagcggcggtcagaccggcggcatcgcagcggtccgaccggcggcgtaagggcggtcagaccggcggcggcgacagtaagcggcagctgatcaggcggtcagaccggagttccaatctcagtcagaccggtggctttcagatggtcagaccggcacgactacctcgtaggatgcaatcttacattatggctgaaaattatgatatttggaggaaagtttctcttccttatgtgattcctgaagccattaatactgatgctttaaaaactgagtttgaaaataattgcaaagctcgtaatattcttttgagtgggatttctcgttctgattatgatcgtgttgcacatcttgaaactgctcatgagatttggaatgctttgaaaaactttcatcaaggaacaaataatattaaagagcttcgtcgagatctttttaaaaaggagtacattaaatttgaggtgaaatctggagaggctttggatgactatctttctagatttaataaaattttgagtgatcttagatctgttgattcttcttatgatgttaattatccacaatctgatatttctcgtcactttttgaatggtcttgacatgtctatttgggagatgaaagttacatctattcaggagtctgttaacatgtctactttgactttggattcactttatactaaattgaaaacacatgggatgaatattctttctcgcaaagttgattctaaatcgagtgctttggtttcctcttcttcctctttggttattgatgcttcttcatctatgccttcttttcttgctgcttttaatgccacatccgatgatcaactcgaacaaatcaaggaggaggatttggctttggttgctaaccgaattgctcgagctatgaataatgccaggaacaggaaaagaggtggtccaaatcgttgctttgaatgtggttcaattgatcatcttcgttcgcattgtcctaagcttgggagaggcaaaagagaagacaaagacggtgagaagaccaacaacaacaagcccaacaactacaagtcgaagggttctaaccaagggaggaagatggagaatcttaggaaggcctttcaacaagtttgcgccgctttcgagccactaagtgatgtagatggtgaaagtggagatgatgataagggaaagaacgtctccgatgtgtgcttcatggtgcgtggtgaatctgacacagagtatgaagataatgaggtgtgtgcttttgaagaagctattaatattttgagtgcaaaaaataaaaagtgtgagaagatatataaaaaacaggagtttatcattaaatctcttaaatctgaaattaacaggttaaaatctcttattcctaatgatgatgattgtgaaaattgtgaggttttaatgaatgagatttcaaaaattagagatgttaatgctgcacatgatttgaaaaatagatcttctcttgcttgttgttttgctttgcacacacgcactttggatgagttgtttttaactaaaaagttgttacaaaaatatcaaattgcttttcatgctagtttgatgtttaacatgatttctgctaaaaagttaaaacaacctcatgatgttttggattgctcaacatgtaatttgaataagatgaaactaaaagatgctttaggtcgtgttgagtacatggaagatgttgtgaaaaacaatgaagtgctttcttgccccaaatgtcgtaaaagcaaaggtgtcatggtagattgtgaaaattgtgctaatttgaaaaaagaggtttcttatttgaaaaattctttgctaagattttctgatggtaaaaataacctcaatatgattttggatcaatcaaaggttagcacaaataaccgtggtttaggttttgatccttatgctcataattctagacatcctcctgttgtgttaggtgttggtgctaaaagtggtgagattttgattaaacatgatactaataaaactgtgtttaaatctgctggtatcatgttaaccatgaatgtatcttcttcaaaatccaatgttgtgcatgcaaaacctcctgtttctgcttgtgttgctaaatcttcttgttctaacaatgtgtctaaacaacgtgaaaaatatacttgttctttttgtggaaaagatggacatattgttggtttttgtttcagattagctcataaacagaaaaaggagagagagattgcttttgcaaaatcaaagtggcaaaaatcgggttttccctcgaggaaaccggtcagaccgcagtggatctcgcggtcagaccggcgaccggtcagaccggctgcagagcctcggtcagaccagacaccggtcagaccggcggtacagaggtggtcagaccggcccccggctttggtggcaaggaaggagaacgtgtggatcgtggattccggttgttcgcggcacatgaccggtgataaaaattgcttctcctccctcaaaaaggcatccaagactgaatcaattgtctttgctaatgcttctaccagtgccgttgtcgctacaggtttggttaaggtaaatgaaaattttgaattgaagaatgtagctttggttaaggatttaaaacttggacatattggttttgatcatctcactaggttaagtggtttggatcttgttcgtggtttgcctaaacttaagaaagatcttgatttggtttgtacaccgtgtcgtcatgctaagatggtttctacttcacatgctcctattgtttctgtgatgacggatgcaccgggacagctattacatatggacactgttggtccagctagagtgcaatctgttggaggaaagtggtatgtgttggttattgttgacgatttttctcgatattcttgggttttctttatggcaactaaggacgaagtttttcaacactttcgtggtttgtttcttcgattggagcttgaatttcctggttctttgaaaagaattcgaaatgataatggtggagagtttaaaaatgcttcatttgaacaattttgcaatgaaagaggtcttgaacataaattttcttctcctcgtgttcctcaacaaaacggtgttgttgaaagaaaaaatcgtgttttggttgagatggctagaacgatgttggatgaatataaaactcctagaaaattttgggctgaggctattaacactgcttgctatatttcaaatcgagttttcttgcgttctaaacttggaaaaacttcttatgaacttcgatttggtcatcaacccaaagtttcacatttgcgtgtttttggttgcaaatgctttgtcttgaaatctggaaatttggataagtttgaggcacgctctatcgatggattgtttcttggttaccccgcacacactcgtggctatcgtgtacttattttagggactaacaaaattgttgagacttgtgaagtttcttttgatgaggctagtcctggtactagacccgatattgcaggtacactgtcacaggttcagggggaggatggtcgtatttttgaagacgagagcgactacgaccacgacgatgaggtcggctcggccggtcagaccgggcgccaggccggtcagaccgccggcacacctccggtcagaccggctcatgaggagcggtcagaccggccaggttcgtcgggttcggatactgttgatgctgatcgagatggtcctctagagaattcaacttcgaccagtactgaaacagaacgtggatcaacttcagaagttgctgctcctttgcacaatcaacgacgacatccgccggaacaaattattggtaatataggtgagcggactacaaggtttaaggtaacgactcatgatgtttgtgcaaattctgcatttgttgcttcttttgaacccaaagatgtgtcacatgcattaactgatgaatcgtggattaacgccatgcatgaagaacttgaaaattttgagagaaacaaagtttggactttagttgaaccaccttctggacataatgttattggaaccaagtgggttttcaaaaataaacaaaatgaggatggtttgattgtgagaaataaagctaggcttgttgctcaaggttttactcaagttgagggtttggattttgatgaaacttttgctcctgttgctagaattgaggcaattagacttttgttggcttttgctgcttcaaaaggttttaaattgtatcaaatggatgcgaaaagtgcttttctaaatggttttatacaggaggaagtttatgtcaaacaaccaccatgttttgaaaatcctgattttcccaaccatgtttttaaattgtctaaagctttgtatggtttgaaacaagctcctagggcatggtatgataggcttaagaactttttgattgcgaaaggttttacaatgggaaaggttgacaaaacgctttttgttcttaagcatggtgataatcaacttttcgttcagatttatgtggatgatattatctttggttgttcgactcacgctttggttgtagattttgctgagactatgcgcagggaatttgagatgagcatgatgggtgagttatcgtactttttgggattgcaaattaagcaaacacctcaaggtacctttgtgcatcaaacgaagtatacaaaggatcttttgcgacggttcaagatggagaattgcaagcaaatttcaacaccaattggttctacagttgtgttggatcctgatgaagatggtgaagctgttgatcaaaaggaatatagaagtatgattggatctttgttgtatctaactgcttctaggccagacatacagtttgctgtgtgtttgtgtgcgcgctttcaagcttctcctcgtgcttcacatcgtcaagcggtcaagcgaataatgaggtatttgaatcatacacttgagtttggaatttggtattctacttcatcttctatatgcttaagtggatattcagatgctgattttggaggttgtagaattgataggaaaagtactagtggaacatgtcattttcttggtacatcattgattgcatggtcttctagtaaacaatctagtgttgctcaatcaactgctgaatctgaatatgttgctgctgctagctgttgttcacagattctttggcttttatctactttgaaagattatggtcttacttttgagaaagtacctctcttttgtgataatactagtgctatcaatattgctaagaatcctattcaacactcacgcaccaagcacattgatattcgttttcactttttgagggatcatgttgagaaaggagatgttgagttgcagtttttggacacaaagttgcaaattgctgatattttcactaaacctttggattctaatcgctttgcttttctccgtggtgaattgggtgtaattcatccttttggcatggtt

SEQ ID NO: 48716 - DNA, 445 bp, Oryza sativa
  Clone ID: PAT_MRT4530_51364C.1
tttttggttttttttttttttttttttttttttttttttttttttttttttttcctcgaagacccaacaacaaagttttgcataaagaaacatcccatggggggccagaaacaaaattaagctagaaaagcacggatcccccgcacaatttacaggatcattacatgggccataacacaggcactaaggcatggataccacaagggggtatggatccgggggactgggtaaaagaattggataagccgaagaccgggcccaggacgcccatgttctgggggccggggacaacgccgacccccaagatggggccgacggggccaaaggccagcgggtcggcgagggtaaacccggggggggcgccggtctgcaggccggagtcccgcccctccagctaaagccccgccggggacttccggatccccgacggggccagcccgaacct

SEQ ID NO: 48717 - DNA, 3838 bp, Oryza sativa
  Clone ID: PAT_MRT4530_51365C.1
cctactacgctgctactgatagcaacatcatcttcaccgactggctcgcctccgtcgccgctgccgactggatccagatccagatatgcataatagggattcatggctttcaaagcttatctcctacgcttcagaaatggatcagtcagaacatcaccgaccggcttgccttcgtcgccgccgactggtgtctccgcctacacggctggcctattatgccaccgttgttgggcgtctacgtcttcaccgaccggcttgccttcgccgctgccgactggtgtttctgcctgcacggctggcctattatgccgccgttgttgggcgtctacgtcttcaccgaccggctgccttcatctgctgccgactggtgtctccgcctgcacggctggcctattatgccgccgttgttgggcatctacgtcttcaccgaccggctgccttcgtctgccaccgactggtgtctccgcctgcacggctggcctattatgctgccgttgttgagcgtctacgtcttcaacgaccggcttgccttcgtcgctgccgactggtgtctccgcctgcacggccggcctattatgccgccgttgttgggcatctacgtcttcaccgaccggccgcctcgtctgctgtcgactgtcttcattatgcacacgctcgcatcaaggaaactacttgagcttcaatatcttctcaatagtttgatggattattgtcactggcatcatcaccagcacctctacttcatcggccctgacgtcttcgccgttgctaaggggcgggtgccctccacagtcttcatatttggaaaaagtactcgggagatcatggcgaagatgattgaagcactcggctttagagtgatcgcagatttatcattttatgtgaccggtcagaccgggctatgtatgccggtcagaccggcggtgatcgagcggtcggaccggccagtccgcgcggtcagaccggcggcatcgcggcggtcagaccggtgggtgacctacggtctgaccggcggcgacatcaggcgcgacagggattccagggctgtccaaccggtagggagaggcaaaagagaagacaaagatggcgagaagaccaacaacaacaagccgaagggttcatcccaagggaggaagctggagaatcttagtaaggcttttcaacaagtttgcgccgccttcgagccactaagtgatgtagatggtgaaagtggagatgatgataagggaaagaacatctccgatgtttgcttcatggcgcgtggtgaatctgacacaaagtatgaagataatgaggctttggtggcaaggaaggagaacgtgtggatcgtggattccggttattcgcggcacatgaccggtgataaaaattggttctcctccctcaaaaaggcatccaagactgaatcgattatctttggtgatgcttctacaagtgtcgttctcgctacaggtttggttaaggttcactgtaagaaaactggaagtaaagtttttgattcttgtggtgattctgtgttgattatttctcgctatggaagagtgtttaaagctgattttgaaaatcctgtttcacctgtgataacatgtttggctgctaagtttgataaagatgtgatgttttggcatcgtagacttggacatgttggttttgatcatctcactaggttaagtggtttggatcttgttcgtggtttgcctaaacttaagaaaaatattgatttggacgaagcttttcaacactttcgtggtttgtttcttcgattggatcttgaatttcctggttctttgaaaagaattcgaagtgataatggtggtcttgaacatgaattttcttctcctcgtgtaccgcaacaaaacggtgttgttgaaaggaaatatcgtgttttggttgagatggctagaatgatgttggatgaatataaaactcctaaaaaattttgggctgaggcgattaatactgcgtgttatatttcaaatcgagttttcttgagatcaaaacttggaaaaacttcttatgaacttcgatttggacgtcaacctaaagtttcacatttgcgtgttttgagttgcaagtgctttgtcttgaaatctggaaatttggataagtttgaggcacgttctaccgatggattgtttcttggttaccccgcacatagtcgtggctatcgtgtacttattttggagactaacaaaatcattgagacttgcgaagtttcttttgatgaggctagtccaggtactagacccgatattgcaggtacattgtcacaggttcagggggaggatggtcgtatttttgaagacgagagtgaagacgacaacaacgacgaggtcggctcggccgaacttgaaaattttgagagaaacaaagtttggacttttgttgaaccaccttctgaacataatatttttggaaccaagtgggttttcaaaaataaacaaaatgaggatggtttgattgtgagaaataaagctggactttttgctcaaggttttacccaggtggagggtttggattttgatgaaacttttgctcatgttgctagaattgaggcaattagacttttgttggcttttgctgcttcaaaaggctttaaattgtgtcgaatggatgtgaaaattgcttttctacatgattttatacaggaggaagtttatgtcaaacaaccaccaggttttgaaaatcctgattttcccaaccaagtttttaaattgtctaaagctttgtatggtttgaaacaagcacctagagcatcgtatgataggcttcagaactttttgcttgcgaaaggttttacaatgggaaaggttgacaaaacgctttttgttcttaagcatggtgataatcaaaaaaaacccctttgtttgttgtttgttcggatttatgtggatgatatcatctttggttgttcaactcacgctttggttgtggagtttgttgagactatgcgcagggaatttgagatgagcatgatgggtgagttatcgtactttttgggattgcaaattaagcaaacacctcaaggtacatttgtgcatcaaatgaagtacacaaaggatcttttgagacggttcaaaatggagaattgcaagccaatttcaacacaaattggttatacagctgtgttggatcctgatgaagatggtgaagctgttgatcaaaaggagtatagaagtatgattgaatttttgttgtatctaactgcttctaggtcagacatacaatttgctgtgtgtttgtgtgcgcgctttcaagcttctcctcgtgcttcacatcgtcaagcggtcaagcgaataatgaggtatttgaatcatacacttgagtttggaatttggtattctacatcatcttcaaatatgcttaagtggatattccgatactgattttgggggttgtagaattgataggaaaagtactagtggaatatgtcattttcttggtacatcattgattgcatggtcttctaggaaacaatctagtgttgctcaatcaacttctgaatctgaatatgttgctgctgctagctgttgttcacagattctttggcttttatctactttgaaatattatagtcttacttttgagaaagtacctctcttttgtgataatactagtgctattaacattgctaagaatcctgttcaacactcacgcacaaagcacattaatatttgttttcactttttgagggatcatgttgagaagggagatgtcgaattgcagtttttggacaaaatgttgcaacttgctgatattttcactaaacctttggattcataatcattttgcttttcttcatgttgaattgggaataattcatccttttggcatgttt

SEQ ID NO: 48718 - DNA, 4260 bp, Oryza sativa
  Clone ID: PAT_MRT4530_51366C.1
atggagttattgtgtgcatatgggatgcggagtcaaatttggaaggagtccaaatttgctcgcaatattcttttgagtggtatttctcgtttggattataatcgtgttgctcatcttcaaactgctcatgagatttggactgctttgagtaattttcatcaaggaacaaataatattaaagaacttcgtcgtgatcttttcaaaaaggagtatattaaatttgagatgaaacctagagaagctttggatgactatctttctcggtttaataaaattttgagtgatcttagatctgttgattcttcttatgatgctaattatccacaatctgagatttctcaccactttttgaatggtcttgacatgtctatttgggagataaaagttacatctattcaggaatctgttaacatgtctactttgactttggattcactttatacaaaattgaaaacacatgagatgaatgttctttctcgaaaagttgattctaagtcgagtgctttggtttcctctttggatgttgatgcttcttcatctaagtcttcttttcttgctatttttaatgccacatccgatgatcaactcgaacaaattgaggaggaggatttggctttggttgctaacagaattgctcgagctatgaataatgccaggaacaggaaaagaggtggtccaaatcgttgctttgaatgtggttcaatcgatcatcttcgttcgcattgtcctaagcttgggagaggcaaaagagaagacaaagatggtgagaagaacaacaacaacaagccgaagggttcataccaagggaggaagatggagaatctcaggaaggcttttcaacaagtttgcgccgccttcgagccactaagtgatgtagatggtgagagtggagatgatgataagggaaagaacatctccgatgtttgcttcatggcgcgtggtgaatctgacacagagtatgaagataatgaggtaagtgcttttgaggaagctattaatattttgagtgaaaagaataagaagtgtgagaagatgtatagaaaagaggaatttatcgatgaatctcttaaatctgaaattgctagattaaaatctcttattcctaatgatgataattgcaaaaattgtgaggttttaatgaatgagatttcaaaaattagagatattaatgctgcatatgatttgaaaaatagatcttctcttgcttgtagttttgctttgcacacacgcactttggatgagttgtttttaactaaaaagttgttgcaaaaatatcaaattgcttttcatgctagtttgatgtttaatatgatttctgctaaaaagttaaaacaacctcatgatgttttggattgctcaacatgtgttggtgctagaaggggtgagattttggttaaacctgatactaacaaaactgtgtttaaatctgctggtatcatgtctactatgagtgcatcttcttcaaaatccaatgttgtgcatgctttggtggcaaggaaggagaacgtgtggatcgtggattccggttgttcgcggcatatgaccggtgataaaaattggttctcctcactaaaaaaggcgtccaagactgaatcgattatctttggtgatgcttctacaagtgctgttctcgctacaagtttggttaaggtaaatgaaaaatttgaattgaagaatgtagctttggttgaggatttaaagtacaatttgctttcagttttacaaattgttgatgaaaattttgaggttcactttaagaaaactggaagtaaagtttttgattcttgtggtgattctatgttgaatatttctcgttatggaagagtgtttaaagctgattttgaaaatcatgtttcacctgtgataacatgtttggttgctaaattttataatgatgtgatgttttggcatcgtagacttggacatgttggttttgatcatctcactaggctaagtggtttggatcttgttcgtggtttgcctaaacttaagaaagatcttgatttgatttgtacaccgtgtcgtcatgctaagatggttgcttcttcacatactcctattgtttctgtgatgacggatgcaccgggacagctattacatatggacattgttggtccagctagagtgcaatctgttggaggaaagtggtatgtgttggttattgttgacgatttttctcgatattcttgggttttttttatggcaactaaggacgaagcttttcaacactttcgtggtcttgaacatgaattttcttctcctcgtgttcctcaacaaaacggtgttgttgaaaggaaaaatcatgttttggttgagatggctagaacgatgttggatgaatataaaactcctagaaaattttgggctgaggctattaacactgcttgttatatttcaaatcgggttttcttgagatcaaaacttggaaaaacttcttatgaacttcgatttggacatcaacctaaagtttcacatttgcgtgtttttggttgcaagtgctttgtcttgaaatctggaaatttggataagtttgaggcacgttctaccgatggattgtttcttggttaccccgcacatactcgtggctatcgtgtacttattttggagactaacaaaatcgttgagacttgtgaagtttcctttgatgaggctagtccaggtactagacccgatattgcaggtacactgtcacaggttcagggggaggatggtcgtatttttgaagaggagagtgacgacaacgacgacgacgaggtcggctcggccgatgtgtcacatgcattaactgatgaatcgtggattaacgccatgcatgaagaacttgaaaattttgagagaaacaaagattggactttagttgaaccaccttctggacataatattattggaaccaagtgggttttcaaaaataaacaaaatgaggatggtttgattgtgagaaataaagctagacttgttgctcaaggttttactcaagttgagggtttgtattttgatgaaacttttgctcctgttgctagaattgaggcaattagacttttgttggcttttgctgcttcaaaaggttttaaattgtatcaaatggatgtgaaaagtgcttttctaaatggttttatacatgaggaagtttatgtcaaacaaccaccaggatttgaaaattctgattttcccaaccatgtttttaaattgtctaaagctttgtatggtttgaaacaagctcctatggcatggtatgataggcttaagaactttttgcttgcgaaaggttttacaatgggaaaggttgacaaaacactttttgttcttaagcatggtgataatcaacttttcgttcagatttatgtggatgatatcatctttggttattcgactcacgctttggttgtagattttgctgagaatatgcgcagggaatttgagatgagcatgatgggtgagttatcatactttttgggattgcaaattaagcaaacacctcaaggtacttttgtgcatcaaaccaagtatacgaaggatcttttggaacggttcaagatggagaattgcaagccaatttcaacaccaattggttctacagctgtgttggatcctgatgaagatggtgaagctgttgatcaaaaggaatatgcttctaggccagacatacaatttgttgtatgtttgtgtgcacgttttcaagcttctcctcgtgcttcacatcgtcaagcggtcaagcgaataatgaggtatttgaatcatacacttgagtttggaatttggtattctacttcatcttctatatgcttaagtggatattccgatgctgattttggtggttgtagaattgataggaagagtactagtggaacatgtcattttcttagtacatcattgattgcatggtcttctaggaaacaatctagtgttgctcaatcaactgctgaatctgaatatggtgctgctgctagttgttgttcacagattctttggcttttatctactttgaaagattatggtcttacttttgagaaagtacctctcttttgtaataatactagtgctattaacattgctaagaatcctgttaaacattcacgcacaaagcacattgatattcgttttcactttttgagggatcatgttgagaaaggagatgttgaattgcagtttttggacaccaagttgcaaattgctgatattttcactaaacctttggattctaatcgctttgcttttcttcgtggggaattgggcataattcatccttttggcatggtttga

SEQ ID NO: 48719 - DNA, 365 bp, Oryza sativa
  Clone ID: PAT_MRT4530_51367C.1
aataagatgattgctgacttcatcgcccgcggcggtggctcagacctgcccgtggctgcccagtcacggcactccgaccacaacgacccaacggagcccaaaccccacacccatcgagctcagccacggtgcctgcttctccaccaggggggagcattccaagccgcagagtacatgcgcggaggcagggttatgcaccggtggatcggagggcggtagcagcggcccaggcgcctaattcgtcctgatagacacctttcccacaacacaaggtcccatgttcgatcgatcgatccatgtcatgtcatgcatgatgatacataggccaccgcatgcacaggagccggcgataaacttccctgcta

SEQ ID NO: 48720 - DNA, 3658 bp, Oryza sativa
  Clone ID: PAT_MRT4530_51368C.1
aacacggcgtaccggtttcaccctcgtcaagcaagtggcgatgacgtcactgtcacgtcctgataaattcatcccgaattaaaaatcattcttccctctctctctctcctcccccgcggcccatcggcctcccccgcgcgcgtgcgccgctgacaggcgggcccgcccgccactctcgctgacgggtgggacccacctgtcatcgccttcctcccgccgcgcccgccgccgcgcccgtgccttagcgccgccgccgccgcggattgcgccgcatcccgccgtccccgcgcgcattaaagagaggggaatcactccccgtgattccctctcccgtttcccccgttttcccctctctctctccctcggattcgtccgatttccttcccgcattcatcgccggcgcatctatggcggccgaaatctccgcgaccgattcctccctctccggccgctctttccttcccccggcgctatttaaacgttgcccgagctccgctcttccgtttccgccgctcgccgctcgctctcgccgtcggattcgtgctcgcaccgtgctccgctctctccgccatcgccgccgagctccgttccgccgccgccgccgctccggacttcctccttactcggcgccacctccctcggcatcgccgcatcgccgtcgacctcgtccgcgcctccgtttcgctcgccgaccgtcggagcgccgtcgccatcgtcatcccgagccgcgccgccgtcttcctccgctccggccgccgttctcgtcgtcgtcgttgtcccggggtgagccgaggaccgccgttcgccttcccccttccctcctctctctcgggcgccgctccgccgcgccggtggtcgccggcggtgaccatcggggcgcgggcgcgccgctcccgtcggccgcgccggcgaggccgccctcgggcgcgccctcgcggctgccaagtgggcccggccgtcagccgcccgcgaacccatttttgtgctttgtttctgctgttatgtggagttatttagtgtataagccttttcttttccgttggtcgtgtagacgctgcagtttcggaagatccgctcttcgtggaagttgaagccgtcgtttgggaaagcgagcaaggcaagtcaccctctcttcctctttcaaaacccctaaaacctgttttcggtggggtttgggtgcatgccagttgtgggaagtagcaccccggccactataaggattaagctcgggcctctgttgcaaagcactaccgtacttccacatgtctagtgggtaaggcttagtttgtggctcagtctggtcataaacaaaagtacacggattggagatggatgaagtcgggggtcgatggacattctccagggcaaatgaaggctacacgagctgcggcccggtagtcgagatgtcatatggcagagggttggtgccctgctgctagggggctcagtcctgcctgcctgtcccgggtgtcccggccgtagggggattgggtcggtactcttgtttatggctaggatgggttgggaactatgtcacgtcttccgtccgtataccgtggtgcttgggagaggcaaaagagaagacaaagatggtgagaagaccaacaacaacaagttgaagggttcatcccaagggaggaagctggacaatctcaggaagtcttttcaacaagtttacaccgccttcgagccactaagtgatgtagatggtgaaagtggagatgatgacaagggaaagaacatctccgatgtttgcttcatggcgcgtggtgaatctgacacagagtatgaatataatgaggctttggtagcaaggaaggagaacgtgtggatcgtggattccggttgttcgcggcacatgaccggtgataaaaattggttctcctccctaaagaaagcatctaagactgaatcgattatctttggtgatgctgctacaagtgccgttctcgctacaggtttggtcaagggggaggatggtcgtatttttgaagacgagagcgacaacgacaacgacgatgatgaggtcggctcgaccggtcagaccgggtgccaggccggtcagaccgccggcacacctccggtcagaccggcacaggaggtgcggtcagaccgaccagggtcgtcggctgagggttctattgatgttgatcgagatggtccttcggaaattactacttcgaccagtactgatatagaacgtggatcatcttcagaagttgctgctcctttgcacattcaacgacgacatccgccggaacaaattattggtaatataggtgagcggactacaaggtctaaggaggaagtttatgtcaaacaaccaccaggttttgaaaatcctgattttcccaaccatgtttttaaattgtctaaagctttgtatggtttgaaacaagctcctagggcatgggaatttgagatgagcatgatgggtgagttatcgtactttttgggattgcaaattaagcaaacacctcaagaccggcaggagcacgacggtcagaccggcggcggctacaggcgcggcaggcgatctcggcggtcagactggagattcaacaccggtcagaccggcggcatccactcggtcagaccgacttccgtcgatttcgaggaccgcagtgggtcccgtggtcagaccggcgaccggtcatactggctactgagcgtcggtcagagcaggcaccggtcagaccggcggtacagaagcggtcagaccggccaccggccactgtacctcgctttggcggcaaggaaggataacgtttggatcgtggattccagttgttcgcggcacaagaccggtgataaaaattggttctcctccctaaagaaggcatctatgactgaatcgattatctttggtgatgctgctataagtgccgttctcgctacaggtatggttaaggtaaatgaaaaatttgaattgaagaatgtagctttggttgaggacttaaagtacaatttgctttcagtttcacaaattgttgatgaaaattttgaggtccattttaagaaatctggaagtaaagtttttgattcttgtggtgattctgtgttgaatatttctcgctatggaagagtgtttaaagctgattttgataatcctgtttcacctgtgataacatgtttggttgctaaatttgataaagatgtgatgttttggcattatagacttggacatgttggttttgatcatctcacttggttaagtggtttggatcttgttcgtggtttgcctaaacttaagaaagatcttgatttgggggaggatggtcgtatttttgaagacgagagcgacaacgacaacgacgacgacgaggtcggctcggccggtcagaccgggcgccaggtcggtcagaccgccggcacacctccggtcagaccggcgcaggatgtgcggtcagatcagccagggtcgttggctgaggatcctgttgatgctgttccagatgtctctcggtccacggtggaccgggagcacccgcggctcaccagccggcgccgtgggccccacgcgtcagcgcacccgagggcatgggcggctgacggccgggcctcacgcggtggccacacggcgcgcccggagcggccacgtcggcgcggctggcgggaggcggcgcccgtgcccctatggtcgccggcggggccatag

SEQ ID NO: 48721 - DNA, 2130 bp, Oryza sativa
  Clone ID: PAT_MRT4530_51369C.1
atgtcagcctctactagcaccttctctttcttcccttacacctcttctcatttcccactagggctatggactagccggcgacgggaggcggcggtgatcgcaggatttattattttatgtgaccggtcagaccgggctgtgcatgctggtcagaccggcagtgatcgagacttgcgacttgcgaagtttcttttaatgaggctagtccaggttcagggggaggatggtcgtatttttgaagacaagagatactacgacgacgatgatgaggtcggctcggctggtcagaccgggcgccaggccggtcagaccgctggcacacctccggtcagaccggttcaggaggagcggtcagaccggccaggttcgtcgagttctggtactgttgatgctgatcgagatggacctccaaagacttcaacttcaaccagtactggtacagaacgtggatcaacttcagacgtcactactcctttgcacattcaacgacgacatccaccggaacaaattattggtaatataggtgagcggactacaagatctaaggtaacgactcatgatgtttgtgcaaattctgcatttgttgcttcttttgaatccaaagatgtgtcacatgcattaactgatgaatcgtggattaacgccatgcatgaagaacttgaaaattttgagagaaacaaagtttggactttagttgaaacaaagtttggacataatattattggaaccaagtgggttttcaaaaataaacaaaatgaggatggtttgattgtgagaaataaagctagacttgttgctcaaggttttactcaagttgagggtttggattttgatgaaacttttgctcctgttgctagaattgaggcaattagacatttgttggcttttgctgcttcaaaaggttttaaattgtatcaaatggatgtgaaaagtgcttttctaaatggttttatacaggaggaagtttatatcaaacaaccaccaggttttgaaaatcctgattttcccaaccatgtttttaaattgtctaaagctttttatggtttgaaacaagctcctagggcatggtatgatagacttaagaactttttgcttgcgaaaggttttacaatgggaaagtttgacaaaacgctttttgttcttaagcatggtgataatcaactgttcgttcagatttatgtggatgatatcatctttggttgttcaattcacgctttggttgtagattttgctgagactatgcgcagggaatttgaaatgagcatgatgggtgagttatcgtactttttgggattgcaaattaagcaaacacctcaaggtacttttgtgcatcaaacgaagtataccaaggatcttttgagacggttcaagatggagaattgcaagccaatttcaacaccaattggttctacagctgtgttggatcctgatgaagatggtaaagctgttgatcaaaaggaatatagaagtatgattggatctttgttgtatctaactgcttctaggccagacatacagtttgctgtgtgtttgcgtgcacgctttcaagcttctcctcgtgcttcacatcgtcaagcggtcaagcgaataatgaggtatttgaatcatacacttgagtttggaatttggtattctacttcatcttctatatgcttaagtggatattctgatgctgattttggaggttgtagaattgataggaaaagtactagtggaacatgtcattttcttggtacatcattgattgcatggtcttctaggaaacaatctagtgttgctcaatcaactgctaaatctgaatatgttgctgctgctagttgttgttcacagattctttggcttttatctactttgaaagattatggtcttacttttgagaaagtacatctcttttgtgataatactagtgctatcaatattgctaagaatcctgttcaacactcacgcacaaagcacattgatattcgttttcactttttgagggatcatgttgagaagggagatgttgaattgcagtttttggacacaaagttgcaaattgctgatattttcactaaacctttggattctaatcgctttgcttttcttcgtggtgaattgggcataattcatccttttggcatggtttga

SEQ ID NO: 48722 - DNA, 695 bp, Oryza sativa
  unsure (1)..(695): unsure at all n locations
  Clone ID: PAT_MRT4530_5136C.1
attcgtccattttctgtacagcctgttagtcttctaaaggatttttgttccctaattacccttacatttgttcttgcacatacaatatttctgttttcttgattcatgtacctctgaatcattttcatctttatttcaggtcttgtaagcaagtcatggcaggtacggtggcactaatatgtttgtcccaataagtcaatgctcccgtgccatggattcttatatgggggccatattctattagcccttcaaacatactagtagggaaaaactcaatgatttggctctgaaatgtcaaaaggaaccccagaagtgctaatttgatttacgccgtcaaaaacgaattcagaggaatgtctgtttgccagagggcatgcagaaaaccaggagatgtggtgccatgctgccatgcaaagaagaagtttttgtcaaccacaacacatgggcaccaatcaatcatccattagaggtgtgcgtattgcaaggaatactatatacttatatggctctcacgacgtgcggcgcactaatgatggattcggtgcgtgcgtacgtgtgcgtgcgtgcgtacgtccgtcagtaacggtaacaacggccggngaccaaaccaacagagagagagagaccaactgctgcagagacccgtgtcgccatgttcatcatcatcaattcatcatgcctacctttgctttgca

SEQ ID NO: 48723 - DNA, 3861 bp, Oryza sativa
  Clone ID: PAT_MRT4530_51370C.1
atggagaatcttaggaaggcttttcaacaagtttgcgctgccttcgaaccactaagtgatgtagatggtgaaactggagatgatgacaagggaaagaacatctccaatgtttgcttcatggcgcgtggtgaatctgacacagagtatgaagataataagatgagtgcttttgaggaagctattaatattttgagtgcaaaaaataagaagtgtgagaagatatatagaaaacaggaatttatcattgaatctcttaaatctgaaattgctagattaaaatctcttattcctaatgatgatgattgtgaaaattgtgaggttttaatgaatgagatttcaaaaattagagatgttaatgctgcacatgatttgaaaaatagatcttctcttgcttgtagtttttctttgcacacacgcactttggatgagttgtttttaactaaaaggttgttgcaaaaatataaaattgcttttcatgctagtttgatgtttaacatgatttctgctaaaaagttaaaacaacctcaagatgttttgcattgctcaatatgtaatttgaataagatgaaactaaaagatgctttaggtcgtgttgagtacatggaagatgttgtgaaaaacaatgaagtgctttcttgccccaaatgtcttaaaagcaaaggtgtcatggtagattgtgaaaattgtgctaatttggaaaaagaggtttcttatttgaaaaattctttgctaagattttctgatggtaaaaagaacctcaacatggtagattgtgaaaattgtgctaatttggaaaaagatgtttcttatttgaaaaattctttgctaagattttctgatggtaaaaagaacctcaacatgattttggatcaatcaaaggtgttggtgctagaggtggctttggtggcaaggaaggagaacgtgtggatcgtggatttcggttgttcgcggcacatgaccggtgataaaatttggttctcctccctaaagaaggcatctaagactgaatcgattatctttggtgatgctgctacaagtaccgttctcgctacaggtatggttaaggtaaatgaaaaatttgaattgaagaatgtagctttggttgaggacttaaagtacaacttgctttcagtttcacaaattgttgatgaaaattttgaggttcactttaagaaaactggaagtaaagttttcgattcttgtggtgattctgtgttgaatatttctcgctatggaagagtgtttaaagctgattttgaaaatcctgtttcacctgtgataacatgtttggttgctaaattcgataaagatgtgatgttttggcatcgtagacttggacatgttggttttgatcatctcactaggttaagtggtttggatcttgtttgtggtttgcctaaacttaagaaagatcttgatttggtttgtacaccgtgtcgtcatgctaagatggttgcttcttcgcatactcctattgtttttgtggtgatggatgcaccgggacagctattacacatggacactgttggtccagctagagtgcaatctgttggaggaaagtggtatgtgttggttattgttgacgatttttctcgatattcttgggttttctttatggcaactaaggacggagcttttcaacacttttgtggtttgtttcttcgattggagcttgcatttcctgcttctttgaaaagaattcgaagtgataatggtggtgaatctaaaaatgcttcatttgaacagttttgcaatgaaagaggtcttgaacatgaattttcttctcctcgtgttcctcaacaaaacggtgttgttgaaaggaaaaatcgtgttttggttgagatggctagaacgatgttggatgagtataaaactcctagaaaattttgggctaaggcgattaacactgcttgttatatttcaaatcgagttttcttgagatcaaaacttgaaaaaacttcttatgaacttcgatttggacaccgacccaaagtttcacatttgcgtgtttttggttgcaagtgctttgtcttgaaatctggaaatttggataagtttgaggcacgttctaccaatggattgtttcttggttaccccgcacatactcgtggctatcgtgtacttattttggggactaacaaaatagttgagacttgcgaagtttcttttgatgaggctagtccaggtactagacccgacattgcaggtacactgtcacagattcagggggaggatggtcgtatttttgaggacgagagcgacaacgacaacgacgacgacgaggtcggctcggccggtcagaccaggcgccaggccggtcagaccgccggcacacctccggtcagaccgacacaagaggtgcggtcagaccggccagggtcgtcggctgagggttctattgatgctgttcgagatggtcctccagaaattactacttcgaccagtactaatacagaacgtggatcaactttagaagttgctgctcctttgcacattcaacgacgacatccgccggaacaaatcattggtaatataggtgagcggactacaaggtctaaggtaacgactcatgatgtttgtgcaaattctgcatttgttgcttcttttgaacccaaagatgtgtcacatgcattaactgatgaatcgtggattaatgccatgcatgaagaacttgaaaattttgacagaaacaaagtttggactttagttgaaccaccttctggacataatattattggaaccaagtgggttttcaaaaataaacaaaatgaggatggtttgattgtgagaaataaagctagacttgttgctcaaggttttactcaagttgagggtttggattttgatgaaacttttgttcctgttgctagaattgaagcaattagacttttgttggcttttgctacttcaaaaggttttaaattgtatcaaatggatgtgaaaagtgcttttctaaatggttttatacaggaggaagtttatgtcaaacaaccaccaggttttacaatgggaaaggttgacaaaacgctttttgttcttaagcatggtgataatcaacttttcgttcagatttatgtggatgatatcatctttggttgttcgactcacgctttggttgtagattttgctgagactatgcgcagggaatttgagatgagcatgatgggtgagttatcgtactttttgggattgcaaattaagcaaacacctcaaggtacttttgtgcatcaaacgaagtatacgaaggatcttttgaaacggttcaagatggagaattgcaagccaatttcaacaccaattggttctacagctgtgttggatcctgatgaagatggtgaagctgttgatcaaaaggagtatagaagtatgattggatctttgttgtatctaactgcttctaggccaaacatacaatttgttgtgtgtttgtgtgcacgctttcaagcttctcctcgtgcttcacatcgtcaagcggtcaagcgaataatgaggaaacaatctagtgttgctcaatcaactgctgaatctgaatatgttgctgctgctagttgttgttcacagattctttggcttttatctactttgaaagattatggtcttacttttgagaaagtacctctcttttgtgataatactagtgctattaatattgctaagaatcctgttcaacactcacgcacaaagcatattgatattcgttttcactttttgagggatcatgttgagaagggagatgttgaattgcagtttttggacacaaagttgcaaattgctgatattttcactaaacctttggattctaatcgctttgcttttcttcgtggtgaattgggcataattcatccttttggcatggtttga

SEQ ID NO: 48724 - DNA, 3831 bp, Oryza sativa
  Clone ID: PAT_MRT4530_51371C.1
atgatcaactcgaacaaaatcgaggaggaggatttggctttggttgctaacagaatttctcgagctatgaataatgccaggaacaggaaaagaggtggtccaaatcgttgctttgaatgtggttcaattgatcatcttcgttcgcattgtcctaagcttgggagaggcaaaagagaagacaaagatggtgagaagaccaacaacaacaagcccaacaacaacaagtcgaagggttcataccaagggaggaagatggagaatcttacgatggcttttcaacaagtttgcgccgccttcgagctactaagtgatgtagatgagtatgaagataataaggtgagtgcttttgaggaagctattaatattttgagtgcaaaaaataaaaagtgtgagaagatgtataaaaaacaggaatttatcattgaatctcttaaatctgaaattgataggttaaaatctcttattcctaaagatgatgattgtgaaaattgtgaggttttaatgaatgagatttcaaaaattagagatgttaatgctgcacatgatttgaaaaatagatcttctcttgcttgtagttttgctttgcacacacgcactttggatgagttgtttttaactaaaaagttgttgcaaaaatatcaaattgcttttcatgctagtttgatgtttaatatgatttctgctaaaaagttaaaacaacctcatgatgttttggattgctcaacatgtaatttgaataagatgaaactaaaagatgctttaggtcgtgttgagtacatggaagatgttgtgaaaaacaatgaagtgctttcttgccccaaatgtcgtaaaagcaaaggtgtcatggtagattgtgaaaattgtgctaatttggaaaaagaggtttcttatttgaaaaattctttgctaagattttctgatggtaaaaagaacctcaacatgatttggatcaatcaaagattagctcataaacagaaaaaggagagagagattgcttttgcaaaatcaaagtggcaaaaatcgggttttctctcgaggaaaccggctttggtggcaaggaaggagaacgtgtggatcgtggattccggttgttcgcggcacatgaccggtgataaaaattggttctcctccctaaagaaggcatctaagattgaatcgatcatctttggtgatgctgctacaagtgccgttctcgctacaggtatggttaaggtaaatgaaaaatttgaattgaagaatgtagctttggttgaggacttaaagtacaatttgctttcagtttctcaaattgttgatgaaaattttgaggttcactttaagaaaactggaagtaaagtttttgattcttgtggtaattctgtgttgaatatttctcgctatggaagagtgtttaaagctgattttgaaaatcctgtttcacctgtgataacatgtttggttgctaagtttgataaggatgtgatgtcttggcatcgtagacttggacatgttggttttgatcatctcactaggttaagtggtttggatcttgttcgtggtttgactaaacttaagaaagatcttgatttggtttgtacaccgtgtcgtcatgctaagatggtttctacttcacatgctcctattgtttctgtgatgacggatgcaccgggacagctattacatatggacattgttggtccagctagagtgcaatctgttggaggaaagtggtatgtgttggttattgttgacgatttttctcgatattcttgtgttttctttatggcaactaaggacgaaacttttcaacactttcgtggtttgtttcttcgattggagcttgaatttcctggttctttgaaaagaattcgaagtgataatggtggagaatttaaaaatgctgaatttgaacaattttgcaatgaaagaggtcttgaacatgaattttcttctcctcgtgttcctcaacaaaacggtgttgttgaaaggaaaaaccgtgttttggttgagatggctagaacgatgttggatgaatataaaactcctagaaaattttgggctgaggcaattaacactgcttgttatatttcaaatcgggttctcttgagatctaaacttggaaaaacttcttatgaacttcgatttggacatcaacccaaagtttcacatttgcgtgtttttggttgcaagtgctttgtcttgaaatttggaaatttggataagtttgaggcacgttctaccgatggattgtttcttggttaccccgcacatactcgtggctatcgtgtacttattttggagactaacaaaatcgttgagactagcgaaatttcttttgatgaggctagtccagacgagagcgacgacaacgccgacgacgaggtcggctcggccggtcagatcgggcgccaggccggtcagaccgccagcacacctccggttagaccaccacaggaggtgcggtcagaccggccaggatcgtcggctgagggttctgttgatgctgttcgagatggtcctccggaaattactacttcgaccagtactgatacagaacgtggatcaacttcagaagttgctgctcctttgcacattcaacgacgacatccgccggaacaaattattggtaatataggtgagcggactacaaggtctaaggtaatgactcatgatgtttgtgcaaattttgcatttgttgcttcttttgaacccaaagatgtgtcacatgcattaactgatgaatcgtggattaacgccatgcatgaagaacttgaaaattttgagagaaacaaagtttggactttagttgaaccaccttctggacataatattattggaaccaagtgggttttcaaaaataaagaaaatgaggatggtttgattgtcagaaataaagctagacttgttactcaaggttttacccaggtggagggtttggattttgatgaagcttttgctcctgttgctagaattgaggcaattagacttttgttggcttttgctgcttcaaaaggttttaaattgtatcaaatggatgtgaaaagtgcttttctaaatggttttatacaggaggaagtttatgtcaaacaaccaccaggttttgaaaatcctgattttcccaaccatgtttttaaattgcctaaagctttgtatggtttgaaacaagctcctagggcatggtatgctcctagggcatggtatgataggcttaaaaactttttgcttgcgaaaggttttacaatgggaaagatttatgtggatgatatcatctttggttgtttaactcacgctttggttgtagattttgctgagactatgcgcagggaatttgagatgagcatgatgggtacttttgtgcatcaaacgaagtatacggaggatcttttgaaacagttcaagatggagaattgcaagccaatttcaacaccaattggttctacagctgtgttggatcctgatgaagatggtgaagttgttgatcaaaaggaatatagaagtatgattggatctttgttgtatctaactgcttctagggcagacatacaatttcctattctttggcttttatctactttgaaagattatggtcttacttttgagaaagtacctctcttttgtgataatactagtgctatcaatattgctaagaatcctattcaacactcacgcaccaagcacattgatattcgttttcactttttgagggatcatgttgagaaaggagatgttgagttgcagtttttggacacaaagttgcaaattgctgatattttcactaaacctttggattctaatcgctttgcttttcttcgtggtgaattgggcgtcattcatccttttggcatggtttga

SEQ ID NO: 48725 - DNA, 5566 bp, Oryza sativa
  Clone ID: PAT_MRT4530_51372C.1
ttgcgtctccccccaccaactagctctccggcaccaggtagctctctctctctctctctctctctcgcgccgccgctacgctcgccgcgccgccgcgggtggggagatttgaccggcgttgactccgggatggacgggcggttcccgctgccgccggcgagcggaggggggcgggggcaccaccggcgggcgcactcggagacgttcctgcggctgcccgacgcggacctcctcctcgacccggagggggacttctccttctccgacctcgacttcccctccctctccgacgactccccggccatctccgacccgaccccgccgccgccgccgccgatggctgcgacccccgcgccggcgccgcggccaccgggtggggcgcacatgaggagcctctccctcgacaccgccttcttcgagggtttctcgttgcagggtgggggaggaggaggaggaggaggagggagtgggggaagtggtgggcataagaggagcgggtcgatggatggggtcaactcgccgttcgagggtgagtcggcgctctccggtgggctaccggactacgcgaagaaggccatgcccgcggagaggatcgccgagctcgcgctcatcgaccccaagcgcgcaaagagaattctggcgaacaggcagtcggctgcaaggtccaaggaaaggaagatcaagtacactagcgagctggagaggaaggtgcagacactgcagaccgaggccaccacgctgtctgcacagctcacgcttctccagagggatacatctggtttaactgccgagaatagagagctcaagctacggttggcagtccatgggaagagcaagctaactaccgtgatgctctggaatgaagctctgcgagaagaagttcagcgacttaagatagcagcagggcaagctccaaacatgaacgggaatcccttcaatggtggactccaacagcagattccgccctattacacgcaacagcagcagcagcagcagcaacagatgccttatttaggcggccaccatgctcagcaacgccatccaagccatcagcagagctcatcaaatggcggccagtcgctgagtggtcagtccctaaacgactccatggatttcatgtgaggagaagaaactcgggggcccctattaaaccatataccaactgcagctcagcattgtaaagatagctaatgtacaatgtaatgcatatgaatcattgaatagggtagctagccgttctttgtaccagtaaacgcggtgtaagggcggtcagaccggcgtcagcgacaagcgacaggagctgatctcggcggtcagaccggagatacaatctcggtcagaccgacggcaaccaggcgatcagaccggcgcaacaccttcggtcagactgcgatccgtcgaatttgagggaacaaataacataaaagagcttcgtcgagatcttttcaaaaaggagtacattaaatttgagatgaaacctggagaagctttggatgactatctttctaggtttaacaaaattttgagtgatcttagatctgttgattcttcttatgatgttaattatacacaatatgagatttctcaccactttttgaatggtcttgatatgtctatttggaagatgaaagttacatctattcaggagtccgttgatatgtctactttgactttggattcgctttacacaaaattgaaaacacatgagatgaatattctttctcgtaaagttgattctaactcgagtgttttggtttcttcctcaacttctttggatgttgattcttcttcatcgaagtcttccgcatttgctttgtttaatgccatgtccgatgatcaactcgaacagttcgtggaggaggacttggttttgttatctaacagactttctcgagctgtgactaatcttgggagagcgaggggggaagataatggtgatgagaagaccaatgacaacaagccgaagggtacattcaaagggaggaagatcaaggagaatctcaagaaggcttttgatcaagtctacaccgcgtttgagccactaagcgatgtagatggtgagagtggagatgaagataagggaaataacatctccggtgtttgcttcatggcgcgtggtgaattagattcagagtgtgaagacaatgaggtaagtgctcttgaggaagccattaatattttgagtgcaaaaaatatgaagtgtgagaagttgtatagaaaacaggagtttatcattgaatctcttaattctgaaattgctagattaaaatatcttattcctaatgatgatgattgcacaaattgtgaggttttaatgaatgaaatttctaaaattagagatgttaatgctgcacatgatttgaaaaatagatcttctctagctcttagttttgctttgcacacacgcactttggatgagttgtgtttaactaaaaagttattgcaaaaatatcaaattgcttttcatgctagtttgatgtttaacatgatttgtgctaaaaagttaaaacaacctcatgatgttttggattgctcaacatgtactttgaataagttgaaattaaaagatgctttaggtcgtgttgggtacatggaagatgttgtgaaaaccaatgaagtgctttcttgtcccaagtgtggtaaaagcaaaggtgtcatggtagattctgaaaattgtgctaatttggaaaaagaggtttcttatttgaaaaattctttgcaaagattttctgatggtgttggtgctagaagtggtgagattttggttaaacctgatactaataaaactgtgtttaaatctgctggttttgttaaggtaaatgagaaatttgaattgaagaatgtagctttggttgaggacttaaagtataatttgctttcggtttcacaaattgttgatgaagattttgaggttcactttaagaaaactggaagtaaagtttttgattcttgtggtgattctgtgttgaatatttctcgctatggaagagtgtttaaagctgattttgataatcctgtttcacctgtgataacatgtttggttgctaagtttgataaagatgtgatgttttggcatcgtagacttggacatgttggttttgattatcttactaggttaagtagtttggatcttgttcgtggtttgcctaaacttaagaaagatcttgatttggtttgtacaccgtgtcgtcatgctaagatggttgcttcttcacatgctcctattgtttctgtgatgacggatgcaccgggacatctattacacacggacactgttggtccagctagagtgcaatctgttggaggaaagtggtatgtgttggttattgttgacgatttttctcgatattcttgggttttctttatggcaactaaggacaaagcttttcaacactttcgtggtttgtttcttcgattgaatcttgaatttcctggttctttgaaaagaattcgaagtgataatggtggtgaatttaaaaattcttcatttgaacaattttgcaacgaaagaggtcttgaacatgaattttcttctcctcgtgttcctcaacaagacggtgttgttgaaaggaaaaatcgtgttttggttgagatgactagaacgatgttggatgagtatcacactcctagaaaattttgggctgaggcggttcaaggggaggatggtcatatttttgaatacgagagcgacaacgatgacgacgaagtcggctcggccggtcagaccgggcgccaggccgatcggaccgccggcacacctccggtcaggccagcgcatgacgtgcggtcagaccggccagggtcatcgggttcgggtactattgatgctgatcaagatggacctccagagattacaacttcgaccagtactgatacagaacgtgaatcaacttcagaagtcgctgctcctttgcacattcaacgacgacatctgccggaacaaatcattggtaatataggtgagcggactacaaggtctaaggtaatgactcatgatgtttgtgcaaattctgcatttgttgcttcttttgaacccaaagatgtgtcacttgcattaactgatgaatcgtggattaatgccatgcatgaagaacttgaaaattttgagataaacaaagtttggactttagttgaaccaccttctcgacataatattattggaaccaagtggattttcaaaaataaacaaaatgaggatggtttgattgtgagaaataaagctagacttgttgctcaaggttttaccaaggtggagggtatggattttgatgaaacttttgctcctgttgctagaattgaggcaattagacttttgttggcttttgctgcttcaaaaggttttaaattgcatcaaatggatgtgaaaagtgcttttctaaatggttttatacaggaggaagtttatgtcaaacaaccaccaggttttgaaaattctgattttcccaaccatgtttttaaattgtctaaagctttgtatggtttgaaacaagcacctagagcatggtatgatagacttaagaactttttgcttacgaaaggttttacaatgggaaaggttgacaaaatgctttttgttcttaagcatggtgataatcaactttttgttcagatttatgtgtatgatatcatctttggttgttcaactcacactttggttgtgaagtttgctgagactatgcgcagggaatttgagatgaccatgatgggtgagttatcgtacttcttgggattgcaaattaagcaaacacctcaaggtacttttgtgcatcaaacgaagtacatgaaggatcttttgagacggttcaagatggagaattgcaagccaatttcaacaccaattggttctacaactgtgttggatcctgatgaagatggtgaagctgttgatcaaaaggagtatagaagtatgattagatctttgttgtatctaactgcttctaggcctgacatacaatttgctgtgtgtttgtgtgcgcgctttcaagcttctcctcgtgcttcacatcgtcaagcggtcaagcgaataatgaggtatttgaatcatacacttgagtttgaaatttggtattctacttcatcttctatatgcttaagtggatattccgatgctgattttggcggttgtagaattgataggaaaagtactaatggaacatgtcattttcttggtatatcattgattgcatggtcttctaggaaacaatctagtgttgctcaatcaactgctgaatctgaatatgttgttgctgctagttgttgttcacagattctttggcttttatctactttgaaagattatggtcttacttttgggaaagtatctctcttttgtgataatattagtgctattaacattgctaagaatcctgttcaacactcacgcacaaagcacattgatattcgttttcatgttttgagggatcatgttgagaagggagatgtgatattgcagtttttggacacaaagttgcaacttgctgatatttttactaaacctttggattctaatcgttttgcttttcttcgtggtgaattgggaataattcatccttttggcatgatttga

SEQ ID NO: 48726 - DNA, 508 bp, Oryza sativa
  unsure (1)..(508): unsure at all n locations
  Clone ID: PAT_MRT4530_51373C.1
cccacgcgtccgagaacatcagaaatgtcagctgttggtttactgccagcagcattacagggtattgacatcaaggaaatgctagttggtgctgcacanatggatgaggaaactaggaatactgagattaaggaaaatccagcagccttgcttgcattgtgttggtattgagcatcggatggaatagggcagtaggttagtagtcttcaacttgatcagttattatggctcattcgctgttccttccaagttcctttcatgtccatgcatctgcatgcattgtgactgctcgtgtgtttaggcttatccttagtncttacgatactaattgctgntcttggatatggctgtatagccatacaaggatagcctgcttctcttgagtagatactngcaacaactngtcatggaatctcttggacaagaatntgaccttgatggaaatcgggttaatcagggactaactcgttatggtacaaaggaagcacagaccagcatgcctacattc

SEQ ID NO: 48727 - DNA, 891 bp, Oryza sativa
  Clone ID: PAT_MRT4530_51374C.1
gtgcatccgctgcgctgtgctgccatttctcttcagcttaaaaagcgagccctaccatttcctctctctcttcttgtcatcctcctcatctcttcttcctccctcgtctcaccaacagcgaggtgactgagagaagctagcttgggagaataatccatggcaggcaagatgtctacaattgtgatgatggtggatcttgaatgtgacagatgctacaggaagatcagaagggtcctctgcaagctccaagataaggcgagcatcaaggccatctcgtacgacgagaagaacaacacggtgacggtggcggggccgttcgacgccgacgaggtctcggacaggctctgctccagcgccggcaaggtcatcaccgacattcgcgtcgtcggtggtgccaaacccatgccaggcggcggcggcggtggcgccaaggcgcacgccaacaagccggccgggaaggacggcagcgcaggcggcggcggcggcggcggcggaggaaagccggagatgatcaagaagcacgtcaagttcgagatggcggacgacatggacgacggccgccaccaccaccaccacgacaacaggaagccgaaggtggtgacgaccaccaaccacgccgccggcgccctcgcgcggatggagggcccgccgcgccgaggcgccgagcatggccatggcggcggcgatggcgccggcgcccatgccgatgacggtgcaggcgacggccacgccgtccatctggccggcaccggcgccatcggcgccggcgccgctggagtgggggcacagcgccccgacgcatatgaaaataacatgaccaaaaatgttgtaaccaaagcttttgtaatattatggtttgtttatgaaactattcagatctataagatatag

SEQ ID NO: 48728 - DNA, 2082 bp, Oryza sativa
  Clone ID: PAT_MRT4530_51375C.1
atgctccgccggcgccaccacctccccgccgtcctccgcctcttctccacttcctgccgccgcggccaccccacgcagccgccgcagcatccgagccccgccccgctcccgctcccgccgccggtggcgaagaaggtccccttcacggcgtcggcgcacgggaggtcgtggagcgacccctaccactggatgcgcgacacctccgaccccgacctcgcggcgctcctcgaggccgagaacgcctacgcggacgccttcgtcgactccgccggcgagggcggcggcggcctccgcgcgcgcctcgcggccgagatgcgcgcgcggctgcccccttccgccgcctccccgcctcagccctggggcccctggttatattaccagtatgttccagagggtaaggaatacccagttttatccagaagattgaggtcttctggtggtctagcaagagctgcccttgatttcatttctggttcaaaaaaggagcaggtgttgcttgactggaatgagattgcagaaaaatttggtgtgtgctatatttatgcagtattgtctggactctgcatgcttaacaaattaagctactcattactaatcatcatagtgtacgtgatggagtctggtcatgtaagaggtggcttatggcccgtacagaaacgttctgacaaagtgcagtactttctggagcatcataatgggtttttctacatccttactaatgcacccttagaaggtactgaaacagcaaatggtggttactacctggccaggtgcagagctgaaaagtcagaaatggataaatggcaggttgttgcactccctggatcatattatacctttcaggatatggacatttttcatgaacaattagttctatttattcgaaaaagcggtcttcctcttatttgctccatcaatttgccaattgatgttgactttcaggagcaaaaggaacttgatgatcttgatccatggtttttccctgtaccgtcagacttatgcagcattgttcctggatccaacaatgacttcatgtcatctacttatcgtctggttttgtcatcaccagtgcttccagacttaacagtggactataacatgagaatgaggacatttgcaatccttcaccaagaggaagtaactggcctttcctcaaatctatgcacagttgggctgcaatccaatattacaggcatccaacaaaaccttcagcttattgaagactcacagagttggagtgatctatccaagctattttcttgtgaaagggtccaagttatttcacacgatggtgtctcagtacctttagtgatcctgtattcacgggaagcacatcgtcgtggagaatcacctggcgtcttgtatggatatggagcttatggagaagatctggacaagagctggtgttctgataggttaagtctgcttgctcgaggttgggttgtcgcatttgcagacgttaggggtggtggggattcatcatggcatcttgcaggcaccaaagctaacaagataaattctatcaaagattttgctgcatgtggtacacatctcatcaaggaaggatttgttcacaaaaatagactttgtgctataggttgcagtgctggtggcctgttggttggtgcagtcatcaatatgctgccggatttattttctgctgcagttctaaaggtcccttttcttgatatctgcaatacaatgatggattctactttgcctctaaccatcttggattatgaagaatttggtgaccctaatatctccactgaatttgatactattcgtagttattctccttatgacaatttatctcctgacatatgctacccaccggttctggtaactgcctcatttaatgatacaagggtaggagtctgggaagctgctaaatgggtttcaaaagtgagagatattacatgccaatcctgttcctggtctgtcattctcaaaactaatatgcaaagtggtcattttggtgagggtggacgcttcatgcattgcgatgagacagcttttgagtatgcatttctcatgaaagccttggggttggatgacaatgacagctgcaaaatagtgtga

SEQ ID NO: 48729 - DNA, 842 bp, Oryza sativa
  Clone ID: PAT_MRT4530_51376C.1
tgggtaatgagaagaggagcaaatctcccatcttcagatttgaatcttactggcttaaagttctaggttttctagaagtggttcaacactcttggcaaaagccgattttgtcgtctaaccgactagccatctttcgcctaaagcttcggcgtttagcccgtgaccttaagagatggagccgctgcaatgtgggagacatcaaattgcaattggctgttgcagctgaagtaattttccagctggagctagctcgagaatccagatggataaactggatcactcatatcctggcaacatcctcttctcaggtcctgctaaatggttcgcctggtcactcgatcaaccatgctagaggactccgccaaggcgaccctttgtctcctatgctcttcattttagccatggaacctttccatcgaattcttaaagcggctgaagatgcttctgttcttcaaccggtaaatggacgcaatgcaagattcagatgttctctttatgcagacgatgtggcaatttttgcaaatccagatagtgccgaactgtcttccctctcacagttcctggatttctttgcaaaaatttctgggctccatccaaacatcaacaaaacagaaatctttcctattagatgtgatgagatagatttgaacaatcttctttcaagtttcccggggatgattaaatccttcccttgccgataccttgtacttcctcttcactatcgaaaactaaggaagattgatttcatcccgctaattgataagattgggtcacgtctaccgggatggaaggggcggttcttcacctctgctggccgtaaaacccagtccattcggttctaa

SEQ ID NO: 48730 - DNA, 326 bp, Oryza sativa
  Clone ID: PAT_MRT4530_51377C.1
atgcagctcaacccgaaagtaagaactcgtcgaaataaaactaaagcaaaaaggtggcgatgcgccgagattgtattgaacgtgactctatccatgtgcggcaatcaccttgaagcacctcaattcaacccgatgtcatacatcaagttgcattgtcggaatcggctgcatcggcttacctagtccgactcagacccagccgatcctaatcgtagccgatctggactccagccgattcctgctctgtttccgaactcgatctccgcctccgactttgcttcgatctaatcttctttcccgatgccgatattaccaaatttggttgt

SEQ ID NO: 48731 - DNA, 231 bp, Oryza sativa
  Clone ID: PAT_MRT4530_51378C.1
atgggaggcggtggccttatagtaggtggtagacacgggaggatggtgaggtgccaacacggcgttagagccatggggatgaaggatgatgcggccgacaatggaagatccggcaatagtgagaaaccgaagatgaggaagacgacaggaggtgggctcctcaccatcggtggcttcaggatgaggagagggaggaagggggtcttctctggtgctgttcgtgccttctag

SEQ ID NO: 48732 - DNA, 234 bp, Oryza sativa
  Clone ID: PAT_MRT4530_51379C.1
atggcagcgtgcgccattttttcttttgctaggtttttcacaccagtgacgggttgcacgctatgtctttcaattttttttgttgggttaaagacatcactgacgggtcacaatataaggtgttggtcaccactgacggaccttcacccgtcaaagatgaggacagtcatcagtgaccacttatctctgaccagggccaaatccgtcagagcgttaatcaaaggtgacaagtag

SEQ ID NO: 48733 - DNA, 480 bp, Oryza sativa
  Clone ID: PAT_MRT4530_5137C.1
atgaaggtggccatcgccggcaacgtcgtggtggcggtgctcttcgtcgccgtcatcgtctggcggctcttcttcttcgggggtagagatcgagccggcggcgcggcggcctccgccgccgccgatgcggacggagagtcgtcctccgccgggagctcgccgtgcgcgtcgcctcgggcgggcggcggcctggggagagaggacctcatggcgctgccggtgtacgtgcacggcgcgtcggcggcggcggacggcggcgccaaggcggaggagtgcgcggtgtgcataggcgagctcagggacggcgacaccggccgtctcctgcccaggtgcgggcaccgcttccacgccgagtgcgtcgacaagtggttccggtcgcacgccacatgcccgctctgccgcgccgccgtcgccgccgcggacggcgactccggcggcgagggcgacaccaaggtagcggttgtgcagcaagacgtgtag

SEQ ID NO: 48734 - DNA, 325 bp, Oryza sativa
  Clone ID: PAT_MRT4530_51380C.1
atgcagctcaacccgaaagtaagaactcgtcgaaacaaaactaaagcaaaaaagtggcgatgcgccgaaattgtattaaacgtgactctatccatgtgcggcaatcatcttgaagcacctcaattcaacccaatgtcatacaccgaattatactgtcagaatcggctgcatcgggtcacctagtccgactcagatccagccgatcctaattgtagccgatctggacttcagccgattcttgctctgttctcggatcaatctccgccttcgactccaccttgatctaatctccttttccgatgctgatattaccaaatttgatcgt

SEQ ID NO: 48735 - DNA, 345 bp, Oryza sativa
  Clone ID: PAT_MRT4530_51381C.1
atgtcatggctgacgcagtcgctgtcgaagtgtcgataccgcgcgggaaatcagaagcctgccgcctttgcgcctgcttgcctccagcaggctccggtccgcagtcccgacgacggtcggccgcgcgtgcgcctcccctgcgttggcctgttatccccgccgcgcctccccttcatgtcgacccgtagtcccggcgacattccgcggcgcacgcacctccccttcgcgccgccgcctgctactcccctgcgtcgcgtcgccgtgcctccccgtcgcctgttcgtgtcgccgccgcttgctcgtgccaccggcacggccaaatcctctagccctaggaattcctag

SEQ ID NO: 48736 - DNA, 690 bp, Oryza sativa
  Clone ID: PAT_MRT4530_51382C.1
atggcgcggcggcaggccactcctgtcacgacacgtgggatgcgttgctggtctgcagctgctgcggaagtagtaatagatgaggaaatgcccaccgatttttccagattgtttgatttcttcttgccctgttgttgtggccttgataagatccggacaatcatgtgttctaaaggtattgggttagcatcatttaacaccagcataagcaaattttggagcgatgaggagcttgtccgattcttagcagagaggaaagaagcacactctctgccagagaatgtatttgtgggaatgaacatttctctcattgatccacgtaactcagatgatccacaatcccctaagaatggagaaaatgctattataaagtcaaaaaccggatactggaaagttgttggcactgttagaataccgacaagtactgttattgtgggtatgaaagtttctctggaccattataaggcgaagcaccatctgaatgacgaagctaatctaccacaggactacaagaatttgtgtacaatattctttcagggagacgacatattaaatgctggagataagcagatatgtctgaatgcaaatgttcctaatgaacgcaaggaattttaccttcaatatcttgctgaactagaagagcaaaatgctgcatggagcaaccagtgtaaagtataccttgatccatga

SEQ ID NO: 48737 - DNA, 336 bp, Oryza sativa
  Clone ID: PAT_MRT4530_51383C.1
gttgcacacatatactagtactatataagatccaaccttccattaagttagcagacaatgagacaaactttacaatgcccccaataggagatgagaagaatctgataaaggcacactgtcagtctaataagcacaaatctataaagagattggagcacaacactagggagaagaagggaaaggaacaaaggaaagaaaggatattgagccacaaaggcgtgttgccccctgcacgaagaggagaatgctgaagagaaccataactttatagcgctgcttggacactggagttagatcctctccctctgattctcagagttgcggcttgaagcacag

SEQ ID NO: 48738 - DNA, 908 bp, Oryza sativa
  Clone ID: PAT_MRT4530_51384C.1
cacactttcatctcaagcatgggaatacatagaaaaatacacttaagacgaaagtgattctaaattacaactacttcatagttacataggccgaccagccaaataaatatatagaatagcggaagcttgactacccaatcctcaagcacaccgactagggatttaccccattaagttcaagtcctagaagagcttcctatttaccccgacgtgatacaacagtattgtgcctcgtggtgggttgccgttgtgtccgccaccacggcgttaagtttaaggcgtgggcccgccacttaacggttctaggtcatataacgtgtatggcttaagatggagtaacacgtatcgtgctggtgtaaggctaaatcatgaattttggaacagctttgttgcgggtaataaatcgggtacttatgtatcgcgtatcgtgctggtgtaaggctaaatcatgaattttggaaaagctttgttgcgggtaataaatcgggtacttatgtatcgcgtgccatgctcttgcatgattattatttcgcatcatgtgggtaaagtgtacaaactctgcagagttaaaactaatcgattagccgtgctcgcggtcatgagcggcgtgtggatatgtattgagtatagacttgtgtttattctcctaaatgctgaaatttaccttcaaattgtgatgagatttgagaatgatctccttgctgccatggatggcaatgaggtgaatatttatacatgattaatgcctactttgatgcccatatgctaagtactagcttgctgaaattttatttgaaagcaaatccgttttgaatgtgttttatgcaaataaaacttgctttatgctaaaaagaaccatactatgccttccttgattatataccttgcaagtagggtgttaggcttgt

SEQ ID NO: 48739 - DNA, 625 bp, Oryza sativa
  Clone ID: PAT_MRT4530_51385C.1
gtgcgcttccatccaaagctgccgccgagtccgattttgattctaccccgggtgaatcgcaccatgacttaccgcacggttgaattgaagataaacagtggtttcccatctcacaattcaaaccagtcaccgccaagccggccgttttaaccctcgccgccgccgcgcgtcgtgcccggattggcgctaacacgtcgccagccgtttctacccgcggtcaagtcaatccttcgccgcatactaagtcctaaccgaagccctgcgtcgagctttacctcgccgcaccgagccgagcaccgtcgcccctgctctgctctgttcttcgccgccgcgaagtttttccggccgcaattcttcatctcagcttatctcgccgctagcccatccacacaccaaattaacccctccgccgccactctccgtcgccggagaaccctagctcgctcccctcctcggccgcaaccccttttctcctctatcgccgcctttggggaacggctggaggttgaagaagagaagattgagagagagagagagactgacaggtcttgaggattcttctgacatactagataatatcagtcaatctcaggacattgagcaaggcaagttactatataccttt

SEQ ID NO: 48740 - DNA, 540 bp, Oryza sativa
  Clone ID: PAT_MRT4530_51386C.1
gcgtacttttttttacggcgtgggaggacaagaagtgccccggggggtttttctatcctgcacaggggaaggttgagacaccataacagctcgtgacccgatgcaggagcaccatttacaatcgatacgccacgattcaggacaaggaaagtttacgttcggaccaacagctgccgatgcgctctgcatgcagatgtctttgcacacaacgctgaccgactacaacactgcttacatgttgatgctagacctagaacttcgacgggactgccggttaatgacaccctccctacaggccctacgcctatcgcgcgatcgagacacgatgatctgcccatagttacatgctcggatgcaccccacggctgtcaacgatcaatttgaaacgtgcggacacagcaaccagctgagttcccatatggagatctagaactagaggtcgagatatcattttctcttaacatgggcgaacaggaagatcagagtttacgaggatagcccctttggcgctggatattgccccacgttattgttctggac

SEQ ID NO: 48741 - DNA, 474 bp, Oryza sativa
  Clone ID: PAT_MRT4530_51387C.1
tcacgatatcgccggaggggttgcgcttgcgccgctgggtagaggttggtgggagagcggcatcggcgagatggcaaccgctgctcccgccgcggataaacgcatccggcaaccggcatcgaacgttccgatcatggcacagagctttgctccgacaagagctaagctcggagctagtaacacagtgtcagtggccctgtgccgaaccatggacaatgatgatggccttatcccctctggtaaccagacagtgcgcttggactgaactgtttctggccatctcaagtaaagggcaacatagcaggacaccatgacaaaacaaaacaagatagcatagaagagagcaaccttgagatcccgcctggaggcgatgtgagggctgggcgagaagacggcgagggcggcggagtatgactgcgccgaccggatctggtgctctctcagctgctccaccagcttcgctcgagtgatcat

SEQ ID NO: 48742 - DNA, 726 bp, Oryza sativa
  Clone ID: PAT_MRT4530_51388C.1
gtccatgtgtctcagacctttgatttggataaaatagtgaacacaataatttcacatgttgcatatccagaaaaggagagctttatttcagatattcagttgatgagaaaacgccttgccggtctactagaaggccgaaggattttgattgttttagataacatatgggagagcgaccaatttaagctggacaatttgaagattatgttaaatgttggcaagaagggcagtgaggtggatgtcatagttaccacacgcacagaagaaattgccaaaagaatttgcacagtgaaaccatacaagctagaaccattgaacgatgacatatgttgggctatcattaaaatatacagtgcctttgaaggtagaggtgataaacagcaggtggaggttatagggcaagagattgcaaccaagtgtggaggtatgcccttagcagctcgagcacttgggtacactttgtattccaaagcagttgacagatggctagcactgaacaacagtgaaatatggaacgaatgttcctctgaagaagcatctttaccacatcacttggtgcttccatccttgaagttaaactactacaacatgcaatcttatttgaggatgtgctttgcctattgtgccatctttccaaaaggtggcaatatcacaaaatacaatttgattcaccaatggattgctcttggtttcatcgagccatccatcacattctctgctgcatag

SEQ ID NO: 48743 - DNA, 744 bp, Oryza sativa
  Clone ID: PAT_MRT4530_51389C.1
atggacgagatcagaagcctgatgctgcagcaagggtggaggaagggcccgtggactgcgctggaggacaggctcctgaccgagtacgtgcagcagcacggcgaaggcagctggaactccgtggccaagctcacagggctgaggcgcagcgggaagagctgccggctgcggtgggtgaactatctcaggccggacctgaagcgggggaagatcacccccgacgaggagaccgtcatcctccagctgcacgccatgctcggcaacagatggtcggcgatcgcgcggtgcctgccggggaggacggacaacgagatcaagaactactggaggacgcacttcaagaaggcgaggccgtcgcggcgtgcgcgggcgcagctgctgcaccagtaccagctccagcagcagcagcagcatcgccagtatctccatagcctgaaccttctgcagcagcagcagcagcagcttcagcaacagcaacagcaacagcaacagcagatgatgttgctgcaggagcaggagcagcagagcccgcaggaggaggcagctgacgattccatggtgatgatgatgatgaacgatctccagagcaaggagcgttgctgcacggcggtctcggtggtgcccgacgactgcgtgctccccgccgatgatgatgcgatctgggacagcctctggaggctcgtcgacggcgatggcagctgcggcgaaggctcgagcgggggcgagtactgggctactagctaa

SEQ ID NO: 48744 - DNA, 1610 bp, Oryza sativa
  Clone ID: PAT_MRT4530_5138C.1
cgcggtggcggcgctctaaactagtggatccccgggcgcccggggggtgcgctcctcctcattcacagtccacacggccaaggcttgcacgaacgccatcagccatggggggcagccaccacctcttccgcttcctcgccgccgacgaccaccctttcttccccaccttcccaacctcctcctcctccttcctcctcgacgacacccacccatttttcttccctccctcctcctcatgcccactcggtttcacctctcctccttcatcgtcttgcccactcggcttcacctcctcctacgacctcgacgccgccttccaccaccatctcgacctcgacctcgaccttgacctcttcctcccaaccccgaccccacctgtaaccacctcctgccccgccctccgcgatcccttccttctccaccactccctcgcccaccgcgtctccgcgcttgagctcgccgccccacgcagcaagtacacctacgaggccgaatccgccggcaggaagatcaagtggaccacccacgacaagcccgacggcgaccggaccttcaagtgggaggcccagatcgacacccccaacgacgatggcttcgaccgcaagtggaagtgggagtccaaggcctccgccgccggcaccaccaagctcaagtgggccaaggaggtcaagggcaagggcttcctccacccatggtcgcacgcctactccgtcgaggaggtcttcggggacgacgaccaccaccacaaggcagacaagacagcagaaaacaaggtcaagcagcacaacaaggatacttctgccaaggaggagaagaagaagacgaacaagtctaatgttcagatcgttgagatcgacgacaacactgccggatgcgtcgccatcaacaaggcgtttgcaagcagctacgccaagggcaagagaaagcagctgtccccgcaggatgctgcattgttgatccagatgaactaccgggctcacctagcccaccgctcgcaagtgctgcgctgcctccgtcatctggcggtggccaaggccaagctcaaggacattaggtccttgttctacaacatctcttaccgccgccgcatttcgcatgactctgaagagcgtcagaggtttgccgacaaaatcattgccctgctcgccactgttgatgcccttgagggaccagactatatggttcgcaatgcaaagaggtctatgctggaggagctggaggggatgctagagatcgtaggtcctcagtcactagggaagccaaggactctgagccgcagaaagtttgagaaccatatctaatgatatgaggactggtgtcaagggcaagtgaaaggcaccatcagttctatttcgtagtgcggcgtatgaagatgcttgatgggggacctacctttctgaatgtgtttacggtttagacagaatgttgtgtctgtaactctagttgtatgatctatcttctgcttgaactagtacttatgtgttgctagactagttagagcttctttataacctcttggtgtttgaggaagcttcttgtagaaactgtttcataatttgtcatgaaatgatgtgcggcatgtgccccctaataaataagaccattaccat

SEQ ID NO: 48745 - DNA, 317 bp, Oryza sativa
  unsure (1)..(317): unsure at all n locations
  Clone ID: PAT_MRT4530_51390C.1
cacacgctcagtgaggcgatcgaggatgcagggcggcggcggcgcggcgtcggcggcggcggcggcggcggcggcggcgacgagcagcaccgggagctgctcgagcggtacgagctggtgcgggtgcgggggcgcggtanttcgcgcaggtttgggaggctcgccaccgccgcaccggcctcancttcgccgtcaagatcctcaacctcgccggacttctcgccagcggcatccccatccgcaaagtggagagggagatcgcggtgatnaggctnctgaaccacccgcacatngtggtttccacgaggcgatcgccg

SEQ ID NO: 48746 - DNA, 421 bp, Oryza sativa
  Clone ID: PAT_MRT4530_51391C.1
tttagcatccaactcaattttaggaccaaccaccacccaagcgctgttaaacaactgtgtaaatggcttgtccagggctgcgtaatgttcggtgggtgggaattgggtgggacccgagggatgacacaaatgtgtccaaaccaccaagggaacacaaagctgatgggcacccaatggatttgaacacgccacaagctgcctgaaatgacgggaactgcaactatagggataagcttgggtacgcactgcaaggtaacacaggtccaggaattccacacagggtcagacaccaacgcagtgccagcggcttgtaccaactcagcttccagctggaaagtaactgcacaataatgatgtggaagaccaaccaaagttttgggtggttacacacagtggatggtacttagtagtggtccccatg

SEQ ID NO: 48747 - DNA, 418 bp, Oryza sativa
  Clone ID: PAT_MRT4530_51392C.1
atcgccagggacaaagggcccctttcgtgacccaaaggctggagaaagcttcaaaggctgagtacaccaagaagattgacgcctacaacaacaagcaggtaatccccctcgtccacaactctgcacctgcaactgtcatgacacattgaaactgatctgttgtgcgtttctcgttgcaggcaggaggcccggctacctcaggcgactctggacaagtccaagtccgaggtgtaaacgacgaggacgagggcagcgtataagaccctccccctcccaaatcccggcaaaccacccggttgttcctcccaatttaaaccttcaattaaaatctgtttccttggggtggaacactccaacctggaaccttgttttttggttgtttttttgttgttaatggttccaaggggttggaaccgaa

SEQ ID NO: 48748 - DNA, 351 bp, Oryza sativa
  Clone ID: PAT_MRT4530_51393C.1
atgacgtcattgccgctggcggctcggcacctcatgcttgccggcgaacgatggcgcggcggcgcaaacggagggcaccaatgtgtagagcgcgacgcggcgaactcattgatggctcggacgacgacggacggtgacaatcaacgacggtggctaccagagaggtgtaatggtgcgggtttaatgtatgatttatcagctgctatatgtcgagtgcacaggtatagagtagtatttagtaaggtgatcaaccaccaaagttgggagagaatgagcataaagaatgaaaatatattttgcaagagatgggagaagaggaggagagcaagagggctgacgggttacatctag

SEQ ID NO: 48749 - DNA, 409 bp, Oryza sativa
  unsure (1)..(409): unsure at all n locations
  Clone ID: PAT_MRT4530_51394C.1
agccaaggtttctacattgagaaatttcgtccaggctctgattttcatcgcttaatttatcatctcgatcgtctactcggagataatatgtcgataccgtctcgggagatcatttttgtcttagggtcnaaaaggagaactgctccaaatttctcctgtctcgctgaacatagcaagatccaggccttccctttgtcacgcttgtacnaaaatggtcatgttgtcaagagttttgctaaaattgaagggctcatgtgagttataatgccctctagctgctctcgtgaggaaaatttctcgagtataatgtagaaatttgagaccaaatttcatgttcaaaacggtgtgggggaataatggattttccagtgtttgcgcccttgcggtccaaaaaaaaaaaaaaaaaaaa

SEQ ID NO: 48750 - DNA, 1003 bp, Oryza sativa
  Clone ID: PAT_MRT4530_51395C.1
cttcgtttcacaaaaattcatagctcacccaactctccctccccttcctctcgccggagtcgccgcggccctagccatcgaccggcggcggcggcggcggcggtagccgtgggatggacgaattcggcggcggatccgtcgggccgttctccaagaagccgaggcacctgtcccggtcgctgacgtaccaccaccaccaccacccctaccagggccaggggcgctcgccgtcgttcaacgcgcggcgccagcatcatccgcagcagcaggaccacgcggtggtgctgtacacgacgtcgctccgcggggtgcgccgcacgttcgcggactgcgccgcggtgcgcgccgtgctgcgcgggctccgggtggcggtggacgagcgggacgtgtccatggacgcctcgctgcggcgggagctccagtcgctgctcgcggcgcggggccgccccttctccctcccgcagctcctcgtcggggcccgcctcgtggggggagccgacgaggtgcggcagctgcacgaggccggcgagctgcgccgcctcctcgagggcgccgccgggcaggacccggccttcgtctgcggcggctgcgggggcgtccggttcgtgccatgccccgcctgcgacggatcccgcaaggtgtttgtccaggaggaaggatgcgcccgccgctgcggcgactgcaacgagaacggattggtacgctgccccaattgctgctcttgatcgcttagctttgtgcaccaataaatcttccatgttaatataaggattatagcttataggtaatagtagtagatagaggcaagaagggatgaacccttcttgatttcttggcctatggattgtatgtgattatgaccaatttgggtgcttagtgttcggcgtttggggattatagtgtatggatttgagcctatatgggtttgtatgtatcaaatgtaacaaatattctgcagtgcgtagtcctgctggtttgatcaatgtaaatagttgggtttggt

SEQ ID NO: 48751 - DNA, 9807 bp, Oryza sativa
  unsure (1)..(9807): unsure at all n locations
  Clone ID: PAT_MRT4530_51396C.1
atgaaacctagagaagctttagatgactatctttctaggtttaacaaaaaattgagtgatcttagatctgttgattcttcttatgatgctaattatccacaatctgagatttctcgccactttttggatggtcttgacatgtctatttgggagatgaaagttacatctattcaggagtctgttaatatgtctaatttgactttagattcgctttacacaaaactgaaaacacatgagatgaacgttctttctcgtaaagttgattctaagttaagtgctttggtttcttcctcttcttctttggatattgatgcttcttcatctaagccttcttttcttgctttatttaatgccacatccaatgatcaactcgaacagatcgaggaggaggatttggctttggttgctaacagagttgctcgagctatgaacaatgtcaggttcaggaaaagaagtggtccaaatcattgctttgaatgtggttcaattgatcatcttcgttcgcattgtcctaagcttgggagaggcaaaagagaagacaaagatggtgagaagaccaatgacaacaagccgaagggtacgttcaaagggaggaagatcaaggagaatctcaagaaggcttttgatcaagtctacgccacgttcgagccactaagcgacgtagatggtgatagtggagaagaagataagggaaagaacatctcgggtgtttgcttcatagcgcatggtgaatcggagacagaatgtgaagaaaatgagttaaaacaacctcatgatattttggattgctcaacatgtaatttgaataagatgaaactaaaagatgctttaggtcgtgttgagtacatgaaagatgttgtgaaaaacaatgaagtgcttgcttatcccaaatgtcgtaaaagcaaaggtgtcatggtaaattgtgaaaattgtgctaatttggaaaaagaggtttcttatttgaaaaattccttgcaaagattttctgatggtaaaaagaacctcaacatgattttagatcaatctaaggtggagggattggattttaatgaaacttttgctcctgttgtaagaattgatgcaattagacttgtgttggcttttgctgcttcaaaaggttttaaattgtatcaaatggatgtgaaaagtgcttttctaaatggttttatacaggaggaagtttatgtcaaacaaccactaggttttgaaaatcctgattttgccaaccatgtttttaaattatctaaagttttgtatggcttgaaacaagcaactagagcatggtatgataggcttaagaactttttgcttgcgaaaggttttacaatgggaaaggttgatcaaatgctttttgttcttaagcatggtgataatcaactgttcgttcagatttatgtggatgatatcatctttggttgttccactcacactttggttgtggagtttgctgggactatgcgcagggaatttgagatgagcatgatgcaaacacctcaatgtacttttgtgcatcaaacgaagtacatgaaggatattttgagacggttcaagatggagaattgcaagccaatttcaacaccaattggttctatagctgtgttggatcctgatgaagatggtgaagctgttgatcaaaaggagtatagaagtatgattggatctttgttgtatctaactgcttctaggccagacatacaatttgctattctttggcttttatttactttgaaagattatggtcttacttttgagaaagtacctctcttttgtgacaatacaagtgctattaatattgctaagaatcatgttcaacactcacgcacaaagcacattgacattcgctttcactttttgagggatcatgttgagaaaggagatgttgtttgtacgaaaaaagtttctcatccttatttgattcctgaagctattaatactgctgctgaaaaagttgcttttgaacaaaattgcaaagcccgcaacattcttttgagtggtatttctcgttctgattatgatcgtgttgcgcatcttcgaactgctcatgagatttggaatgctttgagtaactttcatcaaggaacaaataacataaaagaacttcgtcgtgatattttcaaaaaggagtatattaaatttgagatgaaacctggagaagctttggatgactatctctctaggtttaataaaattttgagtgatcttatgattctgacctgcaggcattcannnnnnnnnnnnnnnnnnnnnnnnnnnnnnnnnnnnnnnnnnnnnnnnnnctggggcagcttcttcttcttccaccacacgaaccttagatgccaactggtagcgagggacaaaaagagctctcttccttgcggtaagacgaaccctggccttctgcggtggtgcttctcccttcaatgcggctaattccttctccaaacgatccaccttgtcctccagcttgcaaatcttaccacgattccggtcttcgcgatcttgggctgctaacacaatctcagcgcgggtctcatccatggcccacagcatctcaaccaaatgccttgtggtagcatcattctcaattcctgcaagttcaaggtagctgccacgaccacttccctggggttgacgaggatggtagcgatactcggtgtcggccaactgatcattgtagcgttcgcggagctctcctatggtaatccttgccacctcctgacaagcatgaatacagtttccccctccagcctcgaacatcactgatgggatatcttcaggattactgttcaaggtgaccttgacccgacacttctcttcatcacgatcatgaggaatctgggcatacaaaggggcagtcccgaatcctatgaggaaagacatcgtacgcaactccaggacaaatccctcagtaccgaacaagtactcaggcttgaagcgtggcatctaaagacaagtgaaaggagggagttaagatatttatccaatttagaaaatcaaagtaaaaggtaaataaataaagtaaaccaatctttgcaagataagatgaaacagttgaaaacaagagtacaaattttggacttttgaataacaggtttcaaaagaaatgaaataaaagagagttataatatcaacatgctaagtttattgcaacaagattaattaaaacaatgttttaaaacctttgctcgtaattgggccatcagtacagtaatagatgtatagtactaataagacaggaataataaataaattttgaatgagaacaattaaagggactataactgcatgtgccattagcttggtttaattaaaagagagagaggagaacagttctactttttcaatatttttagagggcttctatgggtaaccatttggcataacctagggtcaaggaggctctcataccaacttgtcacgcccggaatttctatccaaaattccaaatgcttatatgtgtgtaaaccctcgtccaggaatcagccgaggcacacaataacaaattgataatagagtaaaattattactctaattaataaagcgaatataatgtcattacagaggtagatagttcctctcaaccaataaagatctaagcaacggaaaataaaataaacggcgcagacgactccatcccaaattgttgaggattcacaaatttgctttggttgaggatttaaagtacaatttgctttcggtttcacaaattgttgatgaaaagtttgaggttcattttaagaaaactggaagtaaagtttttgattctcgtggtgattctatgccgaatatttctcgttatgcaagagtgtttaaagctgattttgaaaatcctgtttcacctgtgataacatgtttggttgctaagtttgataaagatgtgatgttttggcatcgtagacttggacatgttggttttgatcatctcactaggttaagtggtttggatcttgttcgtggtttgcctaaacttaagaaagatcttgatttggtttgtacaccgtgtcgtcatgctaagatggtttctacttcacatgctcctattgtttctgtgatgacggatgcaccgagacagctgttacacatggacactgttggttcggctagagtgcaatccattggaggaaagtggtatgtgtttgttattgttgacgttttttctagatattcttgggttttctttatggcaactaagtacgaagcttttcaacactttcgtggtttgtttcttcgattgaatcttgaatttcctggttctttgaaaagaattcgaagtgataatggtggtgagtttaaaaatacttcttttgaacaattttgcaatgaaagaggtcttgaacatgaattttcttctcctcgtgttcctcaacaaaacagtgttgttgaaaggaaaaatcgtgttttggttgagatggctagaacgatatctaaacttggcaaaacttcttatgaacttcgatttggtcatcaatccaaagtttcacatttgcgtgtttttggttgcaaatgctttgtcttgaaatctggaaatttggacaagtttgaggcacgctctatcgatggattgtttcttggttaccccgcacatactcgtcgctaccgtgtacttattttggagactaacaaaatcgttgagacttgcgaagattcttttgataaggctagtccaggtactagacccgaaatttcaggtacattgtcacaggttcaaggggaggatggtcgtatttttgaagacgagagcgacgacgacaacgacgacgacgacgaggtcggctcggccggtcagaccgggcgccaggccggtcagaccggcgcaggacgtgcggtcagaccggccagggtcgtcggctgagggttctgttgatgctgatcgagatggtgagcggactacaagttctaaggtaacgactcatgatgtttgtgcaaattctacatttgttgcttcttttgaaccccaagatgtgtctcatgcattaactgatgaatcgtggattaacgccatgcatgaagaacttgaaaattttgagagaaataaagtttggactttagttgaaccaccttctggacataatattattggaaccaaaattgaggcaattagacttttgttagcttttgctgcttcaaaaggttttaaattgtatcaaatggatgttaaaagtatttttctaaatggttttatacaggaggaagtttatgtgaaacgaccaccaggttttgaaaattctgattttcccaaccatgtttttagattgtctaaagctttgtatggtttgaaacaagctcctagggcatggtatgataggcttaagaactttttgcttgcgaaaggttttacaatgggaaaggttgacaaaacgctttttgttcttaagcatggtgataatcaattgttcgttcagatttatgtggatgatatcatctttgattgttcaactcacgctttggttgtagattttgctgagactatgtgcagggaatttgagatgagcatgatgggtaagttatcgtactttttgggattgcaaattaagcaaacacctcaaggtacttttgtgcatcaaacgaagtatacgaaggatcttttgagacggttcaagatggagaattgcaagccaatttcaacaccaattgggtctacagctgtgttggatcctgatgaagatggtgaagctgttgatcaaaaggaatatagaaagttcttcgatttgtgtttcaccgggtttcggcggtctaaccggcggcgcaccggcggtcagaccggcagcgcaccggcggtcagaccggcggcatctcggcggttcgaccggcgggcacacggcggtcagaccggtggctacaggagtcagcaacaggcattttcggcggttcgaccgatcgatctacatcggtcagaccgacgttcatcaggcggtcagaccggcgcaactacttcggaaagtttctcatccttatgtgattcctgaagccattaatactgatgctttaaaaactgaatttgaaaataattgcaaagctcgtaatattcttttgagtgggatttctcgttctgaatatgatcgtgttgcacatcttgaaactgctcatgagatttggaatgctttgagaaattttcatcaaggaacaaataacattaaagagcttcgtcgagatctttttaaaaaggagtacattaaatttgagatgaaatctggaaaggctttggataactatctttctagatttaataaaattttgagtgatcttagatctgttgattcttcttatgatgttaattatccacaatctgagatttctcgtcactttttgaatggtctcgacatgtctatttgggagatgaaagttacatctattgaggagtctgttaatatgtctactttgactttggattcactttatactaaattgaaaacacatgagatgaatattctttctcgcaaagttgattctaaatcgagtgttttggtttcttcttcttcttctttgattgttgatgcttcttcatctatgccttcttttcttgctgcttttaatgccacatccgattatcaactcgaacaaatcgaggaggaggatttggctttggttgctaacagaattgctcgagctatgaataatgtcaggaacaggaaaagaggtggtccaaatcgttgctttgaatgtggttcaattgattatcttcgttcgcattgtcctaagcttgggagaggcaaaagagaagacaaagatggtgagaagaccaacaacaacaagcctaacaactacaagtcgaagggttctaaccaagggaagaagatggagaatcataggaaggcttttcaacaagtttgcgccgctttcgagccactaagtgatgtagatggtgaaagtggagatgatgataagggaaagaatgtctccgatgtttgcttcatggtgcgtggtgaatctgacacagagtatgaagataatgaggtttctattttgaaaaattctttgctaagattttctgatggtaaaaagaatcttaatatgattttggatcaatcaaaggtgttggtgctagaggtggctttggtggcaaggaaggagaacgtgtggatcgtggattccggttgttcgcggcacatgaccggtgataaaaattggttctcctccctcaaaaaggcatccaagactgaatcaattgtctttgctgatgcttctactagtgccgttgtcgctacaggtttggttaaggtaaatgaaaattttgaattgaagaatgtagctttggttaaggatttaaagtacaatttgctttcagtttcacaaattgttgatgaaaattttgaggttcactttaagaaaactggaagtaaagtttttgattcttgtggtgattctgtgctgaatatttctcgttatggaagagtgtttaaagctgattttgaaaattctgtttcacctgtgataacatgtttggttgctaagtttgataaagctgtgatgttttggcatcgtagacttggacatgttggttttgatcatctcactaggctaagtggtttggatcttgttcgtggtttgcctaaacttaagaaagattttgatttggtttgtacaccgtgtcgtcatgctaagatgatttctacttcacatgctcctattgtttctgtgatgatggatgcaccgggacagctattacatatggacactgttggtccagctagagtgcaatctgttggaggaaaagtggaaaatcgtgttttggttgagatggctagaacgatgttggatgaatacaaaactcctagaaaattttgggctgaggcgattaacactgcttgttatatttcaaatcgagttttcttgcgatctaaacttggaaaaacttcttatgaacttcgatttggacatcaacccaaagtttcacatttgcgtgtttttggttgcaaatgctttgtcttgaaatctggaaatttggataagtttgaggcacgttctaccgatggattgtttcttggttaccccgcacatactcgtggctatcgtgtacttattttagggactaacaaaattgttgggacttgcgaagtttcttttgatgaggctagtcctggtactagactcgatattgcaggtacactgtcacaggttcagggggaggatggtcgtatttttgaagacgagagcgactacgacgacgacgacgaggtcggctcggccggtcagaccgggcgccaggccagtcagatcgccggcacacctccggtcagaccggctcatgaggagcggtcagaccggccaggttcgtcgggttcgggtactgttgatgctgatcgagatggtcctccagagaattcaacttcgaccagtactgaaacagaacgtggttcaacttcagaagttgctgctcctttgcacattcaacgacgacatctgccagaacaaattattggaaatataggtgagcggactacaaggtctaaggtaatgactcatgatgtttgtgcaaattctgcatttgttgcttcttttgaacccaaagatgtgtcacatgcattaactgatgaatcgtggattaacgccatgcatgaagaacttgaaaattttaagagaaacaaagtttggactttagttgcaccaccttctggacataatgttattggaaccaagtgggttttcaaaaataaacaaaatgaggatggtttgattgtgagaaataaagctagacttattgctcaaggttttactcaagttgagggtttgggttttcatgaaacttttgctcttgttgctagaattgaggcaattagacttttgttggcttttgctgcttcaaaaggttttaatttgtatcaaatggatgtgaaaagtgtttttctaaatggttttatacaggaggaagtttatgtcaaacaaccaccgggttttgaaaatcctgattttcccaaccatgtttttaaattgtctaaagctttgtatggtttgaaactagctcctagggcatggtatgataggcttaagaactttttgcttgcgaaaggttttacaatgggaaaggttgacaaaacgctttttgttcttaagcatggtgataatcaacttttcgttcagatttatgtggatgatattatctttggttgttcgactcacgctgtggttgtagattttgctgagactatgcgcagggaatttgagatgagcatgatgggtgagttatcgtactttttggaattgcaaattaagcaaacacctcaagctgtgttggatcctgatgaagatggtgaagctgttgatcaaaaggagtatagaagtatgaatggatctttgttgtatctaactgcttctaggccagacatacaatttgctgtgtgtttgtgtgcgcgctttcaagcttctcctcgtgcttcacatcgtcaagcggtcaagcgaataatgaggtatttgaatcatacacttgagtttggaatttggtattctacttcatcttctatatgcttaagtggatattccgatgctgattttggaggttgtagaattgataggaaaagtactagtggaacatgtcattttcttggtacatcattgattgcatggtcttctaggaaacaatctagtgttgctcaatcaactgctgaatccgaatatgttgatgctgctagttgttgttctcagattctttggcttttatctactttgaaagattatggtcttacttttgagaaagtacctctcttttgtgataatactagtgctatcaatattgctaagaatcctgttcaacactcacgcacaaagcacattgatattcgttttcactttttgagggatcatgttgagaaaggagatgttgagttgtag

SEQ ID NO: 48752 - DNA, 5484 bp, Oryza sativa
  Clone ID: PAT_MRT4530_51397C.1
atggctactcctgttaggttttcaactaagcctcatgttttcgatggaacggatttttctcattggtgtagtaggatgcaatcttatattatggctgaagattatgatatttggagaaaagtttctcatccttatgttattcctgaagctattaatacagctgctgaaaaaactgcttttgaacaaaattgcaaagctcgcaacattcttttgagcggtatttctcgttcggattatgatcgtgttgcacatcttcaaactgctcatgaaatttggaatgctttgagtaactttcatcaaggaacaaataacataaaagaacttcgtcgtgatattttcaaaaaggagtatattaaatttgagatgaaacctggagaagctttggatgactatctttctaggtttaataaaattttgagtgatcttagatctgttgattcttcttatgatgctaattatccacaatctgagatttctcgtcactttttgaatggtcttaatatgtctatttggaagatgaaagttacatctattcaggagtttgttgacatgtctactttgactttggattcactttacacaaaattgaaaacacatgagatgaatgttctttctcgaaaagttgattctaagtcgactgctttggtttcttctacttcctctttggatgttgatgcttcttcatctaaaccttcttttcttgctgtttttaatgccacatccgatgatcaactcgaacaaatcgaggaggaggatttggctttgtttgctaaccatattgctcgagctatgaataatgctaggaacaggaaaagaggtggtccaaatcggtgctttgaatgtggttcaattgatcatctccgttcgcattgtcctaatcttaggagaggcaaaagagaagacaaagatgttgagaggacaagcaacaacaagcccaacaacaacaagccgcaaggttcatctcaagcgaggaagttcaaggagaatcttagaagagcttttgatcaagtctatgctgcttttgagccatcaagtgatgtagatggtgagagtggagatgatggtaagggaaagaacatctccggtgtttgcttcatggcgcgtggtgaatcggatattgagtatgaagatcatgaggtaagtgcttttgaagaagctattaatattttgagtgcaaaaaatatgaagtgtgagaagatgtatagaaaacaggaatttatcattgaatctcttaaatctgaaattgatagattaaaatctcttattcctaatgatgatgattgctcaaattgtgaggttttaatgaatgagatttcaaaaattagagatattaatgctgcacatgatttgaaaaatagatcttctcttgcttgtagttttgctttgcatacacgcactttggatgagttgtttttaactaaaaagttgttgcaaaaatatcaaattgcttttcatgctagtttgatgtttaacatgatttctgctaaaaagtttaaacaacctcatgatgttttggattgcttaacatattgtgaaaattgtgctaatttggaaaaagaggtttcttatttgaaaaattctttgcaaagattttctgatggtaaaaagaacctcaacatgattttgaatcaatctaaggtgttggtgctagaagtggttttggtggcaaggaaggagaacgtgtggatcgtggattccggatgttcgcggcacatgaccggtgataaaaattggttctcctccctcaaaaaggcatccaagactgaatcgattatctttggtgatgcttctacaagtgccgttctcgctacaggtttggtaaaggtaaatgaaaaatttgaattgaagaatgtagctttggttgagaacttaaagtacaatttgttttctgtttcacaaattgttgatgaagagtttgaggttcactttaagaaaactggaagtaaagtttttgattctcgtggtgattctgtgctgaatatttctcgctatggaagagtgtttaaagctgattttgaaaatcctgtttcacctgtgataacatgtttggttgctaagtttgataaagatgtgatgttttggcatcgtagacttggacatgttggttttgatcatctcactaggttaagtggtttggatcttgttcgtggtttgcctaaacttaagaaagatcttgatttggtttgtacaccgtgtcgtcatgctaagatggtttctacttcacatgctcctattgtttctatgatgacggatgcaccgggacaactattacataaggacaccattggtccggctagagtgcaatctgttggaggaaagtggtatgtgtttgttattgttgatgatttctctatatattcttgcgttttctttatggcaactaaggatgaagcttttcaacactttcgtggtttgtttcttcgactgaatcttgaatttcctggttctttgaaaagaattcgaagtgataatggtggtgagtttaaaaatgcttcttttgaacaattttgcaatgaaagaggtcttgaacatgaattttcttctcctcgtgttcctcaacaaaacggtgttgttgaaaggaaaaaccgtgttttggctgagatgactagaacgatgttggatgaatataaaactcctagaaaattttgggctgaggctattaacactgctttctatatttcaaatcgagttttcttgcgttctaaacttggaaaaacgtcttatgaacttcgatttggtcatcaacccaaagtttcacatttgcgtgtttttggttgcaaatgctttgtcttgaaatctggaaatttggacaagtttgaggcacgttctactgatggattgtttcttggttaccccgcacatactcgtggctatcgtgtacttattttagggactaacaatattgttgagacttgcgaagtttcttttgatgaggctagtccaggaactagaccagaaattgcaggtacactgtcacaggttcagggggaggatggtcgtatttttgaagacgagagcgactacgacgacgacgacgaggatgtgtggtcagaccggccagggtcgtcggctgagggttctgttgatgctgatcgagatggtcctccagaaattactacttcgaccagtactgatacagaacatggatcaacttcagaagtcaccgctcctttgcacattcaacgacgacatccgccggaacaaattattggtaatataggtgagcggactacaaggtctaaggtaacgactcatgatgtttgtacaaattctgcatttgttgcttcttttgaacccaaagatgtgtcacatgcattaactgatgaatcgtggattaacgccatgcatgaagaacttgaaaattttgagagaaacaaagtttggactttagttgaaccaccttctggacataatattattggaaccaagtgggttttcaaaaataaacaaaatgaggatggtttgattgtgagaaacaaagctagacttattgctcaaggttttacccaggtggagggtttggattttgatgaaacttttgctcctgttgctagaattgaggcaattagacttttgttggcttttgctgcttcaaaaggttttaaattgtatcaaatggatgttaaaagtgcttttctaaatggttttatacaggaggaagtttatgtcaaacaaccaccaggttttgaaaatccttattttcccaaccatgtttttaaattgtctaaagctttgtatggtttgaaacaagctcctagggcatggtatgatagacttaagaactttttgcttgcaaaaggttttacaatgggaaaggttgacaaaacgctttttgttcttaagcatggtgataatcaactgttcgttcagatttatgtggatgatatcatctttggttgttcaactcacgctttggttgtagattttgctgagactatgcgcagggaatttgagatgagcatgatgggtgagttatcgtactttttgggattgcaaattaagcaaacacctcaaggtacttttgtgcatcaaacgaagtatacgaaggatcttttgagacggttcaagatggagaattgcaagccaatttcaacaccaattggttctacagctgtgttggatcctgatgaagatggtgaagctgttgatcaaaaggagtatagaagtatgattggatctttgttgtatctaactgcttctaggccagacatacaatttgttgtgtgtttgtgtgcacgctttcaagcttctcctcgtgcttcacatcgtcaagcggtcaagcgaataatgaggtatttgaatcatacacttgagtttggaatttggtattctacttcatcttctatatgcttaagtggatattccgatgctgattttggtggttgtagaattgataggaaaagtactagtggaacatgtcattttcttggtacatcattgattgcatggtcttctaggaaacaatctagtgttgctcaatcaactgctgaatctgaatatgttgctgctgctagttgttgttcacagattctttggcttttatctactttgaaagattatggtcttacttttgagaaagtacctctcttttgtgataatactagtgctattaacattgctaagaatcctgttcaacactcacgcacaaagcacattgatattcgttttcactttttgagggatcatgttgagaagggagatgttgaattgcagtttttggacacaaagttgcaaattgctgatattttcactaaacctttggattctaatcgctttgcttttcttcgtggtgaattgggcataattcatccttttggcatggtttgagggggagacgtggatttctggtgcgaatccgttttggatttctggtgcggccggttgtttgctgcacgtttggaaacagcggatcacgagtggacttacctcccctcgtcgtgatcgccttaacattttcaatggaggagtcgggttgccccggaatcctcccagattcatttgcagggactaaagatgccaactgagctaactgggtttctatcatcttattaaagctcagttggttttgaaacgcggaagcaaagccatctagcttgacatttatgttttctaagaccttatcattggcagcaagctttttgcttagcgcatcagtggttttagcttgcgcaaaaacaagatacttcaaggagggctggttagagatgttggcagagggagcagcgaactcgcgaagagtcttgctgggcattgaattgaaggtcggtggcattggtacggctggtttatctgtcggtagagttttctgtggagcaatgactcgcggcctgacgctccggaagaaagcttctggattttctttgaagttttctggcaggttgaaaccagtcatgcactaccctgttttcacaataaaaagtgaaaacaaccaaagttagcctgcaaaggaaaatgattatacaaagtcgtatccaggtccatagc

SEQ ID NO: 48753 - DNA, 267 bp, Oryza sativa
  Clone ID: PAT_MRT4530_51398C.1
atggtgccgaaaaagctgctgcttcagctgttgctagggccgcttgacagctgctggcacgacggcgtgctcgacgtccactgctccatcggcatcggcatcacccgttccccacaacggcgccagccgaccgcctactctggttcccccgcgccgcacatatccatgggtgctgggttaggcggcggtgcgggggaggaagagggcggagcagtggcggcgacgcgagtgaaaagtgggcggtgcgcgtggttacggtggagttag

SEQ ID NO: 48754 - DNA, 1121 bp, Oryza sativa
  Clone ID: PAT_MRT4530_51399C.1
atggccggaggaggagatgagctgaagctgctggggatgtgggcgagcccgttcgcgctgcgagcgaagctcgcgctcagcttcaagggcctgagctacgactacgtcgaggaggacttcaagaacaagagcgagctgctcctcagctccaacccggtgcacaagaaggttcccgtgctcatccacaacggcaagcccatctgcgagtcgcaggtcatcgtacagtacatcgacgaggtgttccccgacgccggcgtcaccctcctccccgccgacccccacgatcgcgccgtcgctcgcttctgggcctcctacatcgacgaaaagctgttcggtgcgtggattccggtgttcagaggcaagacggaggaggagaaggcggagggggtgaagcaaacgttcgcggtggcggagaaactggagggagcactgagcgagtgctgcaaggggaagcccttcttcggcggcgacaccgtcggctacgtcgacgtcgtgctcggaggcttcgtcgcgtgggtgcacgccatcgaagaggtgttcggcctgaaccagttcgacgccgccaagacgccgctcctggcggcgtggttggagcgcttcgacgagctcgacgccgccaaggaggccatgccggacatcggcaggctggtcgagctcgagaagatgaggcaggcacaggcacaggcggcggacgaggggagacgagccaacggctcggattcgccgggggattcccgcctatggcgaattgcggcggcggcaaccggcggcgcggcagggcagcggacaagggcggcgcagacggcgcaggcgcggcagggcaggggccacgcggtcgcgcgcacgggcttgctctcctggttgcacgggacagaggagctgtgtggcgccaagatcttggacgccgccaagaccccgctcctgtcggcgtgggcgcggcgcttcggcgatatggacgccgccaaggtggctttgccggacgtctgcaagctggtcgagtttgccaagatgaagcgtgttcagctggaggctgcaatggcagctacaacagtttcccgcaactgaatgtgttgtcaggttgttgtgttgatgtgttcccacaagtgaataaaccgtacttt

SEQ ID NO: 48755 - DNA, 382 bp, Oryza sativa
  Clone ID: PAT_MRT4530_5139C.1
cggctatatcaccgagggacagatccacattgacaggcaaccacataaccgacagacctatccaccgaccaaagtcctccccccactctcccggcccacgaagagagccatcggcgaaggcacgactcgcagggatcaccctgatgtcccgaaccagccgcacgccaattacgccatacgcaaggacgcacaggcgacgaaggcagtggtcggagaggaagcgccgccaccagaggacccgctgcaccccgagacccccgacaagaccgagcggaagcccgggacacaaggagcatatgacacacgcaacatcccccagacgcctgacctcgcctgggcacaactgcgcacccctccccgaaagccgcctcaccgcacacca

SEQ ID NO: 48756 - DNA, 608 bp, Oryza sativa
  Clone ID: PAT_MRT4530_51400C.1
gaactctttccaaacaacataacatgcatggaacatcacaaacaatgggatatactcggtagcttcagcgtacaaagcacaatcccttggctcgatcaagagaaactatgaatggtcgatatggaaaccttaggcctcatgcaaatgcaaattctttgcctagctcatgtaaaatagattttgacgtcctacaggctagcggcaaggggatagtcaaacaaaacatattgtccactatatcagcgtgtcctaaaggcatcattccatcttctcgtagagtgaagatacacaataaggatctgaaacatgattgcaacttggatcacacaagaacaactcaaaccggcatcatggaagccaacgatgtttcatgagtggtgggaagttttggtcttgtgcaaaggagtgcccaaacaaggaacgcgaaccctcctactgctaacttattgggaaatatgggaaatatggaaagaaagaaatcaatgaatcttccagcataaagaactctcgatgatgtcgtttattaccaagataaaagaggaagggaagacttaggagcgcgtgggagcaaagagactagaggaaattttaccttaagccctgtatat

SEQ ID NO: 48757 - DNA, 1435 bp, Oryza sativa
  Clone ID: PAT_MRT4530_51401C.1
atggccgaccgcgtccaccccatgcccgcgccaccgctgccgtcctcgtctcctccgccgggacacgacgccgccaccgccgccgccgccactggcaccacgccgctgcatcccagcttccgcggcgcgccgccgccgtctccaagcacatacatcatccaaatccccaaggaccaggtcctccgcgtcccgccgccggaccgcgcggcccgcaagccgccgccggctccaccacgcgtgctgtgccgccttcagcgcgttcctcctcctggtcctcctcgccgccggcccgtggcccgcgttccaccaggcgccgaggaacgtgatggtgttctcgacggcgttgaccggaggaggcgtgagcttcacggaggagtagaggaagcggctcgatcggcgcggtgcccctgaaaatctcactagcaagcacagatcaatctcatcagttctttcttctcttagatgccctggttgactgcgaaggtcctgctgcagatggcacctcttgagcagcctcaactgcttcagctttagagcttctcaaactcctccttgtcatcctcgctgatgggcctgctctttcattttcttccaccagttcagatttgactcctctgcgtctagtcctcgaatgctggttggctgatgggacctgatcttcctcaggttcgttaacatcctcatcctcagcaccgtcatcttcaccctccaaccgaggccattcagtaccacaaccacaagctctcgaggcctttctctgcgaaaatttcttcttcaaacagtacccgtgaatccttacattgcatccctcattaggacaacatgatgcctcacatgatgggatatcattactacgtaaccaacttcggagatcaagaaatgatcgtatgccaagaccaatctttcctgtgggagtgtatgacagccaacgatcctgtatgagttcattaagagttttctccttttgggacaatgagaagttggtaatggaagtaggcagacgggattgactgccctgtgaagcgtctgcaattacaacctggttctcaatccgtgtgttaagagcatcgatatttgttatgctcccatcatttccagcttcatgaactattgcttccaacaatcccttgtagaatgcaatctgtggcacagaaaactttgatccaagctttgactcttcatcagcaatgttattgaccactccataatacacagtaccatcatactggtttatgcctgctcttaactcaaactgcaagtacgcgagctccttgttgatcttgaggagtgtatcatcgaacagctgccgatgagtggcggggttcttgccgccggagatggcggagaagagggcgtggaagtcgcgctccgagaggggcccgcgggagagcagcgcctgcagcagcgtgtggtggcgccacgagagcggcgccat

SEQ ID NO: 48758 - DNA, 291 bp, Oryza sativa
  Clone ID: PAT_MRT4530_51402C.1
ataagaactagaaacctaccacaatgaagatcattttcttctttgctctccttgctattggtgggtgcaatgcctctgcgcaaggtgatgctgatactcaagtttacaggcaatatcagctgcagccgcatcttatgctgcaacaacagatgcttagcccatgcggtgagttcgtaaagcagcaatgcaacacaaaggcaacccccttctttcaatcacccgtgtttcaactgagaaactgccaagtcatgcagcaacagtgctgccaacagctcaagatgatcgcacaac

SEQ ID NO: 48759 - DNA, 137 bp, Oryza sativa
  Clone ID: PAT_MRT4530_51403C.1
cactcactatatggaaagctgctactcctgcagctaccgctccttaattcccttatctacccactcttctcttttccgttagcgatcgacaggatgacatggctgatgaagcggcgtcattttttcctaccttatcc

SEQ ID NO: 48760 - DNA, 167 bp, Oryza sativa
  Clone ID: PAT_MRT4530_51404C.1
gggagtaaagacattatcccggcaacattatcaaacagcaatacttgacgcactaaaccacataaaatatgccctcttaggacccaagcaactcatagcccagtgacaatacccacacaatactagaatcctaaatcataatttcaatagcacacacggaggcactc

SEQ ID NO: 48761 - DNA, 519 bp, Oryza sativa
  Clone ID: PAT_MRT4530_51405C.1
atgggattcattgggaacaaggctaggctggtgattgaggtgaggcaaaatttgtgttgtttgtgcaagacaattgctgcctatcatgccattggccacattctgcccattacaaggcatcaagttcgccaatgccacaacaggctcactgtgaagacctaccccctggaatgtaatggaatcaagaggttgagaaatagtcctgtctggctgctgagactctgcagcgcccatattgtaatctggtacctccagatcagatgccagactatcaattatgtcttgccagcttttgctcctgataggacgacgccgactgatcttgttgcccttgaagcgctattggggcacttagcgatctctgagggggatttttctgaacagtaccaaacaatgttcttggtgcaacttgagctggctgggatgcatgtggcgaggatggctggtgcaactgggtattgttcggagcagcagaaccaaactggttatcatttagagttactatgcctggagaagtag

SEQ ID NO: 48762 - DNA, 2139 bp, Oryza sativa
  Clone ID: PAT_MRT4530_51406C.1
atggatgtggtggacatcagctccgacgaggagggcttcgccgcggcggcggtggcggtggcgacgacgaccaagaaggcgtccgtcgactccctcgggtggattgcggaccttcttagagaggaggatgagagggctttgtcggatgagttcgatgatctggaggtgatgagtgagctgtcggcgccgccggtgatggcgcagcagaaggggggcaagcccgattgcggcggcgaggaagacgacgatgattgcgtggtgctggatggggatcctgatgatgttgtcgctgtcgcgggggagaaagggagtgagggagatggcagctcggatgaattgcagatcgtcgcagagaaaggcccggtagcatgcagggacttccctcattcccgccatttatgttctaacttgcccttcagcaccacttctcatgtgaagtattgtagcatgtgccactgttttgtatgtgacactccagccccatgcaattattggggtaagggcaccgagatttatgatcattgtcatgctacagataaggaaaaaaagtggaaagcaatgagacatacattcaagagcaaaggtctgccaacatctcatccagaaaagcgccagaatgtcgtatacccaacaacaacgtcatttgtacagcaagatacacagtgcgaaatttcactcatacaatcgcatatgactacttactttcccaaccaaagtcatcttgcgaatgttgtgaaccaggggttaactcaaacaagacatacatcagtaagagtctcaccgagtgtagggagaactgtcagtgcaacaagaacaactcctgcaacaagggctggaagaggtatgagcaatgctcccagcattcagattcctcaatcacgcacaagattcaaacgagtaggggctacttctccaggcatagtaactctaaatgataaccagtttggttctgctgctccgaacaatacccagttgcaccagccatcctcgccacatgcatcccagccagctcaagttgcaccaagaacattgtttggtactgttcagaaaaatccccctcagagatcgctaagtgccccaatagcgcttcaagggcaacaagatcagtcggcgtcgtcctatcaggctgcctcaaacggaacacacggtacaggaccacaattttctcggtgcatttctcttacggctcagagaacacaattactgcctgaaccagcattggatgtttacagcaaaagctggcaagacataattgatagtctggcatctgatctggaggtaccagattacaatatgggcgctgcagagtctcagcagccagacaggactatttctcaacctcttgattccattacattccagggggtaggtcttcacagtgagcctgttgtggcattggcgaacttgatgccttgtaatgggcagaatgtggccaatggcatgataggcagcaattgtcttgcacaaacaacacaaattttgcctcacctcaatcaccagcctagccttgttcccaatgaatcccatcttaataattcagtaagttccactgcggacggattactaatggaagctgctcatcagagagacacgcaaggatcggattctctagatcttctatttgactttgagtttgaggattgggattcagcagagccctgacaaacaacctccgcagtttctgaaccccaaggacaataaaatctggcgtcaccgacaagctggttcgttagcttccttcctaggaagaggaagagatgttccttgtacattctgtaggttcagtggtagaaatgtttttttttcccttccatgggtgcttgtttacagtagcggctatacaggccttctaggccttagattagcagttatcgctctgaagttttagggatgaagttcaattcccaaactgttgttgatcatatatctatgggccataactccataatcctatatctatgggccataactccataatccaattgccagaatgcatgtttcaggtagcatagcactgaagcaaaatcttctgagcactggtgtggattggctctagtaactgctgatccagcgaagcaatgtatagtttttgcttgataatggcaaagagtgatctgctcttgaaaaaaaaaaaaaaaa

SEQ ID NO: 48763 - DNA, 1285 bp, Oryza sativa
  Clone ID: PAT_MRT4530_51407C.1
ctgcaggaattcggcacgccggccgggccctttcctccctccgcctctctcgccatccgccgcggcgccaaccgagtcgatcccccctcccgcccccgccgccatgggcctcctctcgaacaggattgggaaggagaccctgaaggcgggggatcacatctattcgtggagggccgcgtgggtctacgcgcatcacggaatatatgtgggcgatgataaggtgatccattttactagaggaaggggccaggaggtcggaacaggaactttcattgacctcctccttatgagctctggtcctaatacaaacactccatgttcaatatgcaacaatgaaggtgccaccaccaatacggagacaaatggtgtggtatcctcttgcctcaactgcttcctgtcagggggcgccctctaccgtttcgagtatgctgtcaacccagcacttttccttgccaaagcgcgaggagggacgtgcacgcttgccccaactgatccagatgaggttgttgtgcgccgtgccaatcacttgctcagcaatggtttcaggtgctacaacctgttcaagagcaactgtgaggacttcgcgatatactgcaagacaggcctccttgtggcagagcaaggtgtcgtcgggcagagtgggcaggccatctccatcatcggtggacctcttgctgcggtgatttcaaccccattccgcctagtaaccacgaatatctatggaatggcggtgatggcagttggggtgtattgcgccagcaggtacgcagctgacattggcaaccggcgagatgtgctgaaagtggaagtggaggacctgactgctgggctggcgagtggcaggattcgtgccgtggagaacatcagtcagttggttgctccggcagaagcccaaggtctggccgtaaccgcacctgttgctgcttaaagtgcaccactgagatctatacattactccagaccttctgctgctaaatttatggatgtttcgttgtcaaatatcagctgaaattgtgtaccagagtgagcctcccattcagcaatagctgtacaaacaatgaaaaaacttatacgcccgtttctgccatcaactgttatgtgtggcttatctactgttgtataaattatgaacatggaagtgtggtgcttgtcgatttgcaactcaagattgtgacagctctcttattttaggcagtaattccacttcattaggagacgtttgcttgtaagtgggaaatataattcacccgacctgagccaacttgggatgtagaggttaactttc

SEQ ID NO: 48764 - DNA, 464 bp, Oryza sativa
  Clone ID: PAT_MRT4530_51408C.1
agaacagtgttataccctgtggattcgcccctgaatgtaggggtacaatcgtcatcggatgacatagtcacactcacatagctaatagtttagaacaagacatattcagtcttgcctaaaggaacaaccgaacaagtttagaacaagacatatactaatagtatacttaggacaagcaaaattttcagtgacatattcagtctagcctaaaaccgatgccattgctttcatggtttcgtacttccattgcgtcgcatccctccagctccagtccaccaaactctgcgcactgcgctccttccaatgtcgccgccgacttcaggttcaggtcgctaccttcacttctccttcagcttctgatctccactggtaagttcttcactgaactcccacagcttctttgctagctctgcatctcttgcaacagccgtcggcgtagcttcgttgcagtcggcaaagtattt

SEQ ID NO: 48765 - DNA, 602 bp, Oryza sativa
  Clone ID: PAT_MRT4530_51409C.1
gtgaactacatcgagtgttatttacaaggcagccaatgacagcagaggcggaggcctatgtcgttgttgtagggcacatggaggtgctgctcgggtgaagggccagggaagcggcgacctctggggcggtgaggtcagcttgactgatgtgtggtttgactggtattacatgatttgatcaacttatcttttttgaaaaatgatacactggtttacatgattttgtgttgtacctaattggcaggattgtcaatagttgcattattccccacttgatgatcaaacatgattccccttaagatatggtattgtttaaagttggtctttatgctaactcttgcctaggaaaacattgagcaagctaaaaatttaaatgaacctgatttattttgttcaaggcctagcctttttgtttgttttgaaacaccttaatagttcttaagatttcgtttcacctctctgcagcacaagcaaggcatttcaagttgaacacatacatagatatccaagtattctcctacatactggatcaatcagaattgttaaggttttgtggggatctggataatatttttctgaagcagtggtcatagtatgcagat

SEQ ID NO: 48766 - DNA, 1046 bp, Oryza sativa
  Clone ID: PAT_MRT4530_5140C.1
agaaacgaaacgcagctccagcattgccgaatccgccggcaggaagatcaagtggaccacccacgacaagcccgacggcgaccggaccttcaagtgggaggcccagatcgacacccccaacgacgatggcttcgaccgcaagtggaagtgggagtccaaggcctccgccgccggcaccaccaagctcaagtgggccaaggaggtcaagggcaagggcttcctccacccatggtcgcacgcctactccgtcgaggaggtcttcggggacgacgaccaccaccacaaggcagacaagacagcagaaaacaaggtcaagcagcacaacaaggatacttctgccaaggaggagaagaagaagacgaacaagtctaatgttcagatcgttgagatcgacgacaacactgccggatgcgtcgccatcaacaagaaactgaaacggaggtgtatttccgatggcattttgtaagggaagccatacccataaatgtgattagcaattgctagtaacagatagtagatcgtcaattttcgtgtgcgctgtactgacaacacaacactggttttctcaaggcgtttgcaagcagctacgccaagggcaagagaaagcagctgtccccgcaggatgctgcattgttgatccagatgaactaccgggctcacctagcccaccgctcgcaagtgctgcgctgcctccgtcatctggcggtggccaaggccaagctcaaggacattaggtccttgttctacaacatctcttaccgccgccgcatttcgcatgactctgaagagcgtcagaggtttgccgacaaaatcattgccctgctcgccactgttgatgcccttgagggaccagactatatggttcgcaatgcaaagaggtctatgctggaggagctggaggggatgctagagatcgtaggtcctcagtcactagggaagccaaggactctgagccgcagaaagtttgagaaccatatctaatgatatgaggactggtgtcaagggcaagtgaaaggcaccatcggttctatttcgtagtgcggcgt

SEQ ID NO: 48767 - DNA, 207 bp, Oryza sativa
  Clone ID: PAT_MRT4530_51410C.1
atgggccatgccgaggaggatgatgggggcaacgtcggcgacaactggctggaggaggtggggttcgaggtaagggcggcggccagtgatgaggctttgaatggggaaagtggccagtggcgcaccgctctagccacagcggccatgtcgggctcaggatggggcaagaaagatgaagaagggggcggccgtgggagtgggaactag

SEQ ID NO: 48768 - DNA, 277 bp, Oryza sativa
  Clone ID: PAT_MRT4530_51411C.1
aatccttattgggaaaatgctcgcaagttacctcgaaaagactaggcgtcgacagtcgactatatcacttggctttgcaggcatgcaggtgcttgtatgcacctttgtggctgtgaggttcgaaggggcaacgccagctgaagccatctacaagaatctgagttatctggaggtgttcttcaagacctcacttctggccgtgggagatgctgtgaagctgtgggtgcagcagcagccatcgcatgactgcgacatcaacgatggattttctacttag

SEQ ID NO: 48769 - DNA, 2139 bp, Oryza sativa
  unsure (1)..(2139): unsure at all n locations
  Clone ID: PAT_MRT4530_51412C.1
atggaggccgacgacagcggcggtggcggcggcagggcacgcaggtccgtcgaggtggacttcttctccgacgagaagaagaacatgaagaagagccgtgtctcgggcggcgtcgccgccgaggcggacgacgccaagggacccgccgccgccggcctcgccatcaagaaggaggacctcaccattaacgttagccgccgccgccttcttcgctcgtcgatcgccagacacctgtttaactcacggcgatctaacgcgtgtgctcgtccgtgttcgttgcagcttcttcccgccgggaacaacgcgaggagcgaccggtcgatggtggtcgacgacgacgcggcgtcgcggccggatcacgaggagaagagccggagcagcaacgagctcgcggcgatgcaggcggagctgggccgcatgaacgaggagaaccagcggctccgggggatgctgacccaggtgaccaccagctaccaggcgctgcagatgcatctcgtcgcgctcatgcagcaaaggcctcaaatgatgcagcctccgacccagccggagccacctccgcctcaccaggatggcaaggccgagggcgcggtcgtgccgaggcaattcctcgatctgggcccgtcctccggcgccggcggcgaggcggcggaggagccgtccaactcgtcgacggaggccggcagcccgcgtcggtcgtcgtctaccggcaacaaggaccaagaacgtggtgacagcccggacgcgccgtcgacggcggcggcgtggttgccgggacgcgccatggcgccgcagatgggcgccgccggcgcggcgggcaagagccatgatcagcaagcccaggatgccaacatgaggaaggcccgcgtctccgttcgcgcgcgatccgaagcgccaatcatcgccgatgggtgccaatggaggaagtacggtcagaagatggcgaagggaaacccttgtccacgcgcgtactaccgctgcaccatggccaccggctgcccggtgcggaagcaggtgcaacggtgcgcggaggaccggtccatcctgatcaccacgtacgagggcacgcacaaccacccgctgccgccggccgcgatggcgatggcgtccaccacgtcggcggcggcgtcgatgcttctgtcggggtccatgccgagcgccgacggcgccgcggggctcatgagctccaacttcctggcgcgcaccgtgctgccgtgctcgtccagcatggccaccatctcggcgtcggccccgttcccgacggtcacgctcgacctcacccacgcgccgccgggcgcgccgaacgccgtgccgctcaacgccgcgcggccgggcgcgccggcgccgcagttccaggtgccgctgccaggcggagggatggcgccggcgttcgccgtgccgccgcaggtgctgtacaaccagtccaagttctccggcctgcagatgtcctccgattcagccgaggccgccgccgccgccgccgccgccgcgcagttcgcgcaaccgaggccgccgatcgggcagctgcctggccctctctccgacaccgtcagcgcggcggcggcggcgatcaccgctgaccccaacttcacggtggcgctcgcggcggcgatcacgtccatcataggcggccagcacgcggcggcagctggcaacagcaacgcgaacaacaccaacaccaacaccacgagcaacaccaacaacacaagcagcaacaacacgacgagcaacaacaccaacagcgagacgcagtaaaaacgagttcggatcagtaattttcacatagatttccaagtttttactcttctttgttcaggataggttcttgatttctctcctttggtttcgatagctcggccgagctgtgcagtgggcacatggtatacactttcttttttcttctccactttcctggttttgcagcagcaaaaagttgtattaattcattgctttttcttagttctttttctaccgcaaaaacagctgttgatacttcgcagtaagtaataatcagtacaataataagtataataatagcatcttcctgagaattatgtacacttgtcaaagcaacaaaacaaaagaaacaatgacagcttactagatccctcttttntaaaaaaaaaaaaaaaaaaaaaaaaa

SEQ ID NO: 48770 - DNA, 157 bp, Oryza sativa
  Clone ID: PAT_MRT4530_51413C.1
gcatgtcgagcactggaacgtccccaagatggcactcctgcggcagattttcaggccgagtcgatggtttctcttgtgcaatgcaactgcagcatccccgccaggtttcccaaaccgtcagggccgggattaccacgtccctgcggattacacatag

SEQ ID NO: 48771 - DNA, 2025 bp, Oryza sativa
  Clone ID: PAT_MRT4530_51414C.1
atgtcgcgcttcagggtcgtggaggatgaagctgaggcggacctgcaggccttggcgaggcgcttcagcttctcgtcatcctcctccccctcgccctcgccctcgccgccttcgtcgtcgcggaagccgccccttccccctcgccggtcgccccagaagcggccggggctccccacaatcccggagaatggcccaccggcggggatggcgacggcgacggcgacgccgaagcgcacgcggacaccaacctctacgtgcgccccgccgccgccgcctcacgcgaggcacgctccgatgacgggtcagacgccggtggctggctctcggtcgtctcgcccgccgcgcgggcgcggccagatggaggtggatagccctcagccgtctcgtgcactgcacacgccgccgacgggtcagaggcaggtgactaggcacccgccgccggctgcgcggacgatgttccaagagtctcccgttgcgtccgtgtccccgcctcagcagcagcaggtggccgtgcccgtgtcggcggcgttgagggagttcgagcggcgtcgcgcggcggcggcggcggaggcggcattgcggcagctgcagcttcaggtgtgggaggcagcgcggcagcagtcgcagcagctgaggctgtacacggtggagggaagggctgcggggtacgggacgaagtgggtggagctgcatccgcaatcgcaggagcttctgctgcacatcgagtatggcttgctccgcattcttgatcttctattgggggattggggcgatgttcatcgcgttcttcatttttgggggaatccgagttggggctctttatcgagattgccttgcattttccctttttttcggaacaagatgagggagtacaagcatgagagcgatctgttggaccagtgcagccgcctctacgacccatcagtctctagcaggagttttgagctgtatgctacgcagatttctcaggagataggatcaacctccaccatcatggacagggagatggtttccattcggagcttaatggctgtggtcgaagaaatgatgcggaacacagattcggctatacgctcatatcaaaagctgagaccaaatttcatccgtagatattctggaactgcaaatactggttttgctcatcatgctggaccatctggtgctccaacttatttcaatcaaccctcagcaattgtgccaacatttgatttttacagtggtgttgcaatgcggccttctccttttatgcaacacactgtttccaagtttgagaaccgtcttgaggaatgcagcagaatggtcggagagctagagcagcttattcaaataaagaatgataagaactattcaaatgcgttcgaatccctgtcaacagtagtgcctaatgtgtacgactatctcatccatgttgctacccagatccactctgaagttgttcaatttaaattcgtaattaaagttgtcaaggtggaaaatcttcatcaatatgctgaggtaatgagaactcactatcggaatgcttggcggctcatgggtgattgtagcgatccttttttggaggcagatagaagagaggcagctaaacaagaagccactgccagaatagtccatcctacaggggttgatgtatctgtgctggcaagccaacctttgcaattgtcatcccctactggcgtaacttcatctagtactcgtgcaattcttagaacaccactttctgctttgccctggttcagcattcaaacaagtcctgctccatcacccagccctttcagttcatctgggtctatgctgcagcccacaccatttggctcagcttccacacttgcactaggatccactccagcaagatttgcgtcttctgctttgggtggcacctcacttttcagaacaccacctggagatgcactggtgtttcaaacgtattctacacaatctgtaaattgtgactactgcaccatcctgtcacttaccatgcctgaaaaatgccaaccaacgcttaccaagagtgtaacacgacagtag

SEQ ID NO: 48772 - DNA, 180 bp, Oryza sativa
  Clone ID: PAT_MRT4530_51415C.1
agcgtccaaaactgatattataggaaacttttacagtacatagcaacaacgccattgcttgcaattcaaacatttatatgattaaggcatactatatacgcattggcaacttaagaggagtccggcacattataaacctctagggaacctttggtttggacgggagtgaatgcaccgaac

SEQ ID NO: 48773 - DNA, 692 bp, Oryza sativa
  Clone ID: PAT_MRT4530_51416C.1
gtttaagttaacccgaggaaacccagtttggactcccatgtcaatgtgactcatcttcccaattaaaataggaaaaaaaaacgactgcagccaagcgctttattgtcggattcccccctcttcccctccgccgccagagcagcggttgttgctgtgcttctcctccgcgctccacatcacatcgcatcaccaccgccgcgacgagcagcgtgagatctcggtgccaccgatcgagtcgacgcagaggagagagagatcggggtttggttttttggaggggagagcggagtgtaggaggaggaagaagcgggtgatcgattttgcttcgatggtaagggagacggggtactacgacgtgctgggagtgagcccgacggccaccgaggtggagatcaagaaggcgtactacatgaaggcgaggaaagtgcatccggacaagaacccaaatgatccgctcgcggcggcgaagttccaggaattgggagaggcataccaagtactcagtgaccccacacaacgtcaagcgtatgactcatatgggaaatctggtatttcaacggaagcaataattgatccagcagcaatttttgcaatgctgtttggtagtgagctttttgaggattacattggtcaattggcgatggcatccatggcttcacttgatatatttggtgacgaagaagagattggtc

SEQ ID NO: 48774 - DNA, 578 bp, Oryza sativa
  Clone ID: PAT_MRT4530_51417C.1
cgctcgccgccgccgccgcccgcgtcgactcgccggagctgagcccggtagggccacacgccgagccgacaggatgtggtacctctgcgtcttctaccacaggctcctcgactaccggcggcccgaggtgcagtccctcgccgagctcttcggcgggcctggcgccggggacgccgtcgagtggcgcatgccggagaaccaccacgtcgactcccccttccacctcgtccgcctcccgggcgacgagcgcctcgccgcgcagatcgccaaccgcagcttgctggtgaaggggatctacgagctgtgggggcaaggcaccacctacgaggagctggagagggtggtcatggcgtaccccgaggagaggaagctgccgtacctgacgccggagagcaccttcaagatcgtcgtcgacagcttcggcaaggtcatcagcttccaggagcagaacgacatcatgaagagcctcacctacatccccttcaagggccgtgttaatttgaagaagcccgatcataagttctttgtcatggagactgatgactatggctgcaacaatgggcctccgccggttgctc

SEQ ID NO: 48775 - DNA, 186 bp, Oryza sativa
  Clone ID: PAT_MRT4530_51418C.1
cagacccatgtgtacgagacccggaagggaaccccgggagcagagaagaggaggaacacaggaaggccccgcgaatccttcagggtggggatttcatgtatgtcagaacatgctgaatttcaaccgaacgtgattatctgctcggaacgatccccgaaatccagagcccacgggagtgaaaattca

SEQ ID NO: 48776 - DNA, 1814 bp, Oryza sativa
  Clone ID: PAT_MRT4530_51419C.1
gaccaaaggaattagcagcctcgtaccatctcagaaatggtacatcatagtacaacagcacctgcactaatttatgctctaaaaatcggctgatccaaagcctccgggctctcttaagctgaaggatacacgaccacatgacatcgacaaaattgttcgttacagcgtcagaaaaattttcagacaaaaagttcagcgtctctcacctgcctacacctacacatacttgcctctgtacttaggcttggagtccctgtctatggccggcttcccgtcggcggcggcggcggcctgatcggcggggctgaacacggcggagtggaggttcccctcctccatccacttatggtggttctccctgaactcgcggcgccgctcctccgccgccttctcgacctcctcggtgtagggcccgaccttcaccatggtcagcaggacccggctgtacctcatgctcaggatctgctcgcaggaggcaagcagcctgaagcaggggtgctccgggtacttggccgggttggcgacgccgtcctcgcggacgacggggaagaagaagaccagccggccacccatgaccagcatcctcgcggcgaggtggaggaggtcgtggacgcactccgcgaggctgtacggcgcggtggatgggatgtggctgtccctcttctcgtccggaaccgtgtacggagcgacggtgccctttatgagcttccggccaccggacttgcggcctccagcccggactccgtatggtggatcacagatgatggcatcgaaaacctccttcaatcctggacgccaaggtgggacgttgttatccgctcttagtatacataatggttccggcaatttgtactgctcaaagttgctccaaatattgcaatctggaccacgaccgtcccgcacaacccttatatcaatatctgcacccattgtcatggctccaaaatgcgcggctgcaaccaaaatactcccagtcccaacaaaagggtcatatacgagcttcccggggcgcgccagcccttgattcgccataagaaatgccatttcagcatccattgcggtcgggccaatatacttcctgctcttcagctgatatgtcggcaggagatgcctatccgccgctccaacctcgcggccaaagaataccgtcctctgagcaaccggcgggaggccattgttgcagccatagtcatcagtctccatgacaaagaacttatgatcgggcttcttcaaattaacacggcccttgaaggggatgtaggtgaggctcttcatgatgtcgttctgctcctggaagctgatgaccttgccgaagctgtcgacgacgatcttgaaggtgctctccggcgtcaggtacggcagcttcctctcctcggggtacgccatgaccaccctctccagctcctcgtaggtggtgccttgcccccacagctcgtagatccccttcaccagcaagcccgggttaagaagcttagccagcgaatggtggtgaatcaatcgatcaggcgaggcgcttttactgcggttggcgatctgcgcggccaggcgctcgtcgcccgggaggcggacgcgaggcaagggggagtcgacgtggtggttctccggcatgcgccactcgacggcgtccccggcgccaggcccgccgaagagctcggcgagggtctggacctcgggcctccggtagtcgaggagcctgtggtagaagacacgcgggtaccacatccgtcggcgactagtgaccctgccgggctcagctccgtctagtcgacgcgggcgccgtcgccggcgagcggtcggagagaaggcgatattaa

SEQ ID NO: 48777 - DNA, 423 bp, Oryza sativa
  Clone ID: PAT_MRT4530_5141C.1
atggatgtggcgtcgtcgctgcctgacgacgtgctcgcggccgtcctccgccgcctcccgccgcgtggcctcgcgcagcgtcccgctgcgcctgcaaggagtggcgccgcgctcgtcgtcgactcccgccgcctcctgcgcgcggacctcctcccgctctcgctgggcggcatcctcctcaactgccacgactcgcggcatggggaaaacgagtacctggtgttcgaccccacacttacgcccaactatgagttgttcatagtgcccgatcatgttccttacaagctgcgcgaggaagaagaatgcgaggaatgcgaatggccgccgtggacatatattgatcctacctgtgttttcatccaagactgtgtggatactggcgaagagcactttatatatgctgctcctattgatttgtcatga

SEQ ID NO: 48778 - DNA, 324 bp, Oryza sativa
  Clone ID: PAT_MRT4530_51420C.1
atgcgcggctcgcatatatatagctctgacgccgtggtggccacgacaagggcggcagagggtatggcagcgcagcgctactgcgagaccgactgcgatagtctgcgctctgtggtgcctgctcgacatgaaccaggaggtgttccaagttgtgctcatcccaagcatgagagccacctcgctagcagcgggtgcagtggcaatgtcgaaggtgtatgcgagccggacttacggatttgtcgggtacgagagtggttgaataagtattgcatgtggaaggaagtagacgaaaaagattttggattcgaaataggcgcattcgac

SEQ ID NO: 48779 - DNA, 911 bp, Oryza sativa
  Clone ID: PAT_MRT4530_51421C.1
ggcacacgtaatggaaggattagagtgttttgagcctttgaaaggtaagttctgcaaaatttctcaatacgaaaacagatagcgtttctgcagatgagcacggaataccgacagcgacgcccatgggggatatttcaatgcgaaatggcgtcgcaatcacatggtgttgcatctcctcgcacatggtgttgcagattaatacttctggggctccaatggtgtagaatatttgacagaatatctcatgaatccctgaagaagaaaacatattcgctgtaacatcaagcaagcaaggggttcatttcagtcccgcttaggcacgtgctgtactgcttcaagctattagtggatatcaagctcttcttcattcatgtgctgtactgctgttttcatctacatccgcctccacttatcgatctcctttgatgtcgctttgatcagcttcctggtgctctccatcatctcgtcaaataggatatcaaactgttcatcgtaaggaaggtttctggaattctgaaatgatctcctgatgtttgaatatctcccgttctcataatatgcaattccttttccaaaaccatagccaaaacctattcctatcccacatccagcaccagctcccaatcccaactgcaaaccagggaatccagccccaattcctgcaccgccgatgaggccgaagcagacgccgacgccgcagccggcgccgatgccgaacgaggggcccagcttgccgagcgcctccgacctcaccaccgggaggccccaccgcgacgagcccctcctgccgccgaacgccatggcctccctcgcccgcgcgcttcccgcgcaaccgcaagcgcttcccggagctgagctcaccggaggaggggaggaggatgaggaggtgggagggagggagcctcgtgccg

SEQ ID NO: 48780 - DNA, 419 bp, Oryza sativa
  Clone ID: PAT_MRT4530_51422C.1
agttctggccactactcttccagctcggcctacaatgctttcttcttcggtcgaatcccctttcagtcaagagcctatctggaggtctcttgcacccccttgatgtcattacttcccctggctagttgccctaaagcgttgttggacggctgacagactgtgccccagaggcttaccgcatccggatctctgtgttctctacgagcaatatgaggagagaattgatcatatcgtggtcgcctgcccctaatccaggaagctgtggtggatgcttctccaccattgggcatcctaattgtctactggtgaatgagtcctccttccactcttggctgtgtgagagcagagaacagattgcacggccacttcggacagagacagatccagttgggacggctgcaagtagcactactccaatg

SEQ ID NO: 48781 - DNA, 269 bp, Oryza sativa
  Clone ID: PAT_MRT4530_51423C.1
atcacttatttattattttttttccatggggtttttccacatcggggggggcaaaacaccatctaatcaactaataattgcaccttacttgattccatggcacagtgaaattccacacattcaagaccacacaaaaaaaccgttgcttcgcttttcactataaatagccacacttggggactctttaacaccaccttctacaaagcttaacatcgaccaaccaccattttatcccaaccccatgtataccctttaccaatccttggtat

SEQ ID NO: 48782 - DNA, 429 bp, Oryza sativa
  Clone ID: PAT_MRT4530_51424C.1
atggcgagggaggaggaatgggcagtttcctcctccatcgcgctcaaggcgacccgcaggagacggcgcgacacaagaagacaaggaactgtggcgaggacgggcaccgggggatctggtttgagcgggacgtgcacatgtcgcagagccacccgctgctcccttcactccgaggcatcctcgccatcgatgccgtcgtcgggtttgccatcgaccgatgcggcagcggagatctcaactcgtcgctccgacaccgccagactgagaagatggctccgggctaagctggccgtggccaagaaccgcctcgccgggatggcggccgagatatcgttgctcaagtctgtcgttgggtcaacgaaggatgccatcgtcacgaggaagaagcgagcagcagtggaggagctctgccgacgctgcgggcgctga

SEQ ID NO: 48783 - DNA, 314 bp, Oryza sativa
  Clone ID: PAT_MRT4530_51425C.1
cccacgcgtccgcccacgcgtccgcccacgcgtccgtccacgcgttcgcccacgcgtccgcccacgcgtgcgcccacgcgtccgcccacgcgtccgcccggccgttgacagcggcagggacgccgccgccgccgccgccgatgacgacgacgacgacgacctggacgccacgtggaacgccatcatgcagaagacgcgcccggccaccgcgccggcaatggcggcccctacggcgcagaaggcgacttccgcagggacgtcgtcgccgtgagcgcgcgacccgtcgatcggagcggaggagatgaaccggcgat

SEQ ID NO: 48784 - DNA, 1241 bp, Oryza sativa
  unsure (1)..(1241): unsure at all n locations
  Clone ID: PAT_MRT4530_51426C.1
ccacgccgtccgattacattatcccctgatagaagtctggaaggggcttgtggagatcccggacctttatttggagatcatgatgggagcttgttagagcacatgggttttcacggggatccacaacatgtatctccacagctaaatgaagggcttttagttgattcaactgaccaaatttcatatttggctgctgattctccgtccttcatgaatgatcaaatcccatgcaatacaatgaagtctgcctcaactagtccagcatctcccctgaagcaagcagatgaccatcatgtgcatatagattctgatatggaaaatgatgcagctgaacaaaatcttcacgatagttactctgaagcacagactacttctctgggttacggcatacatcggagaacagaagtggctgatgctgcgcagcccacagagcttcatgaaagtaatggtaataatgatacatcgaactttcaagaagaaaccacacaatctgacacctatcttggcgatgctatgctaaatgaaaatggcagtagggattaccaacttaacaatagtggtgctgatgatgatgaaattccaaactctccagcgcttgagatggaagatgtcgacaccagagcgttacatgagacttctcacgatgaaaagtatgaggcagaggatgatcaaatgaatggtaggaattccagtccttgtgatgaacatgatgaggacaactgcaactctgtgattgagccatcttatttagatgtgatggagcatgaaaatcctggtaccaaaaatggcatgttgacaccaagcaatcaatgggattctcctcctgaaagttctgcaagattggaaaaagggacaccatcaccagacaggatggtctcacttccagttggaaggtctcctcgtactcattcacctaaggaactggattcaccacgtcctgaaaatgaggttggtaaattagccacttctcaaaactcacctgttagacgtcggtcccggtctcctggaaagcatgagactaaccgcagaagggcttcttcacgtgagttatctccgcatggtcgacagaactctccatctcctccaganaagaaagcacgaagggagcatcgacatggagatgggtcaccgcgacgaagatctgtgtctcctagaagaagggctttgcccaagaggagagactcaccaaggagagactctccatcaaggagaagggactcaccaaggagggactccccatc

SEQ ID NO: 48785 - DNA, 386 bp, Oryza sativa
  Clone ID: PAT_MRT4530_51427C.1
atggcagttgcaaggaggatggtgtcctccatctctgtggttttcttcatgcttcttctgatcgtggcagattccaccttctcatcctgctatgcattaacacctagacaaacgtgcaatgacctaggagatttagcgtgcactgacgagacgtgcaagaagatatacggagacagattagaatactactgcaagccaggcgtcacccctacggtatgctgctgtatgaacgtcacagcatcagttcccagtggtgtcaagaatcaaaacggcgatacgcttcttaattagttataattgatcatgttccatgtaaagttcgtcgatatgtttggagtttggtgccaactcaataaataaacatgcatacataatttgggtttgtt

SEQ ID NO: 48786 - DNA, 1764 bp, Oryza sativa
  Clone ID: PAT_MRT4530_51428C.1
atggcattcagtgatacagaggaggcatggaatttttgggtcacgtatggaggtcggatgggctttgatgttagaaagaagtatcacaataaaaatcaagtaacacagaaaactacatcagctagatttgtttgctccaaacaaggttttcgaggcaaggataaaagagataatttgactaagcatcctcgagctgagacgagaattggatgcaacgtccgcatggggcttacactcaatcgagtaaacgaaaagtatgagatatctgatctggaagtcatgcacaatcacatactgcaaacgccagaaacttctcacttaatgccatctcagcgcaaaataactgaagtgcaagcctttgaaattgaaatggcagatgacactagtattcagcccagaatcgctcatgagttggctgcccgacatgttggtgggtcatctaatcttggctacacttgtcttgatcagcaaaattatttgcgaactaaacgtcaaaaggagttgaaatatggtgaggctgggagcttgttgaattattttaagaataaggccatagataatccttcatttcattatgctgtgaaattggatagtgaggaacaaataacaaatatcttttgggcagagatgattatagattatgctcactttggtgatgttgttaccttcgatacaacctttgggacaaataaagaaagctggccatttggtgtatttgttggatttaaccactttagagaaactgtagtttttggtgctgctctcatgtatgatgagacttgtgactcattctgttggctttttgacgcctttttgtcatgccacaatcacaagcatccacaaactatttataccgatcaggatgttgctatgggaaaggctatcacagaggtatttacagaaactcggcatggcttatgcacttttcacataatgcaaaatgcaaacaaacatataaatcgtcagaagactagtgatggctctaatgtccttgctgattttagtgcttgcatgtgtgaacatgaggatgtggaaaaatttgaggaagtctttgctgatatgaggacaaaagttcgcaaagggacatggttggatagtgtttataagttgaaagagaagtgggctgaatgctttatgaagaatgcatacacattaggaatgcgaagcactcaattgagcgagggactgaacagtgatttgaaggagtatttaaattgtgaattaaacattgtacgctttttccaccactttgacagagttgtacaagggaagcgagataaagagatcaaatcagagtatgaatccaggaaaaaattgccacgcatcttaatgagaattcctatgctattgcaaacaaattttgaagagtgctttgcgtttgttgataatgctcttgaaacccttggacagcaagtggaacaaatggtagaagtgaatacaaatattcagtcgaatttagagacagagtttgagatacctgaaaatgtctcccaagctattggcctaaagaaaaaagagacccggtgtagcacatcgaagcgaaagaagaattgggttgacaagctacataaaaaaagaaagaaaagcctaaggtatgctaagaatgggaatgaagtagcacatcctgagccattagaagaggacatattggagaatagtacaaaagaatctcaccaggattttgaatttttgggtagctatacccagctactggcgggtgattcagatggatatgagttatattctgaaggatttcatcagtag

SEQ ID NO: 48787 - DNA, 934 bp, Oryza sativa
  Clone ID: PAT_MRT4530_51429C.1
ggccatgagccatcctcaagctcttgcacagtgtgaacaaacactgacaaagttaggcagtcgagcatagagaagctgttgacgatacagcaggtgcagcaaagcttattgcagaacaaaagctccaggacactggagcagttgctagttcattggcagctcaactttatggactggatattcttgcagaaaatattcaggatgacaccgataatgtaacacgctttatgatgctggctcgggaacccattattcctcgtactgataagccattcaagactagcatagtcttttctttggaagaagggcctgggcaactatttaaggcgctggcagtgtttgcactgagaaaaattaacctcaccaagatggaaagccgtccacacaagaaaaagcctctacgtatagctgatgataattgttctgcaccattgaagcatttcgactacctcttctatgtagatcttgaggcgtcaatggctgatccaaatgctcaaaatgctctggcaaacttaaaggagttcgcaacctttctaagagttcttgggagctatcctaccgatgtcagtgaagcatgaattgtcaagtacctgttttgaatatacttggaccagcgttatcatgaatgagcttacgattggttctatcgccaacttggaagcaccgatagcagaagtggtactaacttggagggtaacgatatgacatattgatagagagaatggcacaaaggtgcacgatgttttgttcttgtttttaagttctcattgttgtgttagtgacgatttccttttgaaaggggcctttatgcaatatcccacttacccaaaagaacagtgatgagatatcaaagctaaggccaaagaattggttgcttgtcattacagatcggcatttactttattatactgagatttgactgttgattcacaga

SEQ ID NO: 48788 - DNA, 276 bp, Oryza sativa
  Clone ID: PAT_MRT4530_5142C.1
atggcgacggcgagccggccgtctgcattggctccggcagccggtggacggggagaggaagcaccgaagcaggcacagcgagggaagagaggccgatcggatgaagacactttggaccgctgtatagatggccatatgggccgagccttcccgtgcaggcccagagttcagatactatgcgaggaattgagagacagccgagcttcagcctgcaagaaactgcatctttcaattgtttgcataaagttccacaaaaagagcatagctgttgactag

SEQ ID NO: 48789 - DNA, 855 bp, Oryza sativa
  Clone ID: PAT_MRT4530_51430C.1
atgtggtcaaggatgtcagcctctcccctattttcttttcttgtcctcttccagcctgtgcttcctcaccgcgccgcacgccagcgagtgcagcgcctgtcgccgccgccgtttagattacatgtccaaggagatgtgccgcaactgaaggagatatgcagcagccttgccacgtccaaggagctcgtcaaggctcttgtcggcatctggggccctgacgatggcctaaacccgtcgacggcgtcgctgctctccgcgctgtgcgccgagctcgacctggcacgcgctcacgtacggcacctcgccacggaggaccggcggcacggcgacgagacggcacggatgaggacgcagctcgtcgaggaggcgcgggagtggaggagccagcagagggagaaggtcgcggcgatggtgcgcgtggcggcggcggagctcgacggtgagcagaggtcgaggcgacgcgccgagagggtgaacgccaagctcgggaaggcgctggccgacgcggagagggagctggcggcgtcccggagggagctggagagggagaggaggtcgagggagcggctggagaaggtctgcgacaagctcgtcaggggcggcctcgcctgcggcgtggacgacgtcaggggaggcgaggaggaggtgaggcgggaggcccagaggggcgcaggaggagctggagaaagagagggagatgccgcacctcgccgacgagctccgcaggccttccggtgcgccgccaccaaggccttcccacccgcggcgccgctcaccgccacaccatcctcgcgctcacggcctcggtgctgccacctccgccgccacggagggactgccgaccagcttcggtga

SEQ ID NO: 48790 - DNA, 306 bp, Oryza sativa
  Clone ID: PAT_MRT4530_51431C.1
ctacatgttagatagatctccctccccttgagcccaacggctcaaggaggccttgacccacgccctgatcgggggcgcccagcccaatggctggtgggcccccatcaccctgcgccatataaagaggggtggaggcagagcggcacaagacacgaagtttgtcaccgccgccaactccaccccacaaaccctaatcagatcgagagggggcgcagccagtgatgggaacgccccaccgccgcgccacgcctcatcgtcgaccacgactcccactgctacgaccaccgtcgccgtcaagcacaccat

SEQ ID NO: 48791 - DNA, 1176 bp, Oryza sativa
  Clone ID: PAT_MRT4530_51432C.1
atggacggacggctctttgaagccgcaaagtcaggcgattgcaggttgatgaaggagctggtggctgccatggatccaagcatattgctccgcacaactcctcaggggaacacctgcctccacatatccactatcaatggtcatgaggaattctgccaggaggtgttgatgttagacaattctcttctcaccgttgcaaactcacacggcgagacgccgctgctcaccgcggtaaccaacggccgcaccgccttggcctccgttttgctcagacggtgctgcgaagcggggctcagagaagctatcttgaaacaagatgagaatggatgtaatgccctgcaccatgccattcgcaacggccacagggaccttgcgttggaactgatagcagcagaagcaggcctgtcacaaggtgtaaacaagtacagggaatcacccatgtacatcgctgtgatgagagatttcactgatatcttccggaaactgttggggattcctggttctgctcacgtgggttgtcatggccgcaatgctctccatgccgccgtgagaaacgggaatccagttattgctaaagagttagtggagaagcgtccagggctggctagagaattcgacgatgaaatggatactccaatgcatcatgccgcaatgtggggtaaaacccatgttctcggagcattgctgcagtatgattggtccttggggtatgtcctaagtaataataaggacagtgtcccgctccttaattccgccgcataccgtggctatgttagtgttgctagagagcttgtgcatcattgtccagatgctccgtattacgacgctaatggttgcacatgtctccatcaagccgcattcaaaggtcatctggagttcgtggaatttatcctagagtcgccgtatcttcggaaactcgtcaacatgcgagataacggcgggaacactgctctgcattacgcggtgcaggattgcaacccaagaattgttgccgctcttttgtcccatggagacacggacgtcacggtacttaactacacgggaaacgaagcagtttggcaattagggggagccgccgattatgccaagacattaaattgggaactaaacacagccatattgcgctcttacacaacttaccatgcattacatggactgttactattgttactataa

SEQ ID NO: 48792 - DNA, 435 bp, Oryza sativa
  Clone ID: PAT_MRT4530_51433C.1
atggcgctggtgaagattgggcagtggggtggaaatggagggtccgctcaggacatcagtgtgccaccctgcaaactcactagcgtgactattcgcagtggacaagcgattgatgctatcaccttctcctacgtgggaatggatggactggagcatgtggttggtccatggggtggtcctggcggaagccctactacgttcaagattggccctacagagcgtgtgaaggaattctctggaacccatggcccgtttggaaccttggccgacattgtgacatacctgaagatcgtcaccgatgctacaacgtatgagctgggtgtgaagagtggaacacccttcaatgttccgctgcagggcaacgccactgttgttggtttctttggacgctctggagcactccttgatgcagttggcgtctacatccgcccatga

SEQ ID NO: 48793 - DNA, 189 bp, Oryza sativa
  Clone ID: PAT_MRT4530_51434C.1
atgacggtgtggcaacaaccttccctccccatcttcctctccctatcggcctcagcagcagggaaatgggctcgaggacgacgacggtggatccaggaggatgatggcagcgatggctttcgccgcatcatcttcggccgtgcagccttctggcaaggactccactcggcgaagctagtgttcggctga

SEQ ID NO: 48794 - DNA, 344 bp, Oryza sativa
  Clone ID: PAT_MRT4530_51435C.1
gcattcgcggacacgtgaacatacgcgtggtggatcattggacttaatcaaaacatatcgtggctttggagctcgagctgacacctattcttaccagcattatgccacaagcaaagacacggtatgaccggcatttgccttacgcataacctaatgtgatcggcgtggggggcatgagcaacaaaaaaccagctagccgtacggtacaagttcgggagtagaatatagagctgagacatctgatatcgaagatggaatataacggagagaactcctaccttgccgacgaaaggatactcaagctgattgcgacagaacataaactgaagcacaaaggaagggtt

SEQ ID NO: 48795 - DNA, 501 bp, Oryza sativa
  Clone ID: PAT_MRT4530_51436C.1
atggatcggaggcagctcctgccagtgagcttcgaggccgatgatggtagcgatggcgtggatcctcctgcggcgcatcgccggggttcaccaccgacggccacctccgtctgccagctcaccccgtccccgcctctcctccccgccgtcctcgcttcctgcaacggccggcgcgggccgttggggcgcagccggaggtgtcgtgctcccgccgtggctgcgatcctgccccgccctcgcgcctggctatatgctacatacacgcccaccgcgctgctggcggcagtaggaggcggcgtgcccggcgcgacgcactccacgacggcggcgtgtctacccccacgctcccgcttggctatacgccgcccgacgtgcgcggtgctggaggggagggcagcgaggaggctggagagggagtgctcacggaacggcgacgacacacgacggctcagccgtggcggagctcggcagctcggcggtggcgcaacgagaaaaagatga

SEQ ID NO: 48796 - DNA, 264 bp, Oryza sativa
  Clone ID: PAT_MRT4530_51437C.1
aaaaaaaaaaaaaaaaaaaaaaaaaaaaaaaaaaaaaaaaaatttttataaaaaaaaaaaaaaaaaaaaagggagggaaaaaaaaaaagggggggggcgttttaaaaaaaaaagtttacctatttttgaatacaaagttttagtttttttatattgcaacttaaattcatttcattggcggccgtttacaacttcatgattgggaaaaccatagcgttaccaaagtaaaaccctttgcaaaacatacttttttcgccagttggc

SEQ ID NO: 48797 - DNA, 1881 bp, Oryza sativa
  Clone ID: PAT_MRT4530_51438C.1
tttttttttttttttttttttttttttttgtagctgaatcagcaaatgatgccattaattgatcaatacacaggggaagggaaacgtgaacgaactaccaaccacaacggtacaacaaccacgccaacgacaccatgcaccaatgtacaaacacgaaccagaccggagcgtccagctaggcaaagaaacagcagtccagccccggcctcgtatcctcctataccccaaaagacaaaagaattcaataataatcaaccaattaaacacactcctctcaaaatgcgctgtccaacccaacaaccgtgtgagagctaggaaaaaagaataataatcgctgtgttttgctgtatgccgtgtcatcacttgtcgtgaacgcggtgtgcccattagtccctgttcctctgtagactgaggacgacgcatcatcgccgtgatcgatcgagaatggatcggagatggacggacggacggagggacgggtcagtcgtcgtcggagtagcagcggttcatctcgaacgcggcgacggcgatgacccagacggcgacgaagacgccgtaggagacgatgtaggcgctgacctcctgcgcgatgtgcaggccgaggaagatgttgccgatggccaccaggatcgccgcccgcccgatgtagtggtggtaccagttccagaaccgcctcaccttggacgtcttgtccggccgcgccaggaacgccatcacctgcagcgaggccatggccaggatggcgatgccgagcgcccggtgcacgtcgacgttcttgagcccgtcctcgttgaggcggaagccgaggacgaccgacgcgatgccgacggtgaacgcgacggcctggatggccatgtgggcgtagaaccagtacgggtccacccgccggaagtagcgcgccgccatcatgccgagcggcatcagcacgccccacgccatcatcgccagcagcccgtgcttcctctccggcgggaaccccccgccgcccgagccaccggagctcgacgccatcccggaggtgtagttgaaggcgtgggagtgcatgctccggtgcatcgggagggtggcgtcggagggcggcaggttgccctcggggccgacggcgtagatcaggtgcggctgcgggaggtcggtgctgagctggaaggcgaggtagagccggccggagcgcgacacggcgacggccttgttcttgaccagcgtgaggcggcccttgtccgggtagcactcgtcggggctcttgccggtgaggtagtactgcttcaccgtgcccttcccgcccgacgaccacgcgacgacggcgctgctaccgaccatcagccccttgccggagaaccccaccgccacgtacgagcccttgtccggcgccgagaggatgaagctccattggctctctccggtgttcttgtaccgcaggacgaagtcctcctgcttccagacggtcaggcagcggaaggcggaggagttgaaggggacgagatgagcgaccgcgacgccggcgctactgcacgagtccgactgctgctgctcctgctggctcgccgcgaacgcgaagcagaagccgaggaggaggcagagcaggaacagatgcttcgccgaagaagaagagcaagaagctgcccccattggcgtgtcagcctgccactgatccccctgccctgactgctcttcttcccctccttcttcttcctcttcctcccgtgcctttcttggatttggcacgcgatttggcttagctctgagaagcaccggctaagcttgctcgcctcggacaagattggtggtgcttggaaggtaagaaatggccaagaaatgtgagccgcgggggacaatttggcaggtcagaggatgctagtgttgcttgcctctctcccctcctgc

SEQ ID NO: 48798 - DNA, 359 bp, Oryza sativa
  unsure (1)..(359): unsure at all n locations
  Clone ID: PAT_MRT4530_51439C.1
aataaacatcatgcctaaaccacgcaggttttcaagtcagttttaagggccagcccaactcttgcccccttggggctttggcccacaaagggcggctgcttttcaagggttgcgccccccttttcgtttttcngttttccctcntgcccccaccgtaacctcctgcttggtttctaaagcccccgctttggtttccccccccttttggctttggttgctcctcccctttgcttctgggccttcttgttntccctttttttttgccccgctgctttgttccctgtgccctttctcgcttcccccttttctgtttgtttgtcctttcttttcctggctcgttcccctgtgtctcctggggc

SEQ ID NO: 48799 - DNA, 1923 bp, Oryza sativa
  Clone ID: PAT_MRT4530_5143C.1
atgatgctgttgtctgccgtccctggagccatcatcctcctcgtcggcggctcactactagcacagtgtctcgatcccacgttgccggcagcgaacacctcgtcgtcctggacgaactcggccgacgaccaaatccgctacggcgatggctccatcgtccgcgtagtgctcctcttgtcgcattcgcatggcgcctccagcgacgatgccgccttcgcctgcggcttcttttgcggcgcgccgtgcgaccgcaagagcttcctgttcggcgtattcctcgtcagcacgaacagcaccggcggtgtcgcggctgcagccgctgcgccgccgcctgtggtggtgtggtccgccaaccgcgacaggccggtccgcgacaacgccacgctccagctcagcgacgccggcgacctggtcctccgcgacgcggtcggcgcgttcgtctggtcgaccaacacctcggccggccatgccgtcaccggcgtgcgcctctccgactccggcaacctagtgctcttcgacgacagtggctcccccgtctggcaatcgttcgaccacccggcggatgtgcttctcccagggcagtacctccgcccggggatgaggctgacggcgaacgcctcggcggccgacttctccgagggctcgctctacgtctccgtcgggaacaacgccatgtccggcttcgttggacacgatccttcccagctctacttcacagctccggtcagtgacaccatggacacgcttgcaaacaccatggacgctccggtcagcatctctgcgtttggacggtcgccttcttcctcgtcggaaatcctgatctcgctgcccgtggcgcattcagttcagtatatccgtgttgagtctgatggacacatgaggctctacgggtggaattcatcgtcgtgggtgatcatgtacgaggtgctacagaagtacatcgccggcggcgactgcgagtacccgatggcttgtggcagctatggcatctgctctggtgccgggaattgcagttgcccatcagagattcattcctctccaatctacagagatcggccaggtctcggatgtaagctggcgacgccgatttcttgccgggatgtacgaggtattgaaatggtggagcttccaaatgtgacgtacttcaattacaacggctctggagcaatcatgcgtgacaaggtgacgcgatcagattgtctttcaggctgcgtagcgaattgttcttgcaaggctgcttatttcaagctcaggatgaacgacacaaacggcacatgtttccttcagtcacagctattctcgttgcacaaactccagactacagcaccaagcctctacaactccagggcatttatcaagttgaacaatatcacttttgcagaaagagttcgtcctatgaaaaagacgttcgggactagaattctagtgggtataataattggaactgtttctttgcttttctccattgctctgctcatcaggatgagaacccgcagagaacgagtggatggagaaaatattgaacatctgcctggaatgccaagaaagtttagttttgaggagttgaaagtagtcactggggatttctccagcaagattggtgaaggcgcatctgggacagtatttgaagggaagatagaagatgaaaacatcgcagtgaaacgtttggacagtgttggtcggcgtaaagaggagtttcttacagaggttcagactatcggcagcattcatcacgtcaacctggttcgaatgatcggattctgcgctgagaagaaccacaggcttctggtttatgagtacatgccaaatggattgctggacagatggatctttgatgaaaaagatggtcgccccttatatttatataagagatgtgtattttgtgaacaatcttacaaatcactttgtcggatgaaaaaataa

SEQ ID NO: 48800 - DNA, 543 bp, Oryza sativa
  Clone ID: PAT_MRT4530_51440C.1
atgctcaccgagctcgcgcaacggcgaggagacgacgggaacgcggcggcgacaagctcctcgaggaggcacggcgacggcgggactccggcgacgtccggcgaaagcggagggacgaccgagcgccagcaggacctggggaaggggatggcgggattaggagggcacgaggagacacccggcggcgtgaatcaccggccggaagaaagaagactagcgggtgctcaccggctcaggagagggaaatcgttgccgaaaggagcggaatcgggcggcaaccggccggcgacgtggggtggcgacatggagctcgagggaggtcaaaccggcgtgatttttggggaaaaggtggggcggcaattgccggtccctggcgatggggtggctggaggtctggttgaaggccctcgtggcatgcctccaacaatgtccatcaatgcaacagccattaaaaggcagagtggcggcccccttgccgcccttacggagggcggttttgctctgttcgggggccgcctgcaacagggcgacgagggcggcctg

SEQ ID NO: 48801 - DNA, 245 bp, Oryza sativa
  Clone ID: PAT_MRT4530_51441C.1
agggagcgcgaatggtccgtcccgtgcctcaaatgcctcttgcaaggccacatatgattcctcagatggctcccgatgtggcaacctcacactggcaaggaggatttgcaccattcgcagggactagccaaggtatccctacataccccaagtgtctgcggcacctatcggggggggaagtgttccatcgcgcggtggcagagtcgggggaggattcatcgcgcgatggcggtagggcgggctga

SEQ ID NO: 48802 - DNA, 502 bp, Oryza sativa
  unsure (1)..(502): unsure at all n locations
  Clone ID: PAT_MRT4530_51442C.1
cttccaaaaaagaaaaaaaaaactcgttttctcttcttctcttctcttctcttgttgcggcgaagggggagaggaaggtcgaggtcgccgagatgggcggcggcaatgggcagaagtcgaagatggcgagggagaggacatggagaggacaagggcgcaaggggagccactttaggccacaagaggccatgacatccagtgcaagntatgcatgcagctttcatctgccaccacctctgagaccaagtgcaaagagatgctgaggcgagatccgagagcgcctcaccgcgtcttccctcacctcaagaataatggcggtggatctctctgctcaatcagaggagaaaaganagctgcataatcnctagatcatcttgttgccaatnctggttgcctatgatgggctaactttggcactgctctcttctttggttgtgtnctcactaatatgaatctctatcacctctttcacgatattatcttgtgtgnattctgctggtca

SEQ ID NO: 48803 - DNA, 3312 bp, Oryza sativa
  Clone ID: PAT_MRT4530_51443C.1
atggcaaccatactggattctttgattggatcatgtgctaagaagttgcaagagatcattaccgaggaggcaatactaattttaggtgtaaaagaagatcttagagaactgcaggaaaaaatggaacaaatacgatgctttataagtgatgtggagcgaaggggcatggaagactcatcaatacacaattggatttctcgtctaaaagatgctatgtatgatgctgatgacattatcgatttggttagctttgaaggaagcaagctattaaatggccattcttgttcaccgagaaaaacaattgcatgtaatgggctttcacttctctcttgcttttccaacattcgggttcaccatgagattggtaataaaattagaagcctgaacagaaaactagaagaaatagcaaaggataaaatatttgtaacacttgagaatacacagtcatctcataaagattcaacatcagaattgagaaaaagttctcaaattgctgaatccaaccttgtggggaaagagatattacatgcttctagaaaattggtgagccaggttcttacacacaaggaaaagaagacttacaagcttgctattattggaacagggggaatcggaaagacaacacttgctcagaaagtattcaatgatgagaaattaaaacaaagcttcgacaaacatgcatggatctgtgtttctcaggactactccccagcctctgttttgggacaactacttagaaccatcgacgctcaatgcaaacaagaagaatcagttggcgagctacaaagcaagcttgaatcggctattaaagataagagttattttcttgtgttggatgatgtatggcagtctgatgtgtggaccaatctactacgaactccactgtatgctgcaacctcgggaatagttttgataactactaggcaagatactgtcgctagagaaattggggttgaggaaccacatcatatcgaccaaatgtcaccggctgttggttgggagctactctggaagagcattaacattgaggacgagaaagaagtgcaaaatctgcgagacatagggattgagattgttcagaaatgtggtgggctacctcttgcaatcaaggttattgctagagttttggcaagcaaagataaagcagagaacgaatggaaaaagattttagctaattacgtttggtccatgtataaacttcctaaggaaataagaggtgctctatatctaagctacgatgatttaccacagcatttaaagcaatgttttctttattgtattgtatatcctgaagactggaccattcaccgtgattaccttatcaggttgtgggttgccgaaggctttgtagaagtgcacaaagatcaactactagaagatacagcagaagaatactactatgagctaataagtaggaatctcctccaaccggttgacacatcttttgatcagagcaaatgcaaaatgcatgatctcttaaggcaacttgcttgccatctatcaagagaagaatgttatattggagatccaacatcattggtggataataacatgtgtaaattgcgccgcattttagctatcaccgagaaagatatggtagtcatacctagcatgggtaaggaggagattaagttgagaacttttagaacccaaccaaatccactgggaattgagaaaacatttttcatgagattcacgtatcttcgtgttttggacttgactgacttacttgtggaagaaataccagattgtgttggatatttaattcatctacgtttacttgatcttagtggaaccaacatatcctgtcttccaaaatctattggtgctctaaaaaacctccagatgttacacttacagcggtgtgaatctttgtacagtttgcccagcatgatcactcggttatgcaatttaaggcggcttggtcttgatgattcaccaataaatcaggttccaagagggataggaagacttgaattcctcaatgatttagaaggatttcctgttggaggtggaagtgacaatactaaaatgcaagacggatggaacttgcaggagttagctcatctttcacagttacgccggcttgacttgaacaaattggaaagagcaactcctaggagcagtacagatgcattgttgctaactgacaaaaagcatcttaaaagtctacatctatgctgcactgaaccgactgatgaagcatgctcagaggaaggcattagcaatgtcgagatgatctttgagcagctaagtcctccacgcaatttagaagatcttatgattgtattattctttgggcgaagattgcaaatcttgtgtgcatcttccaccaattggacagctaccaacttgaaataccttagaattgatggagcaagtgcaatcaccaagattggacccgaatttgttggctgctgggagggtaatctcatatccacagagacagttgctttccctaggcttgaattattggctatcaaggatatgcccaactgggaggagtggtcctttgtcaaagaagaagagttgcaggaggagaaagcagctgcagcagcccaggaagggggaaaggatggaactgctgcttcgaagcaaaagggggaggaagccccgtctccaactccaaggtcgtcgtggctgctgccttgtttgaagcagttgcaacttgtggagtgccccaagctgagggctctcccaccacagcttggacagcaggccaccaacttgaaggagctcgatataagaagagcaagatgcttgaagatggtggaacacctcccattcctctctggtatactttttgttcaaagttgtcaaggcctggagataatctccaaccttccccaagtgagagagctacttgtaaatcattgcccgaatttgaggcatgttgagatgttgggtggtttggagcagctatggctgtcaaagaatatgcagaagatctcttcactgtgggtcccagggcttgaggagcaacatcgccagctccatggagatgagcataagttggagcgctgccgcagggcacatgagaaaaaagtcgaggtgaaggtcgaccccatcggccgcaccgccgcaggcagacgcagcaagggcgatggcatccgcaatcgtcccagaatcgtggccgctgcagttgtcctcgccagcgccacaggagttgtcgctgccgcaggtgtcatcgctgcagccgtaggtgtcatcatcgcggtcacaggagtcgtctcggcgccgctgcaagggccgtggctgcagtggatctccaggaccccatccgcagcatggtcgcaggagtcgcagcgttga

SEQ ID NO: 48804 - DNA, 597 bp, Oryza sativa
  unsure (1)..(597): unsure at all n locations
  Clone ID: PAT_MRT4530_51444C.1
caataccctgtcctccctcttctctatccatcatttgccctgcctgacgattcttctgcccgtacgaagtctctgtccccgcgatctttgcatacccacccactttgccttctcagatgatcgctgggaagcctcacggcccttccccctgatcgactgcttgatctacctcgacacgatggtctacagcaaggctgcagtgcggtcatgaggtccaccttggaacagagcaaatggattgcagttaagaaatgcttatcgatattcaacatttcttaggtcagctggtcagaggctgggtcactttttggcattattgagcagaagatgttctcgcaattttcccctttactgtactgaacttataccatctattttcttaaatgtcaaatacttaattgagactgcattgtgtcactgacggttgcttgatagccaaaataaaaagagaaatataatataataaatttgtgcggnaaaaaaaaaacaaaataaagataaaagaacaacagatgaagggtgggggttttaaaagttcctagggtactggcgcgtgcatgccaagtcctagatcttgtatagcgacacctaaattca

SEQ ID NO: 48805 - DNA, 123 bp, Oryza sativa
  Clone ID: PAT_MRT4530_51445C.1
atgcctgctaagatattgctaggatttagtttacagctgtgcaaaatgataaatgttaattccttgggtgatgatcgtctcaagtctcaacataatgatatttgttttaccgaggtgacataa

SEQ ID NO: 48806 - DNA, 3249 bp, Oryza sativa
  Clone ID: PAT_MRT4530_51446C.1
acattgcaaaatagtctgttagcatgactcctagactagcatgtgcaacatagattatagaataaaataatataaatatcagaatgttacgccagtttttggaatcatttctggactgcattaatttattaccttcttctggtatttttggttgaactccctaaaacagtttgttggatgatggcaaccatactggattctttgattggatcatgtgctaagaagttgcaagagatcattaccgaggaggcaatactaattttaggtgtaaaagaagatcttagagaactgcaggaaaaaatggaacaaatacgatgctttataagtgatgtggagcgaaggggcatggaagactcatcaatacacaattggatttctcgtctaaaagatgctatgtatgatgctgatgacattatcgatttggttagctttgaaggaagcaagctattaaatggccattcttgttcaccgagaaaaacaattgcatgtaatgggctttcacttctctcttgcttttccaacattcgggttcaccatgagattggtaataaaattagaagcctgaacagaaacctagaagaaatagcaaaggataaaatatttgtaacacttgagaatacacagtcatctcataaagattcaacatcagaattgagaaaaagttctcaaattgctgaatccaaccttgtggggaaagagatattacatgcttctagaaaattggtgagccaggttcttacacacaaggaaaagaagacttacaagcttgctattattggaacagggggaatcggaaagacaacacttgctcagaaagtattcaatgatgagaaattaaaacaaagcttcgacaaacatgcatggatctgtgtttctcaggactactccccagcctctgttttgggacaactacttagaaccatcgacgctcaatgcaaacaagaagaatcagttggcgagctacaaagcaagcttgaatcggctattaaagataagagttattttcttgtgttggatgatgtatggcagtctgatgtgtggaccaatctactacgaactccactgtatgctgcaacctcgggaatagttttgataactactaggcaagatactgtcgctagagaaattggggttgaggaaccacatcatatcgaccaaatgtcaccggctgttggttgggagctactctggaagagcattaacattgaggacgagaaagaagtgcaaaatctgcgagacatagtgattgagattgttcagaaatgtggtgggctacctcttgcaatcaaggttattgctagagttttggcaagcaaagataaaacagagaacgaatggaaaaagattttagctaattacgtttggtccatggataaacttcctaaggaaataagaggtgctctatatctaagctacgatgatttaccacagcatttaaagcaatgttttctttattgtattgtatatcctgaagactggaccattcaccgttattaccttatcaggttgtgggttgccgaaggctttgtagaagtgcacaaagatcaactactagaagatacagcagaagaatactactatgagctaataagtaggaatctcctccaaccggttgacacatcttttgatcagagcaaatgcaaaatgcatgatctcttaaggcaacttgcttgccatctatcaagagaagaatgttatattggagatccaacatcattggtggataataacatgtgtaaattgcgccgcattttagctatcaccgagaaagatatggtagtcatacctagcatgggtaaggaggagattaagttgagaacttttagaacccaaccaaatccactgggaattgagaaaacatttttcatgagattcacgtatcttcgtgttttggacttgactgacttacttgtggaagaaataccagattgtgttggatatttaattcatctacgtttacttgatcttagtggaaccaacatatcctgtcttccaaaatctattggtgctctaaaaaacctccagatgttacacttacagcggtgtgaatctttgtacagtttgcccagcatgatcactcggttatgcaatttaaggcggcttggtcttgatgattcaccaataaatcaggttccaagagggataggaagacttgaattcctcaatgatttagaaggatttcctgttggaggtggaagtgacaatactaaaatgcaagacggatggaacttgcaggagttagctcatctttcacagttacgccggcttgacttgaacaaattggaaagagcaactcctaggagcagtacagatgcattgttgctaacttacaaaaagcatcttaaaagtctacatctatgctgcactgaaccgactgatgaagcatactcagaggaaggcattagcaatgtcgagatgatctttgagcagctaagtcctccacgcaatttagaagatcttatgattgtattattctttgggcgaaggttccccacctggcttagtacatcccttttatcttcactgacatatttgaaactcaaagattgcaaatcttgtgtgcatcttccaccacacaatcggacagctaccaacttgaaataccttagaattgatggagcaagtgcaatcaccaagattggacccgaatttgttggctgctgggagggtaatctcatatccacagagacagttgctttccctaggcttgaattgttggctatcaaggatatgcccaactgggaggagtggtcctttgtcaaagaagaagagttgcaggaggagaaagcagctgcagcagcccatggaagggggaaaggatggaactgctgcttcgaagcaaaagggggaggaagccccgtctccaactccaagttgcaacttgtggagtgccccaagctgagggctctcccaccacagcttggacagcaggccaccaacttgaaggagctcgatataagaagagcaagatgcttgaagatggtggaacacctcccattcctctctggtatactttttgttcaaagttgtcaaggcctggagataatctccaaccttccccaagtgagagagctacttgtaaatcattgcccgaatttgaggcatgttgagatgttgggtggtttggagcagctatggctgtcaaagaatatgcagaagatctcttcactgtgggtcccagggcttgaggagcaacatcgccagctccatggagatgagcataagttggaggtcaacgagtggttttaa

SEQ ID NO: 48807 - DNA, 5005 bp, Oryza sativa
  Clone ID: PAT_MRT4530_51447C.1
gttcccggctaaaaccccccaaactccaaagtccccgaggcctcgacccccgaaaaactctaaagccggcggcgcgtcgcgtgccactgtgcagccgctgctcctcttcccctcccctctcctcttcgcgcgctctccgattcgccgcgaaggaagaggatggaggagctcgcggcggcggcggcgcccccgcggcacagggagcggcggaggcaccggaggaaggcgtcgtcgacggacgcggcggcggcgtacggcgacgtgttcggcgggccgccgcagttcgccgtggcgttcgacggggtgccggcggactacggggaggtgttcggcggcgtcgcggcctcctgctccatcccttacctcgacctgcccccggccgccgcccgcgacgacggcgccggggcaggggcgtacggcgagatcttcggccggttcgacttcggggacttcgcggagccgtacgaggacctgctggcggaggcggtggcgttggcggcggagatcgcgtcgtcgagcgagagctcgaggtcatcagtcagaaaagaatctggccaactagatgctgatccatctatactccatcaacactattcaactgtaggttatgaccaacactttgatgaagacgaattttctccaatctcctctcctccggatagtgggaaacagtttagtatgtcatataacaaggctaccaggggaagaccagatgatatagttaaaatgactacttgtatggtggagcctccgataagttatgtagttgactctcgcaatatttcaaacaagtcagcaatggatcaagttgtagtagtggactgtgatacatttgcaaatggtgaaaaaggaagcatgggcctgacttttccatcaagttcaagcctgaagagtgctagtagtgattctgtggctgatcagaacctgcacacaccaatatgtcatccaatttctaagaatgattgtgaagatgaagattaccacaagaggttaagcacccattcagcatcaagtgaggaagtaccttcccctgactacccattcttaagggtctcaaataacagccttcacacacaacccatcaaagtacagccgcctttattggcaccatctaaattgcttaataaaaaggaaagtaaagcaaatggtgaaaaaggaagcacgggcctgactttcccatcaagttcaagtgtgaagagtgctagtagtgatcctatggctgatcagaacctgcacacaccaacatgtcatcccatttctaagactgattgtgaagatgaagattaccacaagaggttaagcacccattcagcatcaagtgaggacgtaccttcccctgactacccattcttaagggtcccaaataacagccttcacacacaacccatcaaagtacagccaccatccaaattgcttaataaaaaggaaagtaaagcaaatggagattctgaagtcagtactaactcagctgctgctgctgctgctatcaaagaagcaatggagtttgctgaagctcggttaaaagctgccaaagaattgatggagagaaaaggtgacagttttaaacttcgaaagaagccaggtcatcatagaggcacaaaatcgacagaacttaaggaaagtatggcacctgaagaggtgcgtgtttatgatgaaaagctgaccatgagaaggatagtgaaagaggaaaagacctatgaggagacagctttggtgaataagaatggagacagcagtgcagttaacttaactcactgtgatcacaatgaaaaaggggttctacaaccaaggaagcctcagcatacagcgcaaagtggctctaaactagaacaactaggaaagtggacatcaggtgctgaattttatgtactgattagccctgaccagaaatgcaaaactaactcagttacatgtgaaggagataatgttcagacaacaaatccctccagcaagctcggccagtttgagaaaggaaaaggagaaaccacttcaggggattttgtagggtgtggaaaatcatgggatggtggtgacatagcagagttgagaatggaacatgtaaatttgagagaatatgctataggttctacggaggatggatgcaaggctcctactgctccagaaatttcttttagcaatgaaaaacccacataccaagagtcaactgagacccatttcaaagaatgtgtgggggcacaaaattatcaagaacgatatggtgatgatggggcatttgagatttcatgtgtggatagttcaaagctacatgctccagaaatacccggtgcatctttggagtcttgtatatctggaggtcactgcaatggtaataaaagtccttctgatgctagtactaaggaaacaacatcattaggagaatctaacaaagaaaacaacaatatagaggcacttgaggttccatgtgctgatgagatgcagagccaaatattacaggaatatcatgaatttcgtaatgaaaatattgatgaaaagaaggcaagtcaagtgaaagtatcaaaattagaagagtcggtggaatattatgaaaccccaaatttccagaaaagttcgagtacagctcatggagagaccgaaactgttgagaaagaaaagatgtttagtttttctgatgaattacgcccgcagaataagaacataggaataactgaagcacctccagaatcactcatccacaaagaaattaagaaatttggaactgaggagaaagcttatattactttggaaggagatgtggttcaaaaatctggatctctggaaagggaagctaacattactttggaaagtgctagtgctaatgaaaatgaagaagcagaagaagcgaatgcatttgtggagggcattaatgtgatggaaacccatgttagtacatatggtacttctgttgaagattcagatcagatacaagactctgaaaacagaatggacggaatgggggatcttgtatctcatggtaatgaagaagcagcaaaagatccctggttagataatagcgagaagtcacaggtggaagaaattttcagccatgaagagggccagctatctgtcgaaggtggtatcgatggaggaccaaatgatgcatatgcaggagttaatgcaataaatgatggaaatggtaatgattctgaaactaaagttattattgatgatggcactgattttaacacgaagatgagcacatgctcaaaagaactgagtgcttcatttttagagtcatctgctagcatgcagcacttgtctcagattgacaagtctattgctgctcagacatctgataagagcacccctcttgaaaaccttggagaggattgcagagaaagagaatttccagaagaaaatagtacagcactggaacaagggcaagctattggaagtaaaatggaaggagatgacaaagataaacagtcaaaattaaatgtaaaggatcagaaatattttcatttggacagctacattgtacctaaatttacagagaacactacattgaattttgtccagaaattgatagatgagacccctgatggtcagagaattgaagggagggaaaatgtgaaaaagacactgagagaaactgagaaggaggtcttgcatagactagatgaagacaaagaaatatacaaaatggaaagagaaaaggaacaagctaaagagaggtcaagaagagaattagaagaagagaaggaacgggagagagagcgagcaaaagatagacttgctgttcagagagctacgaaagaagcacatgagagagcatttgctgaggcccgtgcaaaggctgaaagaatagcattggaaaggattaccttagcacgtcaacgagcatctgcagaagctcgagagaaagaggagaaggcaactgctgaagcagctactgagaaggcttctagagaagctagactaaaggcagaacgtgcagcagttgagagagcaactgctgaagctcgggagagagcaattgaaaaggcaaaagctgctgcagatgcaaaggagcgaatggaaagatttagatcctccttcaaggacagtttcaagtctactaatcaggataatcaactggacaaacagtttcagaagacagcttctaataactatgaaagaagcacggattctagtaatcaagtagttgagtttgagtcagctctgagacataaagcaagatctgagagggaacatcgcacagctgagcgagcggccaaagctctagctgaaaagaatatgcgggacatgctggctcagagagagcaagcagagagacatagattagctgaataccttgaccccgaagtcaagagatggtcaaatggaaaggaaggaaatctgcgagcattgctatctacattgcaatatatccttggttcagataatggttggcaatcggttcccctcacagatctcattacagcaactgctgtcaagaaagcatatagaagggcaaccctttgtgtccatcccgataaactacaacaaaggggtgctacaatcagacagaaatatatttgtgagaaggtgtttgatcttcttaaggaggcatggaacaaattcaattccgaagagcgatagctcgggatgtaggggacaataaattggatttttgattttctagttttactaaaattatattttattaaacaaatttcaaagcctaatgataaaaaatgatcgataacaaaactgtgaatagcgttgtggagagcggttttgatatgtgatctgaacaaaattacatgttgttaggctctaaaatttgttttaataaaatctaattttggcagaacgagagatccaaactatatagccttgatgttgatttttggtacctatgtaaatatatgcagtcgtagaaagcattttctggccattcttgactgaaaaagaatatcaattcaatagtaaagcatcagtgattcttttggggggctctgccggattcctgccgcccggcgagccccctctctctctctccctcgtgccgaattcctgcagcccg

SEQ ID NO: 48808 - DNA, 436 bp, Oryza sativa
  Clone ID: PAT_MRT4530_51448C.1
ggtccgaaaggggggggagcgggggggataacgaaaagattaaaggggggcggggggagggccaaaaacgccccctgtgaggaagggaattcgcggcgcggatcaacacgacaaacgaaacggaaggggaaaaaataaagcccagggagccttacgaaaaaaggaagccacaggaaaagaggggggctaaacagggggggccgcaggaaagaaagaaaccgagccaggcgaacggaggaaaaggacaacccaaaaagagagaaaagcggggcaagcaggcgcaacaaagaaatgaaccacccccagagaaaggaaaaacagacgaggggccggcagaggacggccctttcagagaagaagggagggaagcactctaggccgcccaaccaggggaaaaaaaagagcgaaaggagggcacccccggagggaacaaaaa

SEQ ID NO: 48809 - DNA, 239 bp, Oryza sativa
  Clone ID: PAT_MRT4530_51449C.1
ttgtaaaggtctccctcctcctcacgaatcccggggctctctctatctctgtcgctctctggctctgtctctctccatttgagccgagccctcgagaggcagcaccgatggcacccagggcagagaataagccggcagggaagaagcccgcacccggccaggagaagcacgtagtgaaggcgccggtggcgaagaaaggcaaagcggacaaaccgaatcgggagatcaaagccgcccaa

SEQ ID NO: 48810 - DNA, 2212 bp, Oryza sativa
  Clone ID: PAT_MRT4530_5144C.1
atggcgcctaagatggtgatcagcctggggagctcgcggcggcggaagcgcggcgagatgctgttccggttcgaggccttctgccagcccggctacccggcgaacttcgccggcgccggcggcttcagggacaacgtgaggacgctgctcggcttcgcgcacctggaggccggcgtccacggcgagaccaagtgctggtcgttccagctcgagctgcaccgccacccccccaccgtcgtgaggctcttcgtcgtcgaggaggaggtcgccgcctcgccgcaccgccagtgccacctctgccgccatattgggtgggggaggcatctgatatgcagcaagaggtatcacttcttgctgccgaggagggaatcggcggcggaagccgacggcctgtgcttcgcgatcaaccacggcggcggcggtggcgcggagaaagcgtcgtcgaaagggacgacgacgacggcctccagcagaggccacctgctacacggcgtcgtgcacctcaacggctacggccacctcgtcgccctccacggcctcgagggcggctccgacttcgtctccggccaccagatcatggacctctgggaccgcatttgctcagccttgcacgtaaggacggtgagcctggtggacacggcgaggaagggccacatggagctgaggctgctgcacggcgtcgcgtacggcgagacgtggttcgggcggtgggggtacaggtacggccggccgagctacggcgtcgcgctgccgtcgtaccggcagtcgctgcacgtgctcggctccatgccgctctgcgtgctggtgccgcacctgtcgtgcttcagccaggagctccccatggtggtcaccaagtaccaggccatcagcggccacaagctgctcagcctcggcgacctcctccgcttcatgctcgagctgcgcgcccgcctgccggccacctccgtcacggccatggactaccggggcatcatgtcggaggcctcgtgccggtggtcggcgaagcgcgtcgacatggcggcgcgcgccgtcgtggacgcgctccgccgcgccgagccggcggcgcggtgggtcacgcggcaggaggtgcgcgacgcggcgcgcgcctacatcggcgacacgggcctcctcgacttcgtgctcaagtccctcggcaaccacatcgtcggcaactacgtcgtgcgccgcaccatgaacccggtgaccaaggtgctcgagtactgcctcgaggacgtctccagcgtgctcccggcggtcgccgccggcggcggcgtgccggcgcagggcaagatgagggtgaggttccagctcacgcgtgcgcagctcatgagggacctggtgcacctgtaccggcacgtgctcaaggagcccagccaggcgctcaccggcggcgcgttcggcgcgatcccggtggcggtgcggatggtcctggacatcaagcacttcgtcaaagattaccacgaaggacaagccgcggcgagcagcaatggcggtggcggattcgggcatccccacatcaacctgtgctgcacgctgctcgtgagcaacgggagcccggagctagctccaccgtacgagacggtgaccctgccggcgcacgcgacggtgggcgagctgaagtgggaggcgcagagggtgttcagcgagatgtacctcggcctgaggagcttcgcggcggactccgtcgtcggggtcggcgccgaccaggagggcctcccggtgctcgggctggtcgacgtcggaagcgccgtcgtggtgcaagggagcgtgggcgagcagataaacggggaggaccacgagaggaaggaggaggcggcggcggcggccgtgtgcgaggggagcggcggcggcgagcgcgtcgtggactgcgcgtgcggcgcggtggacgacgacggcgagcgcatggcgtgctgcgacatctgcgaggcgtggcagcacacgcggtgcgccgggatcgcggacaccgaggacgcgccgcacgtcttcctctgcagccggtgcgacaacgacgtcgtgtcgttcccgtccttcaactgttagatgtgatgctgctgctgctaactgctactactacttgcctctgctgctatatatgatgctaacctagtacaaagtgatccagaattcaatttgttttctcggcaaaaccaaaatgaaaacgaaggtaaaaccaagtgaacttcagatcaaacaaaaaaaaaaaaaaaaaaaa

SEQ ID NO: 48811 - DNA, 193 bp, Oryza sativa
  Clone ID: PAT_MRT4530_51450C.1
tttctccgaatccgattccctttccattggcggcggcacctagccgtcgcacccagcggtggcgtcctcgtgccggaggagctgatatgtggtgccagtcgtgcaaggaggagtacgaggaggaggacgccgggacgtgcaaggagtgctactagcaggctagccatacggaggaggagtttaagcgcgagat

SEQ ID NO: 48812 - DNA, 213 bp, Oryza sativa
  Clone ID: PAT_MRT4530_51451C.1
atgggcaaaactgaagctgcaggtagtgcgagtttgtacccagggagcaaaagcgatccctgcggcgaaccttacaagtatacattacagtgcctgagcagcaacgactggaagattggcaattgccggtcgttgatggacacgctggccaaatgccgtgccaataatgaaaagatatatttgctagacgacatttgcccgatattacactag

SEQ ID NO: 48813 - DNA, 285 bp, Oryza sativa
  Clone ID: PAT_MRT4530_51452C.1
atgttggtgaaccccagcgagtccagcttgcggtgcaccaccgagccgaccatgatgcggtggccggcgatgaagaccttcgctgacttgtcgacgaggaaggacacggcggcggcggcatcgccggtggtggctcgtcgatcccgcatgcaggagctcgagcttgctcggcagctcatcgatcccgtggaggaactcgaggagggacagtcgcaatcaccgccgtcgtgcctcttcgcaccccgtgccaccgcgtgccgtcgcgtcgcgtttgtcacaccctaa

SEQ ID NO: 48814 - DNA, 402 bp, Oryza sativa
  Clone ID: PAT_MRT4530_51453C.1
accggtttgtgcatttgcgcaccttggcgtggaaggccttccttactcttcctaggaaggctcgggagccagagaaaggagagcacgcggaagctgcgcaccgcgtctgagccgctccacagcgtggggagcgcatcggcgactgcctctccgcccaccccaatgagctcgtggccgtctccgctcggctgatcaacctcggagaggtagtgcgtgacgcccacgagatcattgactgagacgcccacaccatctgctgacagcgtgtcgacaggaagctgaacgacggtgcttttgaagatgccctgacgagtgcacaggacgggatcgatatatcccaatgggtcgcccttggcatacgtccgaggcccggagtctcgtaatataccagggtgaatgcga

SEQ ID NO: 48815 - DNA, 882 bp, Oryza sativa
  Clone ID: PAT_MRT4530_51454C.1
atgggtgagacaatagcgtggaagattgatcttgatcttgaactgcgtctcgcctcgccttcccgtgtgccgccgccgccgccgatcagtagcgaagcttctcgcgccacggtagggactaatggcgcggcgagcaggacggtctccgacctggtcgttttcgccgcttcgttgacactcgccgcgccagattcggatggagtcgtcgacacggcgatcggccaagacgctgtgcttcccggaggcgatgcagcgagcaagaagcgcgccaaaaccgatcctgacgaggagaccgatggtgagacttcatgccgccgccggcctccaccacccaccgccgttgccgccgccgccgccgccgtcgtctcggagccggcgtgggtgcgtgccgagctcttccccctccatggcctccccatggacatgccgccgctccgcttcatcgtggcgaagctcttgcagcgctcggacttctacccgcagcaggcgcgcttcctcctcccgtccagcgccgccgacaacctccgcgctttcctctccgcccaagagggagaagcgtgcggcctcaacgaaaccagccgccgccgccgccgccgcagagaaaagctcgcggaagcgacacgcggtggcggcgagaagagaagggaggagccgccgaggtacgagggcgtgccggtgaccgtctacctgcgcggcgggctcgtgtgcgagctgaagctgagcaagttcaatggcaccaaggccacggtgatcaacggcggcgggtacgccaaattcatggcggacggtggcctcgtcaggggtgatcgcgttgaggtattggcattccggcggccgcctaattatcgtctctgcttcgtcatcgccaagaatgacggttag

SEQ ID NO: 48816 - DNA, 408 bp, Oryza sativa
  Clone ID: PAT_MRT4530_51455C.1
atggctgccggcgacgaggaaggaaagctcgggcttgaaggaaagaggccgatccgaatcgaactcgattccacgaacttccaaaacgaattagccgatgattccaaaggagaaaaggtagaggagatcccggagagtgtttcccctctattgatttggccggaaacggaaaggggcggccagattggaaggaaacagcggcggtggctcggcggcggcgcgctagggtttcggcccgaggaagacgacgggcctgacaggtgggacccacctgtcagcgtccaaacgcgcgcgcgcgcgggcggctgcggactgggccgacttgggccggggagagagagagaaggttttgggccgactttcggcccaaagccaaaagaagactttttaaaaactttttcaatttaa

SEQ ID NO: 48817 - DNA, 423 bp, Oryza sativa
  Clone ID: PAT_MRT4530_51456C.1
atgcagccacctggcctcgtcctcctcatccaatcacgaaaagagaccgtgcgattaatgaagcaaatctgggcgttattatgtggaggcagtgagacgcaagagatccgttcgaatggagaaagaggagacgaagagatcgagtcggagaagcgtgggacgggacggacaggtcaggacgagctggctgccggcgcccagaaaccggcgagcagagccggcgtggtggggcggcagcgagggatgagcaggaggaagctgcagagcgacgagtggtggcgcatccacgcgcggccgtgctggtacgggctgagcgatgggtatcgccgggtagtggctgaagacatcgttgctgataggtctgaaagggagcagtacaccaggatgtgcaagaacctatcaaacaacacttcgaagctctaa

SEQ ID NO: 48818 - DNA, 1155 bp, Oryza sativa
  Clone ID: PAT_MRT4530_51457C.1
aattcaggactaaagattttctgcaaacaaaaagccatggcttccaacaaggtagtgttctcggcgttgctcctcatcatcgtctccgtgctcgccgcgacggcgacgcatggcggaccaccacaaagaccaggtggtgtacagcctcggcgagcgttgtcagccaggaatgggctacccgatgtactcgctgccacgctgccgggcggtggtgaagcgccagtgcgtgggccacggcgcacccggcggcgccgtggacgagcaactccggcaggactgctgccggcagctcgccgcggtcgacgacagctggtgcaggtgctcggcgctcaaccacatggttggaggcatctacagggagctcggcgccaccgatgttgggcaccccatggccgaggtgttccccggctgccggagaggggacttggagcgcgcggcggcgagcctcccggcgttctgcaacgtggacatccccaatgggacaggtggtgtctgctactggctaggttatcctaggacccccacagaagagcattgaagttcatcatttattcaccatatgtatatatgcttcctgacaaatgaaagcactagttatttagcaaccccacagagtcatacacacagctagctttagtagcctagtgaccagttctcggggtcctaggataacctagccagtagcagacaccacctgtcccattggggatgtccacgttgcagaacgccgggaggctcgccgccgcgcgctccaagtcccctctccggcagccggggaacacctcggccatggggtgcccggcctcggtggcgccgagctccctgtagatgcctgacagcatgtgatcgagcgccccgcacctgcaccagccgtcgtcgacggcggcgagctgccggcagcagtcttgccagacttgctcgtcccgcggcgctggccgcgccacggccaacgcattggcgcctcaccaatgttcgacattgcgggagtgagtatgtcggatagcttattcctggccgacattgctcaccggggctgtagacttggtggtggtccgccatggtcgccatcgccgccgcgagcacggagagaacgacgaggagcaataccgagaacactaccttgttggaagccatattttgcttagtttgtgtaaa

SEQ ID NO: 48819 - DNA, 719 bp, Oryza sativa
  Clone ID: PAT_MRT4530_51458C.1
ctgactgacaggcatggtgcaaggtgcggggcagcatcagatcaacaattgcttgttcaaggcaatcttacaggggagcttctggcagccaacacagagcacgggcacacccaatgcacgaggtgttccccaggctgccaggagagggggacttggagcagcagcaggcaggcgagcacatcaccaggcagttctgcaacagtggacatcacacacaaatgggcactggtggtgtcatgctactggcttgggtatcctaggaccccaagaaccggtcactaggctactatagttagctgtgtgtgtgtgactatgtggggttgctaaataattagtgctttcttttgtcaggaagcatctatttatatatatgtggtgaataaatgatgaacttcaatgttcttctgaaaaaaaaaaaaaaaaaaaaaaaaaaaaaaaaaaaaaaaaaaaaaaaaaaaaaaaaaaaaaaaaaaaaaatacaattaaaattccaactttttcacaacctttaatctaaatctaacaccctccccgtaactttacaattaaataaaatgggtgaggggggtaaaagcgggggggtcttttaaaagaaataaattccctagcgcccggtcctttgcattttttccttttcttggtccccaagaatttaattatttgcccggcaatttaaaaattgagggggaaaaaaaactgtggcgaaccaataaattacg

SEQ ID NO: 48820 - DNA, 889 bp, Oryza sativa
  Clone ID: PAT_MRT4530_51459C.1
ttatttttgaaaaggaaaagaggattattgcgtcagcggctaaggtttgcggtgaaccgggtgcacggcagcggttcacgggaacggacggtcgagatagaacctatccaaaacggacggccgagatcgaacggtccacgaccggctcacggggaagggcgacgatgacgtcggcgatgacgtcaccaccggcgacggctcgggagcgcaagctcgccggcgaacgacggcgcgaggacgcaaacggagggcaccaacgggtagagcgcgacgcggcgaactcaccggtgaccaaagaagaaacggcggcggttttcgggtcgacggtgacggcggtgctccggcggtctccggcggcgacgaagaggcagacgaggacggcggtgacttgacgatcacgacggcgaccttcccgagcgacgacgacggctgaaacgacggcggcgcacggctggagcggcggcgacgacggcggctcgaagctacacggcgctagggcactacggacgacgagaggcgaaggcaaaggtggcggcgggggctaggaggcgacgacgaaggcccacggcggccggcgacgggaaggaaagatcggggtttgaaggaaagagaccgatccgattcgacctcgaatccacgagtttccaaaccgaattaggcgatgattccataagagaaaaggaagaggagatcgagaagatcatttcccctctattgatttcaccggatcgggaaaggatcggtgggccccacctgtcagcggcaccgagagagagaagagagcagcggctcgagctgggccgactgggccggggagagagagagagaggaggttttgggccggctttcggcccaaagccaaaagagacttttaaaaacctttttcaat

SEQ ID NO: 48821 - DNA, 1104 bp, Oryza sativa
  Clone ID: PAT_MRT4530_5145C.1
atggcgcccatcaacagctccaacatggagcagcactcgcagaagctcctcgagccggaccttcctgtgcaagtccgactgcagcttgccatggaagttcgggacagcctggagatgactcatactccagactatcttaactttcttagatgctacttcagagcattctcggccatcctcagcaacttcaccgcaccacagggcactgagaatgcggagcacaagctgcggaatgtggtgattgagatcctcaatcggctaccccacagtgaggtgctccgaccctttgtgcaagacctgctcaagctctctcttcgtgtattgacacaggacaatgaggacaatgcacttcttgccatcaggattgtatttgatctcctccgtaactttcgccctactgtcgaggcagaggtgcagccgttccttgattttgttgttaccatataccgcaactttcccaatactgtcacccatttcttcgataatcccaatgtcagtgccaatattgctgctgccgtgcccaaccagcatttggaccccactgctgatgccccaggcacggtggcagtgccaggcggtggacaactcaatccaagtgcacggtcattcaagatagtcacagagagccctctagtagtgatgtttttgttccagttgtatgctaagcttgtgcagacaaatatcccatacttgctaccactcatggtgtctgcaatctctattaaggggccagacaaagtgccaccacacctgaagacgccctttgttgagttaaagggtgcacaagtcaaggagctgctagttggcttgaagcaagttctcaacactgagtacaggcgtggtttatttcccttgattgacacacttcttgatgagagggttttgataggcacaggccgagtttgcatcgagacattgagacctcttgcctatacccttcttgccgagctggtgcattatgttcgtggagacctttctcttccgcagacgcagaaatatactgtattttttcttgatccagcattctgcaagattatgaaaactaggcacttcattgggggtgatatcactatcaccagtacaaactccactcttggaggttga

SEQ ID NO: 48822 - DNA, 734 bp, Oryza sativa
  Clone ID: PAT_MRT4530_51460C.1
acgaagagcctagctatcacagttaattaagatttttcacaaactaagcaaaatatggcttccaacaaggtagtgttctcggtattgctcctcgtcgttctctccgtgctcgcggcggcgatggcgaccatggcggaccaccaccaagtctacagccccggtgagcaatgtcggccaggaataagctatccgacatactcactcccgcaatgtcgaacattggtgaggcgccaatgcgttggccgtggcgcggccagcgccgcggacgagcaagtctggcaagactgctgccggcagctcgccgccgtcgacgacggctggtgcaggtgcggggcgctcgatcacatgctgtcaggcatctacagggagctcggcgccaccgaggccgggcaccccatggccgaggtgttccccggctgccggagaggggacttggagcgcgcggcggcgagcctcccggcgttctgcaacgtggacatccccaatgggcctggtggtgtctgctactggcttgggtatcctaggaccccaagaaccggtcactaggctactatagttagctgtgtgtgtgtgactatgtggggttgctaaataattagtgctttcttttgtcaggaagcatctatttatatatatgtggtgaataaatgatgaacttcaatgttcttctgaataaaaaaaaaaaaaaaaaaaaaaaaaaaaaaaaaaaaaaaaaaaaaaaacccccccccccc

SEQ ID NO: 48823 - DNA, 1554 bp, Oryza sativa
  Clone ID: PAT_MRT4530_51461C.1
atggatctcgacaagtccacctccaccaccacgtccctgaagaagctgcaggacgacgatgccctccctggttgtggaaccatggagcgggaatcaggaggtactgaacccgaacccatcttgggccgcatggttgcggttgaagattacatttcttgcggttttcttcctccgccttctgaatttcttcttctcgtcttgaatttctatggtctttccttgcttcatctcaaccccaattccatcgcgttcctcagtatcttttcttatctttgtgaggcctacattggggtagagccattccttgatctttttcgcttttactacgagctgcgctggatggaatccaacagggatcgcatcgtgacttcatatacgcaggcactccctctgacggatgtcatcgggccgcttgcggatcatcaggcggcggcgtcgctaaaggagggcgtcgccaaggaggcatccgacattgcttttgctactgccacgacgagtggcagcaacgttccgaagagagggaggaagttctcctccatgcttgggactcgtcggaaggcgcctgccccattggacgcgagatcgaggaggccagggcggcggcggcggcgtcgggcgaatgaacgcgccgacaagctagcgtgtgacctagcggaggtcctcgaggacctccagaaaatgagggagctggtggccggcaacgagaggcagcggcaggggctcgagcaccgcatgtcggagctcgagaacaacttgtcggagatccgtggctcactgcgggttacctacactggcctgcaccagctcgccagggagtgcggcgtcacgaccaccatcccggagaatcccgatgagttctcgctgacgtcctcgctcgcagaactggccacggcgatggaggagattccctccaagcatgcggccaggatcggggaagagacgtctaacgggatctacaccggggcgtgccacatcctcgcgtgcgtaaggttgacgcaccctgatctcgacctccggaggatcctggatcagggggctgctaatgacgcgcataagggcgtgatggaggaagtcggtgacttgggggagtctattctccccctttttcaagaagatgtcgatgtcgaggatgtccagcagcgcgggcagcctgagacgtcggtaatcgttccggcacttgtgctcgagccgtacgtgccgcaggacgatgtcgatcaaagactatccatgggggcggacatggcgatgacgtccctagaagaacaacttgacttagtcatttccgtgttgggcagacctcgagagcgcgttggccgatcgagatcgtcgaatccagtactgaaggacgaagttcgaggtggccgaactcgagaggactatggtggaagtgaagaaggagcaggccgtggaagctctccgaggtcgcggaggtgtggttcaactcgtacctcaagagttgctgcacggcgatggctgaaatctacagggagctctgagtacctcacgggaatcccgaggagtcggcggcctgatacatctatgaaagtgcattaa

SEQ ID NO: 48824 - DNA, 1012 bp, Oryza sativa
  Clone ID: PAT_MRT4530_51462C.1
ggaaaaagagatttattgcgtcagtgggctagggtttcggtggaccgggcgcacggcggcggttcacacgaacggacggccgagatcgacttgatccaaaacggacggccgagatcgaacggtccacgaccggctcacggggaagggcgacgatgacgtcggcgatgacgtcaccaccggcgacggcggctcggcggctcgggcgcgcatgctcgccggcgaacggctgcactacggcacgaacggagggcaccaacgggtagagggcgacgcggcgaactcaccggcgaccaaaaaggcggcggaagagcaacggacggcgacggcgacgaggttgaaacggcggcggagatcgggtcgacggtgacggcggtgctccggcggtcttcggcggcggtgaagcggcggacgaggacggcggcgacttgacgatcacgacggcgaccttcccgagcgacggcgacggctgaaacgatggcggcgcacggctggagcggcggcgacgacggcggctcgaagctacacggcgctagggcactacggacgacgagaggcgaaggcgaaggtggcgacgggtagaggagagctcggggaaccttttaaaggggctaggaggcgacggcgaaggcccacggcggccggcgacgggaaggaaagatcggggtttgaaggaaagagaccgatccgaatcgaacttgattccacgaacttccaaaacgaattagccgacgtttccaaaggggaaaaggtagaggagatcccaaagattgtttcccctcaatcaatttcaccggaaacggaaaggagcggccggattttggaaggaaacggtggcggcgcgaaactagggtttcgggcggcggcggccagaggttgacgacgaccctgacaggtgggccccacctgtcagcgggcggacgcgcgcgcgcagcggcggactgggccggactgggccgaggagagagagaagggttttgggccgactttcggcccaaagccaaaagaagatttt

SEQ ID NO: 48825 - DNA, 441 bp, Oryza sativa
  Clone ID: PAT_MRT4530_51463C.1
atggctggcagcgtcgggtacggctgtgtgggcgaggcgagggcgccgggcggccgggaggcggcagtgggacgcggcgctgcgggggaggaaggcggtggccgcagcagcagctgcgggtgttcgaagctccgccaccccctccaccgccccaagagacggttgggcacgggcgcacaacgctgcggcgggaggaaagcggcggccgcgggcgtcccgagctccgccgccccctccaccgccccaagcgccgatggggcacggcgctgcggcaggaggaaagcggtgactacgggcgtcccgatctccaccgccccaagcgccgacggggcacggtgggaggaaagctgcggcatcacgggacggccagccgcgccgaggaggatggtggaggcggcgggctgcaacgaggaggacaataagggcgcggcgggtgtttag

SEQ ID NO: 48826 - DNA, 287 bp, Oryza sativa
  Clone ID: PAT_MRT4530_51464C.1
ccaggaaacgattcaaatcctcatcccagagagttcattagattcaattaacatgcaagtgaacaggcatacaagcattttgaacaatggtagaacatggaaaaaaacatcatcaacagcagctagaggagcgccatcgatctgggcaggagataggaaggaggtcgtcgtcgccgaccgagcagcagccgagctcgatccgatgggggagacactgaatctgggaaccccagccgccggcaaggaggtgttggtggcgagactgtgggagggggagggggaggagg

SEQ ID NO: 48827 - DNA, 375 bp, Oryza sativa
  Clone ID: PAT_MRT4530_51465C.1
atggagcttactctcgatcacatcatggacctcgagctttgccacagtcaccgcttagacttccacggcgacaatatctgcaacgtcgtggagctccctctcagccatgatcacatcttccttgcgtacggccacgacggtgtcgacctcgctcccgaccacatcaacaatagcgtcctggagcttgctctccatcaacccatggagctcgagctcggtcacggccaccgcttggacgtccacggcaacttgggtatcaggaaattctgtatcaccggcaaaggagtcctccacgacatgaacctcgtcgaaatcatacaaaatcacctcggcaccatggtgttcgcttagagagttcacttcctcgcaagtcat

SEQ ID NO: 48828 - DNA, 1741 bp, Oryza sativa
  Clone ID: PAT_MRT4530_51466C.1
tttttttttttttttttgcactgaaccatcttttcatccaacgtctaatatttttttttttttatacgtagacaaaatcttattcatatatatgcatatgcatattattctcgtgccactgggtcccgtatatatatagtgaaaccaaagtactctggaacaattaatgacctggctaacaatatagtcgtacgtccgactatttgatcaggacaggcacggccttgagaggcacagcaagcacattggcagacttgaacttctcggacacgtccacgtcctccgccgtcatgccgccggggagcttccactcgaacgtgtgcagcatcgacgccagtatgaacggcacgacgcgctccgccaacggcagcccggggcacagccgcctcccggacccgaacggcatgaactcgacgtccttccccctgaagtccagcggcggcgccctctccacgaagcgctccggcacgaactcgtcgggcctctcccacgccgccgggtcgcgcatgatcgcccacgcgttgaagagcaccgtggagcccctgggcaccgcgtagccgccgatctccacgccgtcctccacggcgaagtgcggcagcagcagcgcgcccaccgggtgcagcctcatggcctccttcagcacggcctggaggtagggcagcctcgccgcgtcggcctcctccacaacctccttgtcgccaagcacatccctcagctcagctcgcgccttggccatcacgcccgggttcttgagcagctcggccatcacccactccaaggtaagagccatggtgtcagccccggcaacgaaagcctcgaacaacatgtcgagcacgttgacccgatcgatcttgccggcagccatgagctcgaggagtgagtcgaggaaatcgttatggcttggcttgttgtcgcggatgtgagccaaacggcggtcgatgatgtcgcccatgatggagaacaccctgttgaaccgcttcgtcgtccagcgccgcaggccctgcaggtccagcggccggaggaacgggtagaagtcggagatgttgggcttcccgaccaccgagatgatgtcgtccaccacctcccgcaggtcgcgagccatctgcgagcccatgtcgacgatgtcgatggagaagtaggagaaggacacgaggttgaggaggcccgtgtgcatggcctggccgaggagcacctcctcgccggcgtgcgcgcggaggtaggccatgaggtcgcccaccttccgctcgcggatggggcgcacggcggcgaggccacgcggggtgaagacgtgggagccctggatcccccgcagggccttccaccgcgggtcggagctcgggatgaacaccatggaccggtcggcgaagccgcacgcgcggaaggtgtccggggtggcgcgcgcggcgaggtggcggtcgtacttggtgtacgcctcgatggcggcctcacgggaggagatgaccacgttggtggcgaggccgagcttgagcgtcatcacggggccgtggacgcgcgccaggtccctgagcttgtggtggaacgacgtgccgccggccaagtggaggttgccgatgagcggcagcggcgtcgggcccgggggaaggggcttgcctcccgcgtggcgtcgtcgcagggtggagaggtagaagaggacagcgacggagagagctccccatagcagccacacctggctattctccattactttgctaatcgcttaatgttctttttctcctcgtgc

SEQ ID NO: 48829 - DNA, 566 bp, Oryza sativa
  Clone ID: PAT_MRT4530_51467C.1
cccgggctgcaggggttccccgcgcggccggcacgcgcgcaccgccaccaccaccgagaataatggcggcggcggcggcagcggcggcgaacggggcggggggcggaggaggggtgccgcggccgacgaacccgatggtgacgccgctgctcaccgacctctaccagttcaccatggcctacgcctactggaaggccggcaagcacctcgaccgcgccgtctttgatctttacttccggaaaaatccctttggtggtgaattcaccatcttcggtggccttgaggagtgtataagattcattgctaacttcaagttaacagatacggaaataacattcctgcgatctgccatgcctacatgcgaggacggcttctttgagtaccttagttcaattgactgctcagatgttgaggtttatgccatccctgagggttctgtcgtattccctaaagttccactgatgatcattgaaggacctgttgcggttattcaacttcttgaaacaccatttttaagtctggtcaactatgcatccttggttactacaaacgcggcaagacacaga

SEQ ID NO: 48830 - DNA, 300 bp, Oryza sativa
  unsure (1)..(300): unsure at all n locations
  Clone ID: PAT_MRT4530_51468C.1
cttggtgaggattcgccanaaaaccnaatgaanggatcntnggtacgancgcatatnacaggtccnagctggtctggtctcctgttcacgggaantacncctgagaatacacagntnnngccnccccttattgangcaaaattgtgagtgggtgcatatcaacaaggaccccctanggggggcccnggncccactcccncncnccatgantnttanttccgtcctncgggtgacctntgacaccttcttgnctgggannaccgtgtcgttnncncacccattctccatgcnccaattccc

SEQ ID NO: 48831 - DNA, 646 bp, Oryza sativa
  Clone ID: PAT_MRT4530_51469C.1
ttttttttttttttttttttttttttttttttttttttttttgtcaagatgaaaccatttagactttattacagcaagcaataaattaaaacgtagatacacatgcatgcattacacattcatgaccattattttcgtgaacaagcaaggtgacatgcatgcattcaccaagataaaagacttaaattacaagggtgttactgatgtttgatgatcaacaccaagctatagcaagcataggtgcgctctggcagctgtctacaacttaacccttcttcattcttccagtgcataataatccattaatccacccaaagagatcaatctctagctagacaagagccacacacacacacacacacactaccagttatatactctgttgttgcacccatcaaaccatgagcatacacgtgcatagcatcaagaggaaccagccttttcagcaggatggctgctcctgatgttatgcagctaattaacccaaatgcaagcatgcatgcatgtgatgtaatatgtaagatatgatctctatatttccattgattcttcagctagcttaattagccagccgagccagccatttcattggccatggcgcccacagagatcaccggaccatgcatcgatctagcggccgaaccct

SEQ ID NO: 48832 - DNA, 1155 bp, Oryza sativa
  Clone ID: PAT_MRT4530_5146C.1
ggtcgcctcctccaccgccagccgcgcctctcgtgccaaaccagcctcctccaccgaacgcgcctctcgcgccaatccggcctccctccatctgccgcgcctctcacgccaagccagcctccatctccgccgcccgtgcctctcgcgccgagccggcctccgctgccattggctgcgcctctctgcgctaagccggtctccgacccctcctccgtactctcccgcaccggccagatgcagccgtctaccacgccctcggctagccaatcgaggccaccatgtcacctcccaccaccaccacagccgttgctgccgacggccacctcgccgccggccagccgcagccccatcacctcgtccagccgctaccgcaaacgtcgccacaagctccacgtcgctgcctccgccgcgagagccccaatgccacagcagccgacagccgccaatgccgtcgaccagccacagtgttgtcgccgccgacaagccgttgttgccaccatcgccatgaactccgcgtcgttgccacagtcgccgttgccccgtgctcccgcgccgttgccgccgccgacatcgccgcgagctccgcggtgccgccaccgccgcgagcttgccacgcaccggatccgccctcgggggggcggagggggggcggatccgcctctgcccgccatcaccatcctcaccggcctctgggcaacggcctctctgccatcgccccgcttcaaccgccgcctggcgacgctcggcctcacccgcgcccggccacacaaccgtcgctgccaccgcctcttccccgccgctagcacgcacgcttccccgccgcccgccgccgccccgcgtcagccccaccagatccggccaaaacgacgcggatctgggcgggggtttccgccgccgccggccctatccgccgccaccacacaacgccagacaccgccgccaccactccgccccgccgccaagcgccgccccgctggatccggccgggcgggcgcggatccggacggttgccaccatcgccgaccggccagctccccgggccgcccgagcacatgctgggcgaagccttgccgccgtcgtccccgcggccgcgcggctttgccggcgcccgctcaggcagcggtgaggcagagaaggattagagacattgtctga

SEQ ID NO: 48833 - DNA, 368 bp, Oryza sativa
  Clone ID: PAT_MRT4530_51470C.1
ataggatgcgtcatgtgaggaaccctgaaagcagggtaggaaaaggctcagtctcaaattggttgcaaacatgagcgtatttccagagctcagctccatccgttacagtgatggcttgacgactcaagaaggccaaggggaacactctggatttcccaaagtttcgtacaagaaccactagtctgacccaaagtcatcaaggacagtgagtcatggcaagtgcgacggcgaggtcgaagacatcaggcccgcggcgtgaacatggtttatatccatggactttcggggcaccgtttctttagtgtacatcagactgtctcatagccatcatcatatggggtgttcgccgtagagtagcttttttcaac

SEQ ID NO: 48834 - DNA, 1841 bp, Oryza sativa
  Clone ID: PAT_MRT4530_51471C.1
gaacaacaaaagaaactcacttgtaacttcgtactaagctaaataaacaaaagaacgacgttggtcaaaggaaacaaacaaaagttggaagatactgctaaattgctaactgaacctggctgcttccactattttcaccgtcttacttcgtgctgcatgtgtcgaattcacagtggtttgctacttggtgctaattgctaccagacgctagctagctagtgctattacaggattggtgagctactcgggttcctctcccacggatttgcctggccgccatgggcggcgccgaaggtctccgcggcgacggtggcactcccggccaagctgacagcgccgccgatgggttggatgaatgtcgggaagcccctgcttgtcgacgcgcctgtcgggctcactccaagccccaagaaatctagtgttgccggcttggcactgaacagtgtggactgacccatcatgagctccggcaagctcaccggaccgcctgtcgcgtcgtatggtaacccgaggccgagcccggaggacagcattggggatggctccggctgtaaccgcggcggccattcgggcagcgaactcgccgggagtggcacttgcatggtttcttggtggtgatggtggtggtgctgttgctgctgccctgacgacgaaggcggcgccgacgatgacgatgacatgtcgaggcccacgcagcggagaaaggacgagctagacgaggtggcgcccatctgcgcggccttctgaagcaacgccgtggcggacatgtgcggcgacggggacggcggtggcggcggagcgaactgctgccggtcagctggtacaggcgccgtaaacagcgacgacgacgcgttgggcgcgaggcacagcgccggaggcttggcaggcaccgcgcgctcctgatggccacccgctccaactccgatggggtccgcgtactgcggcgcctgggccaccgacggcggtgcaaacatgctgctaaggaggctttgcgacgtcggcgccacgccgctactgctgctgctgacacaatcattaggagcggcaaccggcggcggcggaggagcagtaactggcggcggcgccggcgccggcgccggcgtggcgaactgatccagtgcagcatcccgatctcgttgctccggttgcgccgcgggagccggagctgcggccggaggaggtggcggtgctggcgccggcaccggcgcgggtggtggtagaggcgcttgcggcggcggcgcaccggcagaagccgaggtcccgtcctcgtcggccggcggcggcggcgccgcgcgcgccttggcgctctcctcggccagggcgtcgcagaaggcgcggtgggtgatgaagctgtccctccgtgagaataaggtgccgcagtcgcagcggtactcgcgggagccgcaggtcttggtgtgcgccttccagtcggactggacggcgtacttcttggagcacttgtcgcacttccacttcttctcgccgtgcttgcggcagaagtgcttcttgatgccggtgaggtcgccgagcgcccgcgacgggtcgtggtgcacgcacgtcggctccgggcacacgtacacccgcttccgcacctccttcccgctccgctgccgcagcttccacggcaggttgtgcccgcgccggtgcagctgcaggttctggtcgcgctggaaccccttgttgcagatctcgcaaacgaacctgttcgtcgccagcagcgtcttgggcgacagcgcgatcacctccgcatcaggatctgcaccaccacgcgaacgaacgctcgatcggtcaccgtcgccatcgatcatctcgccatcacgcataactctggcattagccat

SEQ ID NO: 48835 - DNA, 591 bp, Oryza sativa
  Clone ID: PAT_MRT4530_51472C.1
atggcgcaggggaatggaaggcagctcactgaggcgacggctcgatggtgtgggttcggcggcggggcacgacggtggcgcagccgttcccggcgaatcggagggtttcgggcttcggctttgggagtggaggttgagggtggcggtgtcggcgggaaacacgacgtcagcggggcagagggaaggctagcgcggcatcggctttacaggatttgcagagggaggggtcggcggctccgggttagcgaggcgcgcggcgaggccggctttgcaggcgggagacttggaggcaggggcatcggctttgcagacggcagacgcaggtcggcggccctgcagagggaggcagcaacggtcgggttcgtcgcgtctcgtcgctccgggcagaggggcggcgtcggttgggcgtggcggctgcgaggcaagcgctgggcgcggcagggcatcgggcagaggcggcgtcagctttgcacagccttgcagcgagattcgcgggcagaggaagaatgggcggcttggaggcgacgaccttcggctcgcatcctatgtgttcgatggaatgcctgcaaggaaagagaggggaagaaatag

SEQ ID NO: 48836 - DNA, 2143 bp, Oryza sativa
  Clone ID: PAT_MRT4530_51473C.1
ttttttttttttttttttttttgttcgccaagaggaaactcttctaatatatgaaaacttcttacagtcaatattctgttcggtagataaggaggatttgcgaagcacggcaaaattcagacaggtccattccatggcgatgcatggaatccctagtgtgattcaaccaatttgaatttagcataaacactacaacaacataggtatttagggagttaaaagtaccctgtctgaaattagatgcaccaggtgtctgatcagtatcttctgatgtcctttggaggcttgaaattgataggatgggtctctggagtggctgacaaatcttccttccacatttttattgtcttgtcagcttcacatgtcaccagccgtgatccactaacatcgtatgaaagggcatatatgcatgcctcactcttttttgttttattgagtaatctgatttagccatcacctttttctttactcagatttagcaattgtttgagcagtgacagacataaacattatcatccattgacaccattgacagcatcatagagtagtgacacataaactaaacatcatagctaaaacatgccgacgaagacgcgacggaacacggtcacatatgtatatgtgcgcgaatcaacgcatctatcacacggcacatcatgacacagtagtaataattcaaaacagcaagcagcagcaagtaagcacaccggagcgagcggcggcgggcggtagtagtagcagattcgggtgatgatggattcgattgcggttacttcttgaggctgccgcggacgccgggcttgggcttggaggaggaggcggcggcctcaccggcggtgagctttcgtccggatgtcccagaccctacaaactgaatcgcgaccaccagtcagcaagatatcgattgttggatgtagagcgaggcagtagcagcttcgggtggcgcgccggggggtggagctgcgtggccctgtgggcgggcgcggtggtctgggagaggggggagtcgtgcttgggggggccgcccttgtcgcgccgcagccggtcctgctgcccggcctgcgcgccccccctgattgttttgtccgccccggtctagaccccaactgtgtgccgttggctcacagcaagcccacgaatttgttcaatatggccagtcaatgtaagcttcaatgttcctgatgcaaggtcccagatcttaatcgtcctgtcggcagaacccgtacagaaccattcgttacttggatcaaatgcaattgaccgcacccatcccaagtgaccactgatcaccctataattcttccaaggagcatgccagacaggccgtggccatctacttggtatcctttccatcagtgcagatgtagagaatctgtcagatgaaccaggaattgttatagttgtattcttgcctggtatcgttgaatccggtgctttggggagcatatgtggtgcaggaacaatagcagtactgctgcctttgttatcagcatctttgacatcttgtgttcctggaagcgccaatgcagttgaaggtgccgcagcactcttgacctgtcctcggccctgatctgttggtaggttcttcaccgcgctgtactctgcattcaccttgcagccgacacgaacctgcttactctccggatcgggagtgaagaggagggagtgggtgggcgcgaagaggtcgtgcgagcgcttgagcgacttgaggctcagcttcttcagcgactgcggctccaccggctccgccgtcgccatgacgacttcctgctgcgatgaacgccgccggagatacggcttcccctgctcttacgccgcgtgagccctgcagatccaagcccgcctacctcctccccgtcgggccccgcccgtcgccgccggccgccctgctccggtggtgtcgctgctcgccgaggcggaagagagagggggaagcagccgctttcagcgcggggctccctctttcgcgtccccacccgcatcctcacgctctctgtctctgcccccgacgtcccgctcggccccgccgtcgacgagtcctacacgctctccgtgtgctcctggactccggatcggccgatatctccgccaccacgccatggggcatggggcgccatatccgctctgcccgccgcccgcccat

SEQ ID NO: 48837 - DNA, 627 bp, Oryza sativa
  Clone ID: PAT_MRT4530_51474C.1
atggcgacggcggagccggtggagccgcagtcgctgaagaagctgagcctcaagtcgctcaagcgctcgcacgacctcttcgcgcccacccactccctcctcttcactcccgatccggagagaaccctaacggcgctgtttgctaaactgtttcccccctttggtttggttgttgtggcggacggcagtaagcaggttcgtgtcggctgcaaggtgaatgcagagtacagcgcggtgaagaacctaccaacagatcagggccgaggacaggtcaagagtgatgcggcaccttcaactgcattggcgcttccaggaacacaagatgtcaaagatgctgataacaaaggcagcagtactgctattgttcctgcaccacatatgctccccaaagcaccggattcaacgataccaggcaagaatacaactataacaattcctggttcatctgacagattctctacatctgcactgatggaaaggataccaagtagatggccacggcctgtctggcatgctccttggaagaattatagggtgatcagtggtcacttgggatgggtgcggtcaattgcatttgatccaagtaacgaatggttctgtacgggttctgccgacaggacgattaag

SEQ ID NO: 48838 - DNA, 216 bp, Oryza sativa
  Clone ID: PAT_MRT4530_51475C.1
atgtgtgccgctgtgcctgtgaccctgggtgcaatgtgctgaccgtgtttccaacttcattcccaggaaccagaaacccatgtttattaccacctatagacggggaaccaacatttcacggcaccgattgtggttttgcttatttcctttttggtgtgcacacgaggtgtttgcctataatgtctgaaagagcttgtgtataaaaaaaaaaaaaaa

SEQ ID NO: 48839 - DNA, 925 bp, Oryza sativa
  Clone ID: PAT_MRT4530_51476C.1
gttcgccaagaggaaactcttctaatatatgaaaacttcttacagtcaatattctgttcggtagataaggaggatttgcgaagcacggcaaaattcagacaggtccattccatggcgatgcatggaatccctagtgtgattcaaccaatttgaatttagcataaacactacaacaacataggtatttagggagttaaaagtaccctgtctgaaattagatgcaccaggtgtctgatcagtatcttctgatgtcctttggaggcttgaaattgataggatgggtctctggagtggctgacaaatcttccttccacatttttattgtcttgtcagcttcacatgtcaccagccgtgatccactaacatcgtatgaaagggcatatatgcatgcctcactctccaatgatccaggttgtactatagtctgatcttgttgaaagttatggccactcttccaatcccaaaaccagagactcccattatcccctccagttgccaagacaccatcttcatttacagccattgagtttatgatggttttctgctgggacagcatattgtgtagaaattcgcctttgggcaggctaaacttctttatattgtctgctgatgcagatgcaaacgatttctcttttggatgcagcgccatagcccgaactgatttcttatgatgtgtaagagtacacatagtccttccagctacaaggtcccagaacttgatagttgaatcatgtgagcccgtgacaacttgtggatccgtaggacgagcaaacactgagcatacggtgttatcatgaccagttaaagcagaaacatgagctttcgttcggatgtcccagaccctactaactgaatcgcgaccaccagtcagcaagatatcgattgttggatgtagagcaaggcagtactccccactcaaatggcc

SEQ ID NO: 48840 - DNA, 244 bp, Oryza sativa
  Clone ID: PAT_MRT4530_51477C.1
ccccacccgttcctgggcgctttggggtttcctttttttaacccggaatttcctggcggtgcctttgggggtaccccttttttttttaaaggggttttttttaacctggggcaaacaaggttcaaaccggtttctttgggaaaaaagttttgggttccaaattcgcaaactaattcaacttgatgggtttagggttaatgccgggttgcccaatgggaaaccttacttcccatttttttttttg

SEQ ID NO: 48841 - DNA, 408 bp, Oryza sativa
  Clone ID: PAT_MRT4530_51478C.1
tgtggttttgagagagcaaacggatttagccatcacctttttctttactcagatttagcaattgtttgagcagtgacagacataaacattatcatccattgacaccattgacagcatcatagagtagtgacacataaactaaacatcatagctaaaacatgccgacgaagacgcgacggaacacggtcacatatgtatatgtgcgcgaatcaacggatctatcacacggcacatcatgacacagtagtaataattcaaaacagcaagcagcagcaagcacaccggagcgagcggcggcgggcggtagtagtagcagattcgggtgatgatggattcgattgcggttacttcttgaggctgccgcggacgccgggctagcgcttggaggaggaggcggcggcctcaccg

SEQ ID NO: 48842 - DNA, 326 bp, Oryza sativa
  unsure (1)..(326): unsure at all n locations
  Clone ID: PAT_MRT4530_51479C.1
caaaagagaatgggctacaaatctccactcaaatnatacaaatacacagtgagcacgacaagcgttcaattattcatgcagttgtgtcatatcacaaagggtctaggtacaataattttttcattgctggccaatcaatcaatgatcatcatcagatcatcaccatttccagaagactttggatccgcacttgtacttctccttcccctcgcactctatctcaaaatcatctaagatgaatgggactttcttctgcttggcaaagtcctggcagcctgttaaattttatgggaacttgcaacttcctaactctactgtgtacaccc

SEQ ID NO: 48843 - DNA, 363 bp, Oryza sativa
  Clone ID: PAT_MRT4530_5147C.1
attcatttgcgtctaccttgcttccgagggctccgctcggcggtgttaaaccggctagagggattactctcctccaaggaaggcagaaatggctacctaatgtctaggaaagacattacccaatatgacatttggttcttcagtggaggagattcttatagaaaagcttattgtgaaggttgttctgcctgaaggttcaaaggatattgatattttagttccattttaacaaagtaagagcaagaggtgaagtattcacaccttgatatttctggaaggccagtagttgtccttggagaaacatgatgttattccagagcataatctatattttcaggtttactatcagtttaacaacatttt

SEQ ID NO: 48844 - DNA, 678 bp, Oryza sativa
  Clone ID: PAT_MRT4530_51480C.1
tcctctattttgggcgccctctgtttattcctgtgggttttttgtatgtgtggcccatggaccaaaattgggttttctttaaatgttatggaccattggacaaaagttacagtttagacccgtgttgtaccatggcctgtataaatgggaggcgggatgccctcttatcccgaattgaaccatgctaattaatagagattagagtgaaaaaatttgagggacaggctagcagcagtttacccttaccaacatgtccatgtcacaatcccaaccaagtgaaagtgaccaccaagtacagcaccccaaaaaaacatccggttcctcctagctcattcacgggcctaaaaccaagtgaccataaccacatgaggaagcatttgatcacaggagttcttagtttgtcgacaacaaacttatgccgatggttcggcccaaccgtcaggtttgtctgtgtccatttgctcggcagtaggctcctgatcctgggcacctccctcgcttgtcggctcttcagcttcaccggcaccgttggattgctgctgctgctctggagtttgaggctcaggcgttgttgggctttcagtcggaggcgtaggcggaggaggggtctgtggcttcggtgcaggtttcggctttgacataatcggtctgcacgacctgtcaagtgcttcagctttc

SEQ ID NO: 48845 - DNA, 241 bp, Oryza sativa
  Clone ID: PAT_MRT4530_51481C.1
ggatccccgggctgcaggaatcggcacgaggctggctgatttgtagagcaaagctacctccatatggcggttctttgatatcttctttttcggcgatctttgatttcctcacatcttgagtgcttcatgttgggaaagataaggccttcctccattttagcatccctctttctggatctttctcatctttgattattctaggggtatgttcttgaagaatctaatctctagttcttgattt

SEQ ID NO: 48846 - DNA, 738 bp, Oryza sativa
  Clone ID: PAT_MRT4530_51482C.1
atggcggcgggcccacgtgcagccgcacggcttgccgtggaccgcgcgcacgggagggaagatggagggagggggcggctgactgggcgccggcttgacccggtcaagcggggccgacggctgaggtggcgccaacgtgggaagggagaggaagccaggcggctcatcggacggctcacggcgcgcggcggaatccggcgaacggcggcgagccggagggagatgcgggcaccagcaaaaggaggaggagacggggaactcattccatggcttggattggagagaggggacaggacggtggccggctgcagtgacgaagttcgccgggatgccgatgcggatgagcgagaaaatggacaaaggggtgcggggttgggcttagctgacgcggaaaggaattgcgacacgcacgcggtgacgcgggacccgaaggtcgccagcgacgcgcgcgcggcggcgctatgcggcggcagaagaaggcggcacggcacggaagcaaaggagaaggccggcggctggggcggcggttcggggagagtcaagggggttcaaggagggtggcggcacgaggaattgacaaaagggaagccgacagcggcggattttgatggcaatcgtcggcggcgaggaaagagggaaagtggtggcggtcgacgagggctcgattccgggcggcgggagcaccaccgggaccgagggaatgcattcccaacctcggatggaacggagggacactga

SEQ ID NO: 48847 - DNA, 291 bp, Oryza sativa
  Clone ID: PAT_MRT4530_51483C.1
atggaccggatcgatgtggaggccgacggcgagctagcggtgacgagtatatacgtacaccggcgagcgaggtggcacggcgcacgcgcggcgcgtggaacttcacgtgcgcgcgcgtatatgcgcgccggcccgggggtcccccccccccccccccccccccccgcgcgcgatggcgacggcgacgcgcgcgcgggtcctttcgcgtgctcgatatcgctagacaaaagaacgacggcgacgcgcgacgcggggcgcgcactggtgtgcttctccacgaagatcaatcgt

SEQ ID NO: 48848 - DNA, 776 bp, Oryza sativa
  Clone ID: PAT_MRT4530_51484C.1
ccggccggggatcggagcggagaaattccccaactctgctcaccctcaccgttgccgacgacttcgtgcggcggcgaagaggagaggcgatgggagggggagacgccagcggcggcgacgggccggagcaggagctgaagcgggctgctgcggcggcgtacaactacgagggcgacgcgcgctgggcggagtactggtccaacatcctcgtcccccctcacctcgcctcccgccccgacgtcgtcgaccactacaagcgcaagttctaccagcgatacatcgatcgtgatttggtggttgagccgatgtcatccactggttccacccagccaagcggaccagaagtaaggtcttcgtcctcctcatccagtgagaatgtcagggcccgtagttcaggatcaagttccagatcagctgcaccaccgcccccaccgccacaaacagacagtgctacaaatcccttacggtttgatgcacggaccatacacttctccattaatgcctgggtacttgttgttgctggtctggggatgcttccaattttgccaaaacatcttgcagatagagcctgcaaactttcattgctgggaacaatactctcctctgcatactctctatacagcacttatgggaaaccaagagcatggaacatgcctgcagtccagggttggttgcaagctgtacttggaaccaaggattttatccatttgatgttctctcttatgctcttcacgtctcagttgcacttaaaaagtaatacgtggtttccctttcaa

SEQ ID NO: 48849 - DNA, 411 bp, Oryza sativa
  Clone ID: PAT_MRT4530_51485C.1
atggcactcgctctccttaatgttgttctgcatcgagtacaatgccccatcagctctaagatactgagcaacaaaggtgaagaactcaccggtaactcaaagggtaagattgctcgccattttcccattcctcttgacgctggatctcctcttcatcgcaaccttcgtgctcgccatctacgttgcctcatgcatcaacaactcgacaagcttcttcgggctcttgtgcgccgttctcgacgtgacaggggctgtggtgctggctttgccggccgtggcccccggtctcctccctctggcttcgccagacatggaggaaacgccgcgacgatggaccaactgcctgcagaaccaccagagctgatagccctaactccagcaccctcgcgactcgctatgggcctccagtga

SEQ ID NO: 48850 - DNA, 157 bp, Oryza sativa
  Clone ID: PAT_MRT4530_51486C.1
aggaaataatcatcatgagaagcgtatacgcctatgatgcttctcagctgcaagcatatagtacactgtgaaatacgatacactgagtctcttggttaggaatttgctgtccctcagatatgagcacgctaaatctgagagcatgatcaacaatcat

SEQ ID NO: 48851 - DNA, 492 bp, Oryza sativa
  unsure (1)..(492): unsure at all n locations
  Clone ID: PAT_MRT4530_51487C.1
atctcaagatgttcgccgccaacagcttcggccgcgtcaggggcaacgaccccaccnccaccgccctgggtnactgcatccggaggctcgaggaggagatgggcnacatcgangtcttccgccgcgagctccccctctgcgtccgcctcctcgccganntgattgatgtnatgaaggangaggtggagaanaanggtggtnatanttccgatatcagcatccgccggcgactccaagtcngttttttntngatccatcgaaaaccgcaaaaacggaacgagaagaatgcaaggaattcgtttttgcaattcaatctacaagatgtanaaggattcaagagtttcttgcccttcttctttctcggtctccggtanaacgtcgtgctgataacgtattacgcaaccctcctgctacacnaaacagtctaaggggtcccgtaatgtctacnanattggggacccnnaaatgttngggtaggantccttttccttc

SEQ ID NO: 48852 - DNA, 1188 bp, Oryza sativa
  Clone ID: PAT_MRT4530_51488C.1
atgtcatcctccctctctcttcttctacttcctccctccctctctctcccttctctctttctctcacgtggcgcaatcggcaggcaggggcagcgacggcgacagcgggcgagagccggagcggcatcgggcaagcagagacgtcagcgagcggcggagacatggtcatggcgcggaagcccgcgagcggcggagatgcaggagtggcacgacgttgtggacgatgatggcggtgctcagcctctcgctgatgagagcttgctgacaaatggccacctcgacacgaccatcatcgactggatccccggcatgccgccgatcagcctcggcgacatctccagcttcgtccgcaccaccgacgccgacgacttcggcctccgcttcaacgaggacgaggccaacaactgcaccatggccggcgcccttgtcctcaacaccttcgacggcctcgaggccgacgtcctcgccgccctccgcgccgagtacccgcgcatcttcaccgtcgggcccctcggaaatctcctcctcaacgccgccgccgacgatgtcgccgggctgagcctgtggaagcaggacaccgagtgcctcgcgtggctggacgcgcacgagatgggcgccgtcgtgtacgtcaacttcggcagcctcaccgtgctgacgccgcagcagctcgccgagttcgcgtggggcctcgccgcgacgggccgcccattcctgtgggtcatcagggagaacctcgtcgtccccggcgacggcggcggcgacgcgctgctgccgacggggttcgcggcggcgacggaggggcggcggtgcgtggcgacgtggtgcccgcaggatcgcgtgctgcgccaccgcgccgtggggtgcttcgtgacgcacagcgggtggaactcgacgtgcgagggcgtcgccgccggcgtgccgatggtgtgctggccggtgttcgccgaccagtacaccaactgcaagtacgcctgcgaggcgtggggcgtcggcgtgcggctcgacgccgaggtgaggcgggagcaggtcgccggccacgtcgagctggcgatggagtcggaggagatgcggcgcgccgcggcgaggtggaaggcccaggcggaggcggcggcgcgccgcggcgggtcgtcgtacgagaacctgcagagcatggtggaagtgatcaattctttcagctctaaagcctga

SEQ ID NO: 48853 - DNA, 2643 bp, Oryza sativa
  Clone ID: PAT_MRT4530_51489C.1
atgcagccagctgggatcctgtcccttcttccccgcgttccttcctccccgcctcccgctcgttgccttcgccgccgcctcacgccgccgtgatttgagttaggttttttttttttttttgctctgaccagacttgccggcgaaggaaccaccggcgggcaccgcctctcctcggcaatcgttgccggggataaagtggggtcgttaagggagcggtaggtttgggggtttgggattatagatcgaggaagatgaagcaatccatatcgtctatcatctttgtatctactcacgctgctgctgctaactataggatcatttcgcttctgcctctttctgacccgactctttttggtttttgcctcgtcgataatgaacttgagtacactcagaagcttgcctattagcttagtgtaaatagtaggcttgttggagtttagtttgttagaaattattagtctctggttcatttcagctagcaaccatggctgcgatgaacgaaaaggtattggataaatgtggaagaaacataagtagcctcaagagaaagcgggacaacccagctgcacgttgcgctgatgccggcaacacctctaaattgcataagcatcccgccgataactctgttgttaggttttatgttgatgaaggtcacaaggcaaagatcaagtgccatttcaaaatgcagattatacagagttatcagaatttcatgactagtgctttacctaagcgaattctgcttcgtcaaggtggtgaatggaaagactttccaaagcaaattgtcaagcttgcccacagtgattttaggactaagaagacaatcacagaaggtgaacaccagacccatctttttttgctggattttgtgcacatgacattcatagactcaaagacaggccttcagaggccaatagcttggattgatgagaatgggaagcagtacttcccagaattttttattgaagataagacactgtataggaaaaaggaattgggaaatggtaataatgtatacataattgtcgagcccaatgggacacaagaaatgaacgaccactttggaacatcagaaagttcagcagaaagctcgaattttgaatctagcactgatgatgtttccagccctaagagagccaaggctgagaggagtgtcgcaggaaacaaaactggtggtgtcaaagaaactattggagagaatgagccacacgccttgctgcctattccctgcagatctctaccacaagataagctgggtgaccattcacgtgttcaactagctatttctgctgttcagaaattgttgctgcagggtctgggcactgttcttggttccaaggacatcgttgggatctacagaacaccagcagtagataaccataaagaatttcgttataatcttttcaaaaagcaggcagagcatactaaatgtaagcgtggcaatgcaaatgtccgctatgcctggcttgcttgctcaaaagatgctgtggatgaaatgatgttgaatggtgtcatgcactttgagaagactgttaagtgcccagactacggaattggcacaatccttgctccagcaaattgctccaatacctgtgtgaattactctgatgttgatgaaaatggcattgtccatatgatgttgtgccgtgttgtaatggggaacgtagaaatagttcaccatggatctaagcagcatcggcctagtaacgagtatttcgatagtggtgtagatgacattaaaaaccctcaacattacattgtgtgggatatgaatgtgaatagtcacatctattctgaatttgtagtcaccatcaaattgccttctagagtcaaagattctcctgccaccgaagaagattgtcacaatttatcagaggtttcatcactgatcttgagctctggttcgcctgatagtgtatcacaggacatgaaccttcaggcttctccagcattgggaggtcattatgaagcccccatgttaggagataaagtggaaagggctccaagcacgccttggatgcctttctccatgttatttgcagcgatttcaaccaaagtttctgctgagaatatggacatggtcaacagttgttacgaagaattcaagagcaagaaaataagccgagtcgacctagtgaagaagttaaggcatatagttggtgacagaatgcttatatcaacaataatgcgactccaagataagttgccccctatgtcgaggcatgaagcacccaaacacgtgggccaagatgatggctaaaccatgaagtcgtcggtgcggatggtgagagaagcaactggccgacttgactagtggagagaagcttatctcacataagttgtctgcgtctgtatatgatgcgggtttgtcttttcggtcctaggattcatgttgtcaagatttctgtcatcggtttccgatgcgaaatgatgatttcagctttactcgtggacctgaggttacacataaaattgataaaagttccttgtttaccctcctgtttctttttcttctctttgcataaaaacatgtaatgttatatacatattgattaatgttattgtttcgccataaaaaaaaaaaaaaaaaaaaaaaaaaaaaaaaaaaaaaaaaaaaaaaaaaaaaaaaaaaaaaataaataa

SEQ ID NO: 48854 - DNA, 220 bp, Oryza sativa
  Clone ID: PAT_MRT4530_5148C.1
gctaaggaacttaagtatgaatgtatcaacaaccccaatacatcatataattactcctatctgttggaaaatggtaacccccagtgtgcatgcattacacttgccaccttacatggaggatcatagacggaagctttgcccagaaggtacatcgtatgatagtctcaatacttttacaataggaacacacgtaggtgcagtattgaggtaatccatccag

SEQ ID NO: 48855 - DNA, 198 bp, Oryza sativa
  Clone ID: PAT_MRT4530_51490C.1
atgcggccagctgcatcgtcgtcctcctcctcctctcgcgaccggctgacgatcagccggccgacggagaaggacgacgtcgtagaagagaagagggacggcggcgacgtgacggcggccgtgccgaggctggcggtgtacggcgccggccgcgtgcacgagatcgagcggttctcgcactacgttgccaaaccttaa

SEQ ID NO: 48856 - DNA, 149 bp, Oryza sativa
  Clone ID: PAT_MRT4530_51491C.1
aactcaaaccattctagcagctacatttctattgctagaacttacaaacgatgaagttgattagaacctatgaagcgtactagcgcaaaactacttgaaaacttgcctgctcacactcccagttttctagcaacactcaccaccagaca

SEQ ID NO: 48857 - DNA, 513 bp, Oryza sativa
  Clone ID: PAT_MRT4530_51492C.1
gcgtcggtggtgccggcggcgagggcggtggccggcggcggcggcgagccggcgcggaggccgtcgtccgtggaggtgggcgtggacggcgcggtgcggctgctgatgcggctgcccaagtcggaggtggcgcgcctgatgaaggacagcaaggacgccgccgaggccgtcgagaggatcatgcagctgtgcgtctacagggaccagggcggcgccggcgccggcagcctcgtcacgcttgctgcctccggcccggcagtccgtgatgtcggggaggaagacgtctgccatgaagaaagagaagcggacgaggtttgtggtcttgccttgacgagatcatcggatgacataatggggccaaaatgttattctctgtctttctatgccattgttatctctgtcatcgttgggctttacaagcatgaggaattgcaggggcttagaacatgataagcccgtattaacatgggtttctatcttttccgtacagattcctaacttctgaaatattaa

SEQ ID NO: 48858 - DNA, 322 bp, Oryza sativa
  unsure (1)..(322): unsure at all n locations
  Clone ID: PAT_MRT4530_51493C.1
atcgacgtcatgacgcgcatgggnccggcaanttatgcccttcaaagtgtatgctaattactacttactagctcattaattactactagtagtactgtattaattagcctctgatctgttcttagctcaggttttaagttcctagtaggtgtatggttaaagtagagtgaactctggactatggctagcatgttgtgatcgttgtgtcatctaactgcagtagcaggatttcccctgaggtgactgatcagtgattacacaatttttatagatttagtnatgtacgaaccaaaaaaaaaaaaaaaaaaaaaaaaaaaaaaaa

SEQ ID NO: 48859 - DNA, 155 bp, Oryza sativa
  unsure (1)..(155): unsure at all n locations
  Clone ID: PAT_MRT4530_51494C.1
cctatggctagacaactatggcgctttaaggttatgggtgggaaaccccatagccacgagggcatnccaaccaacgatgtaggaaaccacacctggactgctgccttgtggttttctccaatgtggcttgacccggcaaagccctttacttttgg

SEQ ID NO: 48860 - DNA, 3678 bp, Oryza sativa
  Clone ID: PAT_MRT4530_51495C.1
atggatactgcatcgagtccagtaaagattaatcatggaccgaccagatcttcgtcttcaagcaagagaagacttgatcttgaggaggaacaccaaaaagatgcaaccagtgatattctgcttctggaatcatctgagatggtggagaagaggacccaaggggtacaggagtctggtgacgagatccaaaagatggaagagttcggggcaacaagtagagatgtcaagaaacaaaagatggagggttcaattcaagagcttgtctgcatggtgcagactcatcgcccaaaggtggtgtttttatcagaaacacgacagaatcaaggttttgtggagaatattaaatggcaaattggccttcgaggatgtctggctgtcaatggtataggaaaaggaggaggaattgccctgttctgggatgaaagcgtaaatgtgactatcaagtcctacaatttgagacatatcgatgcagttatcacagagcagaatcaggatccttggagagctacctttgtttatggtgaaccaaaggctcaagatagacacctgatgtggacacttctaagaagaatcaagcaaaatacaagtgatccttggttaatgattagggatttcaacgaggcaatgtggcagtctgaacacttgtcacaaaaccgaagatctgaaacccaaatgagagagttccgatctgttctatcagattgtgatcttcatgatcttggtttccatgggataccttggacttatgataacatgcaaaggggcgaccgcaatgttagaaaggaagaacatataagataccaacgacaacaaactatgagatatgaagaagtctgggagagagagtcatccctcccagaggtcatacaaagtgcatggagtgatggcaacgctatcacaaatttaggcgacattagtgcgaagatgaaaaatacaatgtgcaagttatctagatggagtaaagagaagatagggaatgtaagaaagaagattgctgccttacgagacaagttaagagagtgcaggagcatgggatcccttgattccgatgtccaagtccgacaaataaaaaaagaattagaagagctcctgcatagagaggaaatctggtggaagcaacgatcacgtatcatgtggctgaaggaaggtgatcgtaacaccagatacttccacttaaaggcctcatggcgatccaggaagaacagagtaagaaagctaaagagaaacgatggcatggccacatgtgaaataggtgaaatggaagagttggcacacaatttttttcagcagctatatttgaaggatgacagacttaatcctgagaatttattaagcttttatgcacaaaatattacagaagaaatgaatgggaagttaactgaaccgttctcggaggaagaaattagtgatgcactcttccagatcagaccactaaaggcgccggggccggatggttttcctgccagattcttccaaaagaactgggggatacttaaggaggatgttgtcagggcagtgaaaaatttctttgttgatggacagatgcaagaaggagttaatgacactgcaatcgtcatgataccaaagaaaagcctagcggaggatatgaaagatttcaggccgattagtttatgtaatgtggtgtacaaagttgtggctaagtgtctgaaatgtaatcgtgagaatcaaaacttctgcgccctgaaattagatctctctaaagcttttgaccacgttgattggcaattcctagatggtgtgatggaaaggatgggcttctgtgataaatggcgaagctggatcatggcatgtgtgacttcagttcaatacaacgttcgtttcaatgggcacttgctagaacctttctctccaacgagaggtcttcgccaaggtgatccattgagcccctacctttttctgctagttgcggatggtttatcaaatataataaagagtaacgaatctgaaggtctcattcaacctttgaaggtatgtagaagagcgccaggaatttcgcatctcctgtttgctgatgatagcttgttattttttaaggcggatactgagcaagctagcagaatcagagatgtgctacaaatgtatgaaagcagcacaggacagcttattaatccttctaagtgctccatgcttttcagtgacttttgcccacagcaacatcaggaggacataaaacgaatcctgggggttactaactcctcttttgaggagaaatacttgggactcccaactcccgagggaaggatgaaagctggtcagtttcaaccaatcaaggatagattatccaagagaatgtcagattggaatgaaaaatacatgtcttcaggagcaaaagatgtcttgataaaaagtgttgcccaagctctgccaacgtatacgatgggtatctttaaaatgacagacaagttttgtgaagaagtatcccaaatgattcgcaatttctggtggggtcatgagaaaggagagaagaaagtgcactggatagcgtgggaaaagatcactagcccgaagatccatgggggtttggggtttagggacatgaaatgtttcaatcaagctttgttaactaaacaagcttggaggctgatcacaactcctgagagtctttgcgcccgagttttaaaggcgaaatacttcccaagtggaagtctgctggacacagccttcccgacagtttctttacctacctggaaaggagtccaatatgataggttaccaacttgggacaacaagcgcaaaagaaacattgaaagacaaggtatctgtcaaatatgtggatctagtgtggaagatggttttcatgcaaccgtggcttgtccgagagcgaaagcgttgcgtgaagctattagggaaatctggcacttacctccagagaataagtttgtaaattcaggtccagattggttgttgctattgttggacggatcaaatgaagaagaaaaggctcatacgctgttcacattatggcgggcttggcattgcagaaatgaaattatccatggcaaggagatgagccctatagcaagctctgtcaactttttgatgaactacgaagattgcactctaatgactcggcaacaacctgatgatgtgaaagggaaaggaccaatgtttgtcgagacacacatacaacgacagctgaacgaaaagcaggtgtccaagtggcaaaccccaccagaaggtgtagccaagttgaatgttgatgcaggtttcaaaccggacacaggtgaaacaggcgctgggataataattagggagtgtcgagggctcgtgctactggcttcctgtaagaagctaccgcgatgcagttcggcaatgcaagctgaagccttggcgtgtttggaaggtatccggctagctactgaatgggtgaatatgccacttatcttagaatcagataatgcaagtgtcgtcgctaagttaaacgcgaccaatgtctcaagagcagattggagtggcataatttcagatgttaaagcggcaatgttatgtttagttcaggtgcaagtgcacaggataaagagagattctaataagatagctcatgctttagctcaactggtaatgggatcaggaactaatgcggtctggagattatgctcccctgcagaaattcttgacctcctgaaccaggaatgtaaccctttgttttctcattaa

SEQ ID NO: 48861 - DNA, 3950 bp, Oryza sativa
  Clone ID: PAT_MRT4530_51496C.1
atggatactgcatcgagtccagtaaagattaatcatggaccgaccagatcttcgtcttcaagcaagagaagacttgatcttgaggaggaacaccaaaaagatgcaaccagtgatattctgcttctggaatcatctgagatggtggagaagaggacccaaggggtacaggagtctggtgacgagatccaaaagatggaagagttcggggcaacaagtagagatgtcaagaaacaaaagatggagggttcaattcaagagcttgtctgcatggtgcagactcatcgcccaaaggtggtgtttttatcagaaacacgacagaatcaaggttttgtggagaatattaaatggcaaattggccttcgaggatgtctggctgtcaatggtataggaaaaggaggaggaattgccctgttctgggatgaaagcgtaaatgtgactatcaagtcctacaatttgagacatatcgatgcagttatcacagagcagaatcaggatccttggagagctacctttgtttatggtgaaccaaaggctcaagatagacacctgatgtggacacttctaagaagaatcaagcaaaatacaagtgatccttggttaatgattagggatttcaacgaggcaatgtggcagtctgaacacttgtcacaaaaccgaagatctgaaacccaaatgagagagttccgatctgttctatcagattgtgatcttcatgatcttggtttccatgggataccttggacttatgataacatgcaaaggggcgaccgcaatgttagaaaggaagaacatataagataccaacgacaacaaactatgagatatgaagaagtctgggagagagagtcatccctcccagaggtcatacaaagtgcatggagtgatggcaacgctatcacaaatttaggcgacattagtgcgaagatgaaaaatacaatgtgcaagttatctagatggagtaaagagaagatagggaatgtaagaaagaagattgctgccttacgagacaagttaagagagtgcaggagcatgggatcccttgattccgatgtccaagtccgacaaataaaaaaagaattagaagagctcctgcatagagaggaaatctggtggaagcaacgatcacgtatcatgtggctgaaggaaggtgatcgtaacaccagatacttccacttaaaggcctcatggcgatccaggaagaacagagtaagaaagctaaagagaaacgatggcatggccacatgtgaaataggtgaaatggaagagttggcacacaatttttttcagcagctatatttgaaggatgacagacttaatcctgagaatttattaagcttttatgcacaaaatattacagaagaaatgaatgggaagttaactgaaccgttctcggaggaagaaattagtgatgcactcttccagatcagaccactaaaggcgccggggccggatggttttcctgccagattcttccaaaagaactgggggatacttaaggaggatgttgtcagggcagtgaaaaatttctttgttgatggacagatgcaagaaggagttaatgacactgcaatcgtcatgataccaaagaaaagcctagcggaggatatgaaagatttcaggccgattagtttatgtaatgtggtgtacaaagttgtggctaagtgtctgaaatgtaatcgtgagaatcaaaacttctgcgccctgaaattagatctctctaaagcttttgaccacgttgattggcaattcctagatggtgtgatggaaaggatgggcttctgtgataaatggcgaagctggatcatggcatgtgtgacttcagttcaatacaacgttcgtttcaatgggcacttgctagaacctttctctccaacgagaggtcttcgccaaggtgatccattgagcccctacctttttctgctagttgcggatggtttatcaaatataataaagagtaacgaatctgaaggtctcattcaacctttgaaggtatgtagaagagcgccaggaatttcgcatctcctgtttgctgatgatagcttgttattttttaaggcggatactgagcaagctagcagaatcagagatgtgctacaaatgtatgaaagcagcacaggacagcttattaatccttctaagtgctccatgcttttcagtgacttttgcccacagcaacatcaggaggacataaaacgaatcctgggggttactaactcctcttttgaggagaaatacttgggactcccaactcccgagggaaggatgaaagctggtcagtttcaaccaatcaaggatagattatccaagagaatgtcagattggaatgaaaaatacatgtcttcaggagcaaaagatgtcttgataaaaagtgttgcccaagctctgccaacgtatacgatgggtatctttaaaatgacagacaagttttgtgaagaagtatcccaaatgattcgcaatttctggtggggtcatgagaaaggagagaagaaagtgcactggatagcgtgggaaaagatcactagcccgaagatccatgggggtttggggtttagggacatgaaatgtttcaatcaagctttgttaactaaacaagcttggaggctgatcacaactcctgagagtctttgcgcccgagttttaaaggcgaaatacttcccaagtggaagtctgctggacacagccttcccgacagtttctttacctacctggaaaggagtccaatatggtttggatctgatcaaacaaggcataatttggagaagatggtggcacaggaaggatgatgccgaagaggtcctcaagatcaggttattggaatgccaaccggatgattttccagcctggcatttggagaaatcaggactgtttaccgtgaagagtgcatgtagattggcctggaacttatctaatcatggtaggtcagatgcctcgtctagcgatgcaccatcggataggttaccaacttgggacaacaagcgcaaaagaaacattgaaagacaaggtatctgtcaaatatgtggatctagtgtggaagatggttttcatgcaaccgtggcttgtccgagagcgaaagcgttgcgtgaagctattagggaaatctggcacttacctccagagaataagtttgtaaattcaggtccagattggttgttgctattgttggacggatcaaatgaagaagaaaaggctcatacgctgttcacattatggcgggcttggcattgcagaaatgaaattatccatggcaaggagatgagccctatagcaagctctgtcaactttttgatgaactacgaagattgcactctaatgactcggcaacaacctgatgatgtgaaagggaaaggaccaatgtttgtcgagacacacatacaacgacagctgaacgaaaagcaggtgtccaagtggcaaaccccaccagaaggtgtagccaagttgaatgttgatgcaggtttcaaaccggacacaggtgaaacaggcgctgggataataattagggagtgtcgagggctcgtgctactggcttcctgtaagaagctaccgcgatgcagttcggcaatgcaagctgaagccttggcgtgtttggaaggtatccggctagctactgaatgggtgaatatgccacttatcttagaatcagataatgcaagtgtcgtcgctgagttaaacgcgaccaatgtctcaagagcagattggagtggcataatttcagatgttaaagcggcaatgttatgtttagttcaggtgcaagtgcacaggataaagagagattctaataagatagctcatgccttagcccaactggtaatgggatcaggaactaatgcggtctggagattatgctcccctgcagaaattcttgacctcctgaaccaggaatgtaaccctccccgttctcatccacctctgcctcttcacggatcccgttgccctccatcggtcctcattac

SEQ ID NO: 48862 - DNA, 372 bp, Oryza sativa
  Clone ID: PAT_MRT4530_51497C.1
atgaacaacacaaaaatccccaaatcctccttctccgcgcgcgctcgccactggccaccccctcctcatcgcgcaccatggctgagggcggcggcgggtagagcagcggtgggcgagcgcatgggggcgtgcggcgaacggcggcgtcacggcaacgtcggaatcctgctgccgcgccgcccctcaccagctcaccagcacgacggcattgagaatggcgatggaggagtggaggacgacgacgaggacgacgctctggcgctgacggcggcggcagaggcggaagttgcttgggcggccgtcggcggagcggaggaggaggtagcaatttacaagattatggacctaaataacacccgcgttcaactttaa

SEQ ID NO: 48863 - DNA, 429 bp, Oryza sativa
  unsure (1)..(429): unsure at all n locations
  Clone ID: PAT_MRT4530_51498C.1
ctatactctacacccttcttccttttttttactattcaaacctcactaatacagcataagtgcaaatttacctttatatgcacacttctacaccataaaacaaaaaaatacgttacttcacacataggagtctaacttaccagcttcaaaatccacttcaactacaacccaatcttcttacataatcagaatataaaacaactccactcatatcgttttttattactgcagacacaactaactcactttactccaaaacattaagtgttcgctcccactgtgactccacttgtcaaacttcacaacccttaaagagcatcttctacaccacttatatccttctttgtactttaccccacttaactccttctaatnacttcttttatcttctactataacaaccccttttctccctcctttctttaccca

SEQ ID NO: 48864 - DNA, 199 bp, Oryza sativa
  unsure (1)..(199): unsure at all n locations
  Clone ID: PAT_MRT4530_51499C.1
ccncaagggnntngnntggtnnnngnngggcgcgacgtcatcgctgccagcagctgaggccacccccgccaccaccttggctatggggcggtggtggcaagattgtcaaagcgggcccggtggcttgccttggtcctgcggtggttcttcctcatcgagaacaacttccggaccgttctaaggtttggcaactatacgc

SEQ ID NO: 48865 - DNA, 184 bp, Oryza sativa
  Clone ID: PAT_MRT4530_5149C.1
atcgagtacttagacgggaacaagccaatagtggttgtgcatgcgtatggcgtggacaacaaggacttgctgaacaaggagacgttgagactagtgttaggagctagcttaacatacctcatgtagaaggtggacaagatcatggaatctactgttggacatcttgttgtctgtagtgaagggg

SEQ ID NO: 48866 - DNA, 471 bp, Oryza sativa
  Clone ID: PAT_MRT4530_514C.1
cgtcgatgataatttatagaaccggttgccagtccatagcaaaatgtacaatttctcaaaaataaaggataaatgtacaattagctcatcttatctactattactggttcaaacctttaattctgaactaatcttgcacatgccagcaacgtacgtcagactagcttcttccaaacgaggattttataagcgttgctactccagtgatcttcactttattcatgctatcgtcctgtcctgcatcttttacagtttgtagattctttttggataaatattgatactggatggtccttgagacttcaaggaacagcatctggcagtcgaatgtcaactgaatctaacaattcccgactattttaattgtttgtcagaatatacacttggcatcgcaaggaagtcccatgcattgatttgctttgcagcaggaagtcccatgcactgatttgctttgctgcactgacaacatgc

SEQ ID NO: 48867 - DNA, 502 bp, Oryza sativa
  Clone ID: PAT_MRT4530_51500C.1
gttctagatcgagctgaaaaaaaaagagaggccacgaagagagctcagctgctgcctctagcttacttggtgataaggaggaggaggaggaggagggcaccgacatggccgcagccacggcgtacaccgtggcgctcctcggcgccaccggcgcgcgcgtccccgccgctccacgctccgccgcgcttctgccgcgccgcggcggcgtgctccaaccgctgcgcctccaggacgcgccgcgactgtccctgctccgcgtcagggccgcctccgacgacacctccacctcggccagcggcgacgagctcgtcgccgacctcaaggcaaagtgggaggcgatcgaggacaagccgacgttcctcctctacagcggcggcgccgtcgtcgccctctggctcaccaccgtcgtcgtcggcgccatcaactccgtgccggtgctccccaagatcctggagcttcgcggcctccgctacaccggatggttcggctaccgctacctcct

SEQ ID NO: 48868 - DNA, 368 bp, Oryza sativa
  Clone ID: PAT_MRT4530_51501C.1
atttcacacaggaaacagctatgaccatggattgacgccaagctctaatacgactcactatagggaaagctggtacgcctgcagtaccggtccggaattcccgggtcagacccacgcagtccgcatcagacgagagctgaccttatgagccggtatatgtttctggtgaggtcccgtgagccaactcaaaagaaatattagctatgatgccacatatatagtagggcacggtaatataatacgtgatactgacgaaaaatgatagtataagcagacacttggtgaagttgtaaccctctgtatgttacttcgcatacgcgtactcattcctgaagggttttttaccctaaaaaaaaaaaaaaaaaaaa

SEQ ID NO: 48869 - DNA, 192 bp, Oryza sativa
  Clone ID: PAT_MRT4530_51502C.1
tttctattgaccactcaggttatcgacttcgtgttcacctttatttcttctcgagtgattttaaatctttttcggacattgcatcccatccctctgctcagcaccaaggagagcacaaggcggcctgtcacctattgcgctgtaacgatcgccgttgtgtctacactagcagcttcgatccaacaactacat

SEQ ID NO: 48870 - DNA, 252 bp, Oryza sativa
  unsure (1)..(252): unsure at all n locations
  Clone ID: PAT_MRT4530_51504C.1
ccaaaagccaccaccggcgcatnaactccgacgaaaccggcagcaggtatncngatggcntactaagccccacgacgnttcggcgaccgngacgacgacgccgacgncgacgtctcgttntcctcctnctcctgctntccgtntccncctccgactacttgttcnncccacgaggntctcncagcttnngcgcgagcacgatgngatcgcccatntngcggacggagactgcggntngnagcgngcgcggca

SEQ ID NO: 48871 - DNA, 261 bp, Oryza sativa
  Clone ID: PAT_MRT4530_51505C.1
atggatgcggcgagcctgtgcgaggtgcgggcgacgggggaggagctaggcggcgacaacgaccaaggagctaggcgcgggcggctactggcggggaagagatgggcggcgacgacagcaggtgaggagctgggcgcgggcagtggccaaagggggaagagctggagcgacggcacggaaggagctgcgcacgggcggtggccgaatggggagaactgggcaacaacggcagggaaggagctgggtgcgagtggcggctag

SEQ ID NO: 48872 - DNA, 1426 bp, Oryza sativa
  Clone ID: PAT_MRT4530_51506C.1
gcgcggcgcgctgctggcgctcgcgctgctgctcaccgcgacggccgtcgtgccgctgctcctcctcggagaggccggggacgacggcgtcggggccgtcgccgccgcgccgccgttcaacgcgtcccgcgtcagggcggtgtcgtggaggcccagggtcttcgtctacaaggggttcctctccgacgacgagtgcgaccacctcgtcaagctggggaagaggaagatgcagaggtcgatggtggcggacaacaagtccggcaagagcgtcatgagcgaggtgcggaccagctccggcatgttcctcgacaagcgccaggatccagtggtgagcaggattgaaaaaagaattgcagcatggacctttcttcctgaagaaaatgctgagaacattcagatactccgatacgagcatgggcagaagtatgagccgcactttgattatttccatgacaaggtcaatcaagcactgggaggccaccgttacgcgacggtgctcatgtatttgtccactgtcgagaagggaggcgagactgtgttccccaatgctgaggggtgggaaaatcagcccaaggatgacactttctctgaatgtgcacaaaaaggattggcagtgaaaccagttaaaggcgacacggtgctcttctttagccttcatatcgatggcgtaccggacccgctcagcctccatgggagctgcccagtgatagaaggtgaaaaatggtctgcaccaaagtggatccgtatcaggtcctatgagcatcctcctgtctcaaaggtgacagaaggatgctccgacaacagtgcacgttgcgcgaaatgggctgaagctggagaatgcgagaagaacccggtatacatgacagtgaacagtagcatactatttcttcaaaaacaacggcttacatcctttgcacatggttttgaaatctcaagtttacttctagtggaggtgaagactgtgaagtttgccaggtcagcgaggcgggtatcagcgacaacattggccatcctatttggaggcctcattttggtgtcattgttggtggagacaagcgcgaaaccgccgtctccggggagtagtgttcttggtgttgggggtagaaggatgatgatcaatggaggactagttcacagtcacaggagcttggaagatttcaatgctggtgatgctttcagcagcatgaagaggagggtgccaaatggaccagatccaatccacaacaggctttcaattccttcctttatttactctggttttctaatggtcttcaccttgaattcttcagaggaactggagaatcaggaagatcaccaggccgagcgtagaaaagcacattgcaagtttgctatagaggaaaaggagtgtagctttgaacagccaaagttgcaccctgaatgtggcctaaaagcaaagcttgtgtga

SEQ ID NO: 48873 - DNA, 975 bp, Oryza sativa
  Clone ID: PAT_MRT4530_51507C.1
atggcggtggccctggcggcttctcccgatcgatccatgggccgtgaatcccgatttcgtcatggatggaggagtctgaccagcagctctgaggaaaaaggagcgctgaaagatgtaccggccgctgccatgctgaagaatagaaatgataacgagaagaaacggagtaggaggaggaagcctggaataaccatccttaagaatagcggacaccgtgatggttctatatttaagggcaaccgtggctggaaaatagacttccgtattgcaaaccctgatgagacccagttcgaggccatgatgctgtcagatcctggagattgcaagccagatgaaatagcatgtgttatgcaccaaccatgtcccatgctgcaaattttttcattgaaattggctaaaacttccattgatcgttttccagttgagttgtatggatacatagcagtgcgggatctcatggatccactgcgcaattatgttgtccgtcgcagcagggatgataccattgccgtgaagccgggttctctcatcggaatgactggacccaagcgtggcataaaattctgttcatctgccctaattgagtatgatatgagaatcaagacaggagaacaagaagaggatgatatacagctgattgacggtgtattaggcatctttgatgatctaagcaagccatcgtgtaaaccgttcagaagtcgcattgatggagttggtggggcagttgacatcaccgttggactgcttcccagtgcagtggaggccatatttgaagtttccatatcagaagtccaaagttgtttcgatctcaccgtgtgttcttatgctggtgggttaagccaacaatttaagatctttcagggcaccattgatttacctgtaacaataccctgggggcgggggtggtatagaaaagaacctttactgaacttcatggagattaacgggggtggtatagaaaagaacctttactga

SEQ ID NO: 48874 - DNA, 326 bp, Oryza sativa
  Clone ID: PAT_MRT4530_51508C.1
acgcgtccgcccagcgcgtgtcgcccacgcacgcggcagaagccaacgtaagccaaggcgaccgtaacgaccaactagcccgctcgcaacgagccggctagcattgtccccatgagaggctccaaggtgaagaacacgaggtagtgtactactgtacaacggacctcagtacactgtaagaggctatcacgatattagccacaagtatacatggtgggatgaccttatttgatacaactaaagcttatggtacaccaatgactgcagcctggacttgatacaggttactcagaggttttattaaggaaaggtcggagaaagaacag

SEQ ID NO: 48875 - DNA, 470 bp, Oryza sativa
  Clone ID: PAT_MRT4530_51509C.1
ttgggcaaagctttcataattttattggtgggtatctatcttttacttgaagtttgatatattaagaaaatatgatatattttagtcattgtattaccttgacaatacacatatgttcttgtttgtcccaaatgtgaagtgaaacgatttgctgatctaagttctgatgagacggtgaattatgggttattgtgaaggatgttgacgtacagctcttgcaataccataaaacatcttcactcacattttctattgaagatggcccacaagctagtcaaacggttccacatgtccacatccatatcatcccagaaagaaaggagattttgagaaaaatggtgaaatatatgatgcgatcgatgtcaaagaaagagaattaaatgagaagcttgatctagacatagagcgaaaagattggaccatggaagaagatggctcatgaggccaattacctatgttacctagatacg

SEQ ID NO: 48876 - DNA, 1295 bp, Oryza sativa
  Clone ID: PAT_MRT4530_5150C.1
gcagggcaatgcagcctcgtgcagccgccacgcctcatcacctgccttctcctactgctgcttctgcttctgtcgccaccggcgctcccgtgctcggcgtcgtcgtcgtcgtcgtcgtcgtcggtgatcactcacctcccgggattccatggtcgcctgccgttctacctcgagactggatatattggtatcgaggagaagactggcactgagctcttctactacttcgttgaatcagagacgaaccctgacacggaccctttggtattgtggctggtgggtgggccccgttgttcggccttctctggcttagcctacgaagtaggtcctttgaattttgtgttggaagcttataatggtagtttgccaagattggtttataatcagtattcatggacacagatggcaagcataatttttttggatagtcctgtcggttctggtttctcatacgcacgtgattccaatggttacgatgttggggatatatcatcttctttacaagtggtcacatttatgaaggagtggctcaatgatcacccacgctaccgctcacataatttctatgttggtggagcctcatatgctggaaaggtggttccagttatcgtgcaatacatttcagaaggtaatcaacgatacacttaacatttacagggatatatagttggcaaccccataacaggttcgaaattcgataaaaatttccatgttccctattctcatggcgttggaattatatctgatcaattatatgagctcatgtctgaagtttcggatggaaatatcttggaggataaatgtgttaaagctgcaccaaaacctacaatagatgtttcagcaagcagggcactgctggatcatatggttactacctatcatactgctggatgaatgacaatacgactagagatgctcttaagatcaagaagggaacggtcggtgtgtggacaagatgcaataccgaagtattcccctatgctagggacgttccaagcaccatacagtaccatcttaacctcaccacaagaggttaccgggcgcttgtattctgcggtgaccatgatctcatggtgccatttctgggcactcaggcatggataagatccttaaacttcaccattattgatgactggagagcatggcatcttgatggccaggctgcgggatttacagttatgtatgacaacaacttgacttttgccacattaaagggtagtggtcatgctcctatatcatacaagcctaaacaaggttttgccatgggtcaacgatggctggaccgtaagcctctg

SEQ ID NO: 48877 - DNA, 347 bp, Oryza sativa
  Clone ID: PAT_MRT4530_51510C.1
gaaaccaaataagtggggcggtctcatgttactcggccgattatactacccctacttcgcttagtccacaacgaatgctccactgatatctagttcgtggatctaataaatcgattacatcatactcttcatctgaccgctgtataaaaccaaagagtaggtggtgctgacaatcaaatgccatatacatgacatttgggttcgtgctcatggtcttccaattgcataggcacattgttctactgctgatgcccttgacttacggcacttatactagctgaatcgatacattacatatatctggatatctttggactgtttgttcagactgaccgtttacatgcgta

SEQ ID NO: 48878 - DNA, 336 bp, Oryza sativa
  Clone ID: PAT_MRT4530_51511C.1
atgggctcggcgcagatggactctgcccgtgtaccgcgccccgctccggccggcagccgcgcgtgccgtggcaggcgtcaggcagcagcagcagcagcagctgctgctgctagctccgaaccgaaccacctgaacggcagcctgcagctgcaggcaggaggcgggggaatccgccccgtgttcggcgtgcgctggcctggagcgctgtgcgctgcgcggccgccgggacgcaaaggcgccgccgcgagcctgttcgaattttgtgcggaacgttttggcactagcttggtcgttggcgcagttccagaaagattccgtgctgccaagtttggataa

SEQ ID NO: 48879 - DNA, 543 bp, Oryza sativa
  Clone ID: PAT_MRT4530_51512C.1
atggagagtgccgtgcagttgccgcagtacatcttcttcgacctctccggctcgcacctcagatgcttctgcccaccagctccggtcatggagcacaccggcgtaccgtacgacagtcaggtcgtcggcttgcaggcgcttcaccggacacggttatcgcgggccggcggcagcagcaccatcgtctcagctcgcccggctaaccaggttgacaaggcgatggtgctctgtgatcgtgctgctcaaatcggcgacgacgatgacgaccccgacaccgtgtcggacgcaggcacgtcgggcgttggggtggtggatgaggaggagacggccggcgacgacgaggaggacgaggtggcgagcttggatgagctcttctgcgacgaaagaatcgtgaggaagatcgatgcactggcgcagctggtgggcatggatggcgccgcctgccagcccgccgctgtgctgggtgaagtcgtccgtttgatccaggaaacggagaggaagaatgggcgttgcgtttgtgcttctggggccgttcgatcttga

SEQ ID NO: 48880 - DNA, 372 bp, Oryza sativa
  Clone ID: PAT_MRT4530_51513C.1
gcgctcagcgaggtgtcctcctccggcgccgccgagtcgctcctcgtcggctcttagtggtccgtcgtggacgccgactccgactcctacgatgcagtgcaggttgagctggggtgcaccaaggggagcgggacgctggaggtgacgtacgtggtgacgctgtacccgctgagcatggcgacggcggtgatggtgaagaacaacggcaagaagccggtgtcgctgacgagcgcgatgctgagccacatcaagttcgacaagcggcggggcacggcggtggaggggctccggggatgcccctactgctcccacccgccgccggccgtcggcttcgcgctcctcaccccggcggaggccatgaagcgggaggac

SEQ ID NO: 48881 - DNA, 1453 bp, Oryza sativa
  Clone ID: PAT_MRT4530_51514C.1
tctgcccccgcctctccactccactccaacccacccatggccacctcctcgctgctccccctccacctccccacgaggccgtccgccgtcaaggcctccgccgccgcgacggcggcggcggccccgacgccgcagtcgctggaggagtcgttcggacggaagggcctccggttcgccgccgacccggccaccggcgcgcccaccgccgagctcagcgtgcggaacggcagctcgctgcagctccggctcgccgacgggctggtcacctcgtaccggcccaaggtgtactggaaggacgacgggtgcagggaggtgctccacaccgtcgccggcgccggcgccggcggcgaggtcaagggcggcgtcgggctcgcgctcagcgaggtgtcctcctccggcgccgccgagtcgctcctcgtcggctccgagtggtccgtcgtggacgccgactccgactcctacgatgcagtgcagctggttaatgataattgggtactggatcttcaccctgtgctctctcgccaagcccaaactgagctggattcgctcatgacgattctagcttctcagcaactacagcatactgaacaagacgttgagctggggtgcaccaaggggagcgggacgctggaggtgacgtacgtggtgacgctgtacccgctgagcatggcgacggcggtgatggtgaagaacaacggcaagaagccggtgtcgctgacgagcgcgatgctgagccacatcaagttcgacaagcggcggggcacggcggtggaggggctccggggatgcccctactgctcccacccgccgccggccgccggcttcgcgctcctcaccccggcggaggccatgaagcgggaggacggcggatggttcggcggcggcggcggcgaggagccccggcagggggtgtggaccgtggaggacaacctctacaccatcctcaagaagaaggtgagcagggtgtacgcggccccgccggaggagaggaagaagcgcatctacagcacggcgccctccaaattcaccaccattgatcagaatagcgggctggggttcagggtggtgaggatggggtacgaggacatgtacctgtgcagcccgggggagatgtacaggaagttcggcaaggactacttcctgtgcaccgggacggcgtccatgctggtgccggtggtcgtcaaccccggcgaggagtggagggcggcgcaggtcatcgagcacgacaacctgtaacttcttctctattttttttttcattattacgacagtgaaaaaggcgaccaatttatacacgaattgttctttgaaacaagaaacacgctgaaagcgatagcatgcaggaagagatagtggtgcatctcatgtatcagcgtggccaagtgtacagagaacaggaaaaagaacatggtacatggaactaaacaataaatcaagtgtacacttacagctg

SEQ ID NO: 48882 - DNA, 376 bp, Oryza sativa
  Clone ID: PAT_MRT4530_51515C.1
gtgtggattagttgggagaggcaacggatagacatatgatcatgtctttctccatggtaaaagcaagatttgttgtggattagttgggacaaccatatgatcatgtctttcactttcttgtgtgttgtttgtagtggatattgtctatagctttgaattgttcttttgaggagaggtatgatcttccagtcctgagcaattcaactgctccttttggatcataaatttcacctcttgaatcattatctagccagtttttctgcctaccagtatggtacatcaaatctgaccgattggagtactatgttcttttgtcaagtataactgtattattatctgtatggtatatctaatcataacagacattttcattttt

SEQ ID NO: 48883 - DNA, 276 bp, Oryza sativa
  Clone ID: PAT_MRT4530_51516C.1
atggccaagacacctggcaacaggaggctgattccaacaaagcggctgctcaaggaggcagcagcagccgcgacggcggttgatcccgaagccggtggctatgacctgcagtggcggcggctgctcccgaaggtggtggctgcgacctgctgcggcaacggtggcggcagcggcggcgactcccgaagacaacagatccaccaatcccggccccaagcgatgactgtgacaggcggcaggcggcgtggcctcagggtgaggagtatggaggattaa

SEQ ID NO: 48884 - DNA, 203 bp, Oryza sativa
  unsure (1)..(203): unsure at all n locations
  Clone ID: PAT_MRT4530_51517C.1
ccggccgggattcggtcattgcggtgttcattgccaatgaggngaactcacttatcactggcattggtgtcgatggccttgtgaaggatgggttgctgtatgagagctcaagaagaaagtgcttcttctgtctgtagaagaatgggggtaaatttataaattataaatgaatgatgaatctatctgatgaacctggttgcatc

SEQ ID NO: 48885 - DNA, 683 bp, Oryza sativa
  unsure (1)..(683): unsure at all n locations
  Clone ID: PAT_MRT4530_51518C.1
tgatttgggcaaatctaatccggnagcccctatatcatactggtaggatatattaatnccctatggatattggttcccccccagtgtgatattgaagcaaccagagattgttttatcaagctatcagactgaagctcttgatttagagaaactttgctagaatnccgtagcacaagccgcagaggatagaaaaaatgatgatnccaaagattttctttctcttctgcaccctttggagcatttaccaggtaaattgattttncttttggttaatagataaatatgtgagcatgctttgttgggtttttttagttgattttgggttctgtcatcatagtttattttccagtaaggatgttttgcccacaaataattatatggtcnccaataagtgttacagcttataatcaactgtggaaaaaaaaaccataggagaatttgtttcacctcagtgccacacaattgaagcaaggcattcaaaatggaataagaaaagtataagctgtgcagttcaacaaatctgaagtatgtggttggcacatgtaccttttttttacacagaatcaatatgggttgtggttgagcttgcttatatcttgagcagctgagaattctacagttgtgaattatggtaaacatatcttatttgacttgtaccaaaaaaaaaaaaaaaaaaaaaaaaa

SEQ ID NO: 48886 - DNA, 218 bp, Oryza sativa
  Clone ID: PAT_MRT4530_51519C.1
agatacctgacttgtcgggtcgaccacacacgttcaaaatcatcatatgactggttgagatgactgggaagaatgcacatggtgacggatttgataaacctagggacaggtaggagcgacgcatggcaatcaatccagtgccaggtaagagcacgctgcatgtaagaagatgcactgtgttatagtccagtacaaatggaccgggcatataccgtgga

SEQ ID NO: 48887 - DNA, 1954 bp, Oryza sativa
  Clone ID: PAT_MRT4530_5151C.1
gcttgccatgcattcattggcttgtcgaagctacaagagcactagcagagcaacaagaggaagcctgcagccacgctcctcctggatctcctcacgatgggttcgcatcgtcaccgcagcgcagggcaatgcagcctcgtgcagccgccaagcctcatcacctgccttctcctactgctgcttctgcttctgtcgccaccggcgctcccgtgctcggcgtcgtcgtcgtcgtcgtcgtcgtcgtcgtcgtcgtcggtgatcactcacctcccgggattccttggtcgcctgccgttctacctcgagactggatatattggtatcgaggagaagactggcactgagctcttctactacttcgttgaatcagagacgaaccctgacacggaccctttggtattgtggctggtgggtgggccccgttgttcggccttctctggcttagcctacgaagtaggtcctttgaattttgtgttggaagcttataatggtagtttgccaagattggtttataatcagtattcatggacacagatggcaagcataatttttttggatagtcctgtcggttctggtttcgtcgtacgcacgtgattccaatgggtacgatgttggggatatatcattttctctacaagtgggcacaattatgaaggagtggctcaatgatcacccacgctaccgctcacataatttctatgttggtggagcctcatatgctggaaagggggttccagttatcgtgcaatacatttcagaagcaattgaagaacaaaggcaacgaccattgattgatcttaagttacagggatatatagttggcaaccccataacaggttcgaaattcgataaaaatttccatgttccctattctcatggcgttggaattatatctgatcaattatatgaggctgcggtaacgcattgcaaaggagatttcgtgaacccaacaaaccaattgtgtgctaacgtcgtatatactattaataaactcatgtctgaagtttcggatggaaatatcttggaggataaatgtgttaaagctgcaccaaaacctacaatagatgtttcagcaagcagggcactgctggaagaatacagccggctaagcaagccacctattcgaccttctatggattgcgcttcatatggttactacctatcatactgctggatgaatgacaatacgactagagatgctcttaagatcaagaagggaaccattggtgagtggttaagatgaaatagaggtgtatttccctatgctaaagacatcccaaacgccttggattaccattttaatctcaccacaagaggttaccgagcacttgtgatgagcggtgaccatgatctcaaggtgccatttttgagcactcaggcatggataagatcctttaacttcttcatagttgatgactggagagcatggcatgtggatggccaagctgctggattcacaattacgtatgccaacaacttgacctttgccacagtaaagggtggttcccatgtcgctacagtaaacaggcctaaagaatctttcgccatggggaaacggtggctagccaataagcctctatgatgttgccagctcctatttgtcagaaatgtttgcagggttttaactcaaccatgtgtctgctgtccaagtgccatggttctcgaaaaaatactatttgtaatggagcccatgtaaatagtgttctcttctgccgaaaggcaggtttcacttaaagtgaaatggaaaacaccatagttatatattaatttctctcgaaaaaaatttgatccctactacacatccattgggttctatttataggtttacaaaaatagtgttctcttctgccgaaaggcaggtttcacttaaagtgaagtggaaagcacatagttgtatattaacttctctcgaaaaaatgtgttccctattgcacaaaaaaaaaaaaaaaaaaaa

SEQ ID NO: 48888 - DNA, 1121 bp, Oryza sativa
  Clone ID: PAT_MRT4530_51520C.1
cggccacttcctcctccgcctgccgaccgccggacgccgctgcctcacacgcctaacgaccgcaagccttgacacgtttgggggacgcggatccggcgcctctccaccgaccgccagtcgcctcctcctccgccaatatggatggaaatgatggatcgatgcaggtctctctctccctggtgaccgtggcgaagaacggcagcggcgattacaggacgatcgctgctgccttggcggcagcgcccaagagcacgaagaaggtacggtcgtcctacactatccgtatcggggaggggacgtacatcgagcagctcaacatcacgaggcgtgatgtgactttgttcggcgacggagtgggcaagacggtgatcaccggcaaccgtggctccctcaagcatggcgacatgccttcatcggctaccgttactgcctcaggccgcggtttcatggcccgagacctgacgatacagaacacggcgggaccggaggggaaccagtcgttggctcttcgctctagttccaaccacactgtactgtaccggtgcgagctggagagctttcaggacaccttgtacgctgagaacggactgcagttgtacctcgacagcgtgatttcaggcacggtggacttcgtcttcggcaacgccaaggcggtgttccagagatgccatctcctcgtgcgccgcggaagggaaggtgcgcacaacatcatcacggcgcagggccgcgacaagcccggcgacgacaccggcttcagcttccagaactgcagcatcatggccaagcccaacgagaacctgacgggcgtcgagacattcctcggccgcccgtggaagaaccactcgcacgtcatcttcatgcagtcgttcctcgacggcatcgtgcacccgaagggctgggtggagtgggacaagagcaagcacgtcttggagacgaccaagaccgtgtcgtacatgaagttcaacaatacgggacccggatcggacaccagccgccgcgtcaactgggagggcttctccgtggtcgacgctagcaaagctgaggagtacaccgtcgaccgcttcatccacggcacccagtggctgcccaacgctctcaactacaagcctggtctctactag

SEQ ID NO: 48889 - DNA, 531 bp, Oryza sativa
  Clone ID: PAT_MRT4530_51521C.1
ggccgcttttttttttttttttttgaccgtttttttttttaaccgcttatagcatcaaaggccccctatcacaaccgccgttaatgagaaccgcatttaccaacatcccaattcatgaacatgatatttccgcgttatgttagagacacgccaatttccaggggcgccaaaatgaaaacctgtggaaattatgaggcatcagatacctttggttgacgatacgttccctgaaagcgttttggctggaaaacatcttgatggaagagccattggatgtctggaacactgaagcaccagattacatagacaccacaaacgatacccacccctaaagtaaccccaccgtggaaaaaccctatagtggcaaaaccgtagatcaggacggacggagagcctaccttgcttacacccttcgttcattgcaccctgggagaaggcgcccgaggaagacggcgccgccgacaaaggcggaggaccagccgtaccgaagaacagccggagccgattcgtcgacgagccgcctacacaacg

SEQ ID NO: 48890 - DNA, 262 bp, Oryza sativa
  unsure (1)..(262): unsure at all n locations
  Clone ID: PAT_MRT4530_51522C.1
cacacgcacgcaccgtgaggcatcgacgacgagcgagancccctcggcggcagaagacactcacggcgatggcggtgacgaggacggcgctgctggtggtgttggtagcgggggcgatgacgatgacgatgcgcggggnggaggcgcacagccgagctgcgcggncgcantcacgcagctggcgccgtgcngcgagtcggcgtggngcggngccggggnagccgctgccggcgccccggggagtgctgctcggcgctgggcc

SEQ ID NO: 48891 - DNA, 306 bp, Oryza sativa
  Clone ID: PAT_MRT4530_51523C.1
atggctctccgggctatcttttgtatgtctgctaagactgctaagaaggagtttgttgatccttttgctgcttatgagactgctcgagtcattgttagtggtgagggtccttctggcacttctcatttctttaatgaggagtcctctcactccgaggagagcagcgatgatgaggagtcggatgcccctactgagaatgttcctacagatcccaatgaggcagtggacgccgccgggcaagacatcgactctcctcactccggcgacaccgagatcattccttctgatggcgatgatgaggcttga

SEQ ID NO: 48892 - DNA, 494 bp, Oryza sativa
  Clone ID: PAT_MRT4530_51524C.1
gatcagacagcgagcacgctgatgcttcaatgagatattttatccgcctgtatatctgaacataacaaattgaccgctgaaattaaccactaacccatgcatcctaatccatgcatgcaggaaacaatggctgcaccacacactgtacgtacgaatctaattagatcgatatctctatatttaatagcgcgcgctgaatgacaccatactacatgcatactgttcgaatagcacgcgaaagagcttgaatagagcatattccgtcgccgaatcatagattgtaccaggctgaactcatcaagcttcttgggatgccctggccctgatgaaattgatcacacgctcagcctgacagggtatggatgatggtgttgagccacgggtgagacaggtgcttgaacaaggttggcaaagggccctttttgcgtcacgggggggctggaccaggaaccccaagaacgccaggatcgccagccttccggtggcgagctcct

SEQ ID NO: 48893 - DNA, 595 bp, Oryza sativa
  Clone ID: PAT_MRT4530_51525C.1
atgaacggtttcgacttgccgacaaatttcgttgaaaatctagagaaacttgcgagaagagtcaaacctcgcgtcgttcctccacaaatcaggttctcggcacctgaaccagtcattttcgcaccatcaaattccaagccgatggcttagaagaccctctgtgattactcagcaccctttggggatgccaactttgagatcaagacaggtcagatcactatgctacaggctaccccatcctgtgggaaagccaatgaggacgctaacgcccatctccaacaattccttgagctctgcaacaccatcatcatcaaaggagtgacctaggatgaggctccgtctgttttcgttctctactcgggagactgaagcattggttctattccaagagaggtgctgtggacaattgggagaggtgttcaactgcgttcatcatgaggtttttcctaatgggcaaaaccaatatcctcatggaaagatctcgagtttctagcaggcaaccaatgattcaattccagaggcatggggagactccatgaatacatcctggtgtgtcctcaccatgggatggacaactagctcatcaactaaaatt

SEQ ID NO: 48894 - DNA, 425 bp, Oryza sativa
  Clone ID: PAT_MRT4530_51526C.1
gggaaaggcccaaagccaaaattttttttgaatcaatttaaaccccccaaaatgagggggggggggggaccacttttttattttttaactatttgttttaaaaaacccaaaccatccttttttttacccttttaaaccgaaaaacatggcccccccattttttgttttttttgaaccaacggaccaaaatgattgattttttctaaaccgggaggttaaacccttagccccccccccggaagctggttggatactggtggtaaaaaaattttttccccggcggcctataagtttacgccgggtggtaactccccgggtacttgacgggggggggggggggctccgggtttttctcctcttttttgaccccccccacgggcaaaagcgtggggtggcccacctttttgcccaacccgggggggagt

SEQ ID NO: 48895 - DNA, 176 bp, Oryza sativa
  Clone ID: PAT_MRT4530_51527C.1
atggattacgcttctgacgccgacgaggagcagtgcggcaacggcgatcgtcgccaccatatacaacagcgattccacactcatcttgctgccgttggcctttgggttggtgttggagtcgacagatgcatgagtgtagatgccgccggcggcaatgatgagtgccaccgccggag

SEQ ID NO: 48896 - DNA, 321 bp, Oryza sativa
  Clone ID: PAT_MRT4530_51528C.1
ggcaaaaaaaaaaaggataagggggggaaacgattcatcgaaaaaacaacggggggcaacccaagaaacccccgccagttgaatttccccagggggggggacagctttgttggttttggacaaaaaaaacaaggaaaagggggcccaaaaaaattccccccacgccccacacccaaggggcagggacgaggccataaaatactgaggccaaaaaaggcaattatcttgcctttgcaaaagggaaacatagaacatcggggggagagtctaataacggaccatgtaggcccggcccccgaaccagttgtagcccggaaaacc

SEQ ID NO: 48897 - DNA, 561 bp, Oryza sativa
  Clone ID: PAT_MRT4530_51529C.1
atggcgtcgaagctcgtgacggcggtcgcccgtcaagcggcggccacatctcgcgccgcccgcttagctgcggtggcgcgccatgacgcggcggccgcatctcgctccgccggcttagctgcggcggccgcatctcgcgccgcccgcttagctgcggcggccgcatctcgcgccgcccgcttgaagcctcgtcccccactggacgacgctgcccgcctctccttccgctacagcagtgaacctccagatgatggaaagtgcgtgacaaaagaggaccttgagtcggacgaagccgtgtgggccttatttgagcgctattgcaagtcatacaacaggaagtatgatcatgctcagatggttcgccgcttccgtatattcaagttcaatgcaaagagaacatattgctggaaccagtatcttcataaagacgtaaaggaattagctcgcgccaaaaaggatagggatttaggactacctgtcgactcttggtacctacaaaaagagttaggcgaatacgacgatgggggggagccacttactgaatattggcggaaattttga

SEQ ID NO: 48898 - DNA, 273 bp, Oryza sativa
  Clone ID: PAT_MRT4530_5152C.1
atggcgcagcaggcaagggcgcagtggccgcagaagcagaacaagctgttcgagcaggcgctggcggtgtacgacaaggagacgcccgaccggtggcacaacatcgcccgcgccgtcggcggcggcaagtcggcggaggacgtcaagcgctactacgagatgctggaggaggacatcaagcacatcgagtccggcaaggtccccttccccgcctaccgctgccccgccgccgccggctaccaggccgaaaggttgaagcatttgaagatctag

SEQ ID NO: 48899 - DNA, 480 bp, Oryza sativa
  Clone ID: PAT_MRT4530_51530C.1
atggcatgtgcacagcagctagccaggtacaagaccctttcaagatttcgtgccgcaagcgccgtgtcgtccatcccatgccgcaagcgcaggcctccacggcgtagcggccaacgcaccggctctatccccgccgtcctcaccgcacagggagccaccgcagagcaacagcactcggacccagccgcccgcaacagcaccagcgacctccacacgtgcccggccagtcccttcatagacactgttccgttatcaaggacatgtcgacgctggtgccgagtcgctgctgccctggaacccctcgaccccgacctcatgccgtcacgggcggatcttgtcagccctcgccaaccatcgatcccgccgcccgatctggaggacgagcgcgccacctccggctcgtgcagcccaggttgtcgccaacacgctgccatcgactcctctgcagtcatcaccgccactcttaattaccaccactag

SEQ ID NO: 48900 - DNA, 618 bp, Oryza sativa
  Clone ID: PAT_MRT4530_51531C.1
atgggcaacagcctgagatgctgcctagcttgcgtcctcccctgcggcgccctcgacctgatcaggatcgtccacctcaacggccgcgtcgaggagtacgggcgcccggtcgccgccggcgagatcctcgccgccaaccccaaccacgtcctcagcaagccgtgctgctcccagggcggcgccgtcgccgtgcgcaggacgatcctcatcgtctcgccggactccgagctggagcgcggcgagatctacttcctcatcccggcctcctccgtgccggacaaaaagaagaagagcggcggcggcgccgccgcggcgacgccggcggcgagcggccgccacggcaagagcaagcaggcggcgccgtcgtcggatcacgggggcaatggccgtcgtcacgtgcgcgacgtgtcgtcggagaagaggtcgtcgtcgttgcaccggcggcgcatgagcgccggcagccggacggcggcgtggaggccacacctcgaccggagttcgcccatccgcgccgactgcctcgcgttctccctcgaggccgaccccttccgccgggagcccgacccgtcggccgcgtcgcagcgggaggtggaggagtccaccatggcgcagacgtag

SEQ ID NO: 48901 - DNA, 211 bp, Oryza sativa
  Clone ID: PAT_MRT4530_51532C.1
gacgaggcttctggattagtacaacctccagtatctcctcacaatgcatgttgttcacataacgatggtacaaaagagagggagccaagattgccattgtgtttacccagtaagagttgagctttttctccgaaatgtttcactgacgtcaaattggagcgatgaatttctgggggaacttgcttctcaactcagtctgagggttactcag

SEQ ID NO: 48902 - DNA, 309 bp, Oryza sativa
  Clone ID: PAT_MRT4530_51533C.1
atggcacgccacgacttgcacaaggacctgaacctcaggatggacttgactggaggtggacaaggatctgcgagccaagaccggcgcggacgacataggatgccggagatcggtggagtcgccgagaagcaagcgcgacagccacaggcgaagcggcgtgacagggttctcctccgtggtggcgacggcaagttcccggacccggagccagcaggttgccgacgccgacgcggcaagcggcgggcgagcgcggcagcgggcggcggcgcgcggccgaagcaggcagaggggcggcgttggccgctgtag

SEQ ID NO: 48903 - DNA, 1105 bp, Oryza sativa
  Clone ID: PAT_MRT4530_51534C.1
accaaaaatgccaatgtaaatggctgtaaacatttttccctttgggtaaccgattaacagtatagacatggacaccgaaaatgccaatgtggaatttttttctcttgtgggtaactgattgatcgtatagacatgacttaaaaccatggtatttaggcctgctaagaaatttacaatcgacccgtctaccagcgtagtgcaagataaagaatgttttgcctcaagtgcacaaccatggtacattcaagttgacaaaaaatcagctttcctcatagaatcagaatttgtgttgcactggccacaataagggacattagcctctagatgaaaggtgaaccgactagatgatgacaagtgatcactgatcaggcctttgtttggaacaaaaaaaattccaatcatcgtgtcacatccttccttgacagggatgctgaggaagaacaagtgaacgtggccctcgacctcagcgacggtgtcgaagggcacggatccccgcgcgaggtcctcgaggaggtagatcgcgtcctccacgacgcttatgccgtcgaggctgaggttggcgtcgatgtaggagacggcgcgcgcgcggacgcgcccgccgccggaggtgacgcgcccgagcggcgcgccgcggtagccgatgtcgacgtcgaggcggccgtagtcgagcgcgaagaggtccgggttccggacgcggaccttgagcgcggcggagatggtgacgcggacggtggggcgcgcggagacggagacgtgcgcgaggcggaggcgcgccacgctgacgtccgggtcggcgggccagaggaggaacccggcgagggagagcagcgcgagcgtggagaggagcgggccgaggcagcggcagcggcacccgcgccgcagccggcggagccgcacggggacgaggaggacgtacgagtccgcgttggcgtcggcgccggcgcgggcgtccagatagggtggcggggaggcggaggaggggagcaggggctcccgcgcaggcggaggctgcgccttcgccatgggagggcgagggcgaggttggtgggggcggtggtcgccggtggtgggggtgtgggggtggttacggggagtgggctttggc

SEQ ID NO: 48904 - DNA, 127 bp, Oryza sativa
  unsure (1)..(127): unsure at all n locations
  Clone ID: PAT_MRT4530_51535C.1
acggagagggtggaggaaacgagttcctgagccctccaacctnngagtccagctagcagggctgccgaggatgtggcagctaccgtcgccgaccccagcgagctagagggcgacgggctgctacatc

SEQ ID NO: 48905 - DNA, 238 bp, Oryza sativa
  unsure (1)..(238): unsure at all n locations
  Clone ID: PAT_MRT4530_51536C.1
ggccgcccntttgttccacacgagatttctgttctcgttgagctnatcttaggacaacttgcgnttatcttgttacaannnttncccgncccnanccaaantcccccnnttnncaaattgntttncggccggnttcggtccgaggggactngggcgtttagnagccaaaaggaggggncagggcccgttttccgactcanggaataaggaaaataacgttaaaagtagtggtatttca

SEQ ID NO: 48906 - DNA, 666 bp, Oryza sativa
  Clone ID: PAT_MRT4530_51537C.1
atggcgcgcggcgcgtgtgtggttggtcgcattagcgccggcgtgcatggcgaggctttcgcgcgacgccaccgctgccgacgagcactgcagtgtggctgcatgggtgatgacttgtggagagcgttcttgacggcgagatccatggaaaatgtctgcgtgctccaaccgcatgcaacccgtcttctgagtgaatcccactgccgcgagccgccgccgagagccgtcgttccccttgtcctcccactaccgcgagccaccgcggttgagccgccgcccccagtctggttccgctgcgccccgatggccgccgccgctcccctcgtccagccgctgccgcagctgccatcaaaaaagatagaaaagagagaatataggggtggagtcactgacagatttgttttaagattcgtgcaagtggacaagaaaaaaatcacaacgcatacacaagcaatgaatggtgctcttgttcatcatactttgcggcaatgcggccgggtctcggtagtcgctagcagcaacgctgtcaagttcacagtaatagctgtacaaatccaagtcgaagctgctaatcgcgtcgatacgatcgaagccactcgagaaatcgacgtgacgaaaagcagggagaagttgtgtgtgtgtggcagcatgtacacgaccgctgag

SEQ ID NO: 48907 - DNA, 330 bp, Oryza sativa
  Clone ID: PAT_MRT4530_51538C.1
cagatcaaatgtatgaattgaaggtgaaatgtatgccatgcaatgcagtttgcataatgtatgtgctgtgtgaaatgaagatgaaacaatataaggcataatcaaggaagggtcagctgccactctagtttacatatacagtttaatttgtcctaggatctagaactttgtgcatacattcaatagagaatgttatgcgacttgacatctgataatctgaatacataggagtcgaaactaatgagaacatggaaatacatgtccttccatcatgtgcacaaaagtatcttataaatatcggggaaaattttccagattggcacaaaattc

SEQ ID NO: 48908 - DNA, 555 bp, Oryza sativa
  Clone ID: PAT_MRT4530_51539C.1
atggctctcctccgcgctgccaccgccgacctcctccgccgccacctccgcgtcccgcttgctagtctcctccaccccgccctcttgccgccgccacagagcacggagtcctcctgccccgacgatccgagtactcccggccccgtcgcacgacgcggcgacctcttcgccgccccgctgcgccggtggccacgtccgctaattcccgtctcctcctcttcttccgtcgacagtactggggtccgactttactcgcacctctccggcgccggctcagccggtggggattccacgcctcctccgcaacagtcgccgccggcgaagccacctcctccgtcgtgggtggacaggtcaatcacgatggcagcgatgccaggggagctgccggacatgaggatgctggcgctcttcgcctatggatccgtcctcatcagaggcgtcggatgcacaatcaacgatcttcttgatcgagatattgatagaaagatctctgtcaatgttcgtccatatatgatgcggaacttttcgcccaagcctcgtgctggggatatgtag

SEQ ID NO: 48909 - DNA, 411 bp, Oryza sativa
  Clone ID: PAT_MRT4530_5153C.1
ctgtaggttgattcggataaatctaaacgcttaaaataatgggaccactaaatttaataaaaatcaacagtaaaatgttttccttttttttatagatttttaagaaattttctaatttctaaaagtgccacgtgacagcttagcccaggccaggcccacttacatctggcagctttcataggtcatatactgccctcatagaccaaaattagtcttttctgcacactttgtccttactcgtgcgcactcgggaagaatttctcgatcagtcatccatccctaaattgctccaggctaagcatgcttaacctcagagttctttagagattggcttctggaaaagaagttgcaacttgtcaagccatgaacgttctattaatcctattaagccctcggccaggatgtcaaagc

SEQ ID NO: 48910 - DNA, 240 bp, Oryza sativa
  Clone ID: PAT_MRT4530_51540C.1
atcctttcgctctgcggcttctccccacgccgagcgccgacgcttccctccccttctgttgacgcgtgatcttctactccaccacgagccactttcttcgatccctcccgttgaccgtgcgccgtcttcacctcggtgagaactcagtcacgggcatgcagggagggaatcgctacttcttgccctaccgactttcatgcctccattcatcgcatttttacctttaccggaactcctgtc

SEQ ID NO: 48911 - DNA, 480 bp, Oryza sativa
  Clone ID: PAT_MRT4530_51541C.1
atgggtggagaggcggcttggagtagggttaggttttttttcttatatatgctgattctcatgggctttttgggcttgtgttcctataatgggccacattttaagagccaaatacttgtggtattttcacttccttgggtcttctcttatcccctgatgaagagattcacatattgggataaagaagatgacctcaaaataggagtcaagtccacagcaataaggtttggagattcaaccaagccctggatcagtggatttggtgctgcatgcattgccaatttagcactcagtggctataatgctgaccttgcatggccttactatccttttctggcagctgcatctgcgcacttagcatggcaaatttcaactgttgatttatctgaccccctagattgcaacaggagatttgtgcccaataagtggtttggagctttgatatttggcggaattttatgtggacgacttgtatcatga

SEQ ID NO: 48912 - DNA, 961 bp, Oryza sativa
  Clone ID: PAT_MRT4530_51542C.1
ctccagcaccagctcgggcgccggtggggattccacgcctcctccgcaacagtcgccgcaggcgaagccacctcctccgtcgtgggtggacaggtgggtcccactggcggcacggccatatgccatgctcgcccgcatcgacaagcccattggcacctggctccttgcgtggcccagcttctggtcaatcgcgatggcagcgatgccaggggagctgccggacatgaggatgctggcgctgttcgcgtgtggatccgtgctcatcagaggcgccggatgcacaatcaacgatcttcttgatcgagatattgatagaaaggttgagcgtaccaaaagcaggcctcttgcatcaggtattctaacacctacgcaaggagtgggtttcctcggattccagcttttactgggattaccaattcttctccaactaaataacttaagccaaatacttggggtattttcacttcttttggtcttctcttatcccctgatgaagaggttcacatattggcctcaggcatatcttggcttggtattcaactggggagctttgataggatgggctgccatgaaaggaaccatagatccagccatcatccttccgctgtatacagctggtatatgctggacactggtgtatgataccatatatgcacatcaggataaagaagatgacgtcaaagtaggagtcaagtccacagcattaaggtttggagattcaaccaagccctggatcagtggatttggtgctgcatgcattgccaatttagcactcagtggctataatgctgaccttgcatggccttactacccttttctggcagctgcatctgcgcacttagcatggcaagtttcaactgttgatttatctgaccgcctagattgcaacaggaaatttgtgtccaataagtggtttggagctttgatatttggtggaattctatgtggacgacttgtatca

SEQ ID NO: 48913 - DNA, 135 bp, Oryza sativa
  Clone ID: PAT_MRT4530_51543C.1
acgtaggacggaagccaagaatgcgtgaatgaaacctcatgaagattgacatgaaagggggtaagcatttaaatgaggacatgactgctatcggcttaatcaaaaataatgaccattcatctaatgggcattaaa

SEQ ID NO: 48914 - DNA, 210 bp, Oryza sativa
  Clone ID: PAT_MRT4530_51544C.1
ctccagctcccgctcccggcgcgccatctccaggcgcggcagacatgggtgatgcagacgaacggtcgaagacgaacagaggacgaggagcagtcgtgcagaagcactccccaaaaacctgatcacccacctacccggtgcagatctcaggcgaaggtgtggttccagaggccctgctcgttccgatctctcgtgcacgcaagcgattag

SEQ ID NO: 48915 - DNA, 5001 bp, Oryza sativa
  Clone ID: PAT_MRT4530_51545C.1
atggacatctctagggcaaatgaaggctacacgagctgcggcccgatggccggcagcatcaaccgtcgtggtctggacctgactggtttcgttttggagctgcggggcatgtgcgttgtcttggggtatccgcatggagtggactaccagggcaagcagctcctggagcaggaagtgatcctcactggctcacccgagaggacttcgttggcagtcaccgcgggtggagattccttctccgccgcttgccagaacgccgcactcctcgccatcggcactcttcaccagcgctacccggacgagttgcagcactcgccctaccgctaccaccctcgtcgcggaggagcccgcgactacgccaccttccaagatgctagctcggaggatgacgctaccatcatgcacctggcgcgcatggtggaggcgtacgacgcggcccgtatcgacttccaccagatggtgcgccgtgggttggtcaagaacaacatgaagatcctggagctgcgtcaggagaatctgcagctgaagaaggacctagacgcggtggaggcgcagctgtgtcagctcaagatcgcccagggagagatggtgacaaccaggagaagtgctgctaccggtgatggcaaccaacccgaaggtagcaaccccaacatccaaggcggcccacctccacctcctcccccgcctccaccaccaccaccagacaccaactccatcctcacccaaatcctcgcccagcaggccaacatgatggctgctttcctccatcacatccaaaatccgccacagcataatgctccacctccaccaccacccccacaacactctaaactcgccgagctcctccgcatccgtccgcctaccttctctagctccaataaccccgtggatgctttggattggttgcatgccgtggggaaaaagttagacaccgtgcagtgcaacgatgaggagaaagtcatctttgccgctcaccaactgcaagggcccgcatctctatggtgggaccacttccaggctacgcagccagaggggcagcctattacttgggcccgcttcaccgccgctttccggaggacccatgtgcccgccggagtcatggcccttaagaaaagggaattccgagagttgaagcaaggcaaccgctctgtgatggagtatttgcatgggtttaacaacctggcccggtacgccccggaggatgttcgtgaagatgaggagaagcaagagaagttcttggcaagaatggaccctgagctgtccgtgcgtctggtctccggggactatccggatttccaacgtctggtggacaagagcatccgcttggaagccaagcacaaggaactggagtcgcagaagcgtcgcttggcgaatctccgcaatcaacagggggctaaccaaagggtccgctacaccaatccatatccagggggatcctcctcacagccgcagcaacagcagagtcagcaagggacccgtgtgccccgtcctcctgcgcccgttgtgcagcctggtcaaggccgcagagaagttcaaggtcagcagcgtctgtgcttcaactgcttcgagcccgggcactttgcggataaatgcccaaagccgaggcgccagcaaggccaagcgcctccccgccccaacaatggtggtaaggatgtcattcggggtcgtgtgaaccacgtgactgccgaggatgtgctgacaactccagacgtcatcgttggtacattcctcattcattccatccctgctaccattttgttcgactctggagcttcccactcgtttatatctgtgccattcgtggggagaaatcagttgggggtcgaaaggcttaggaaccctctgctcatcaccacccctagaggggttatgacagcaaagtattatagccctgccgtcccaatagaaatccagggaattccttttccctcggatctgattcttctagacactaagaacttggatgtgatccttgggatgaattggttggctgaattccaaggagtagtggattgcgcaagacgcactgtcactctgtaccgagggccggaacaaccggttgttttctttgcacccccaacttctatcggcagttcagaacttcatcagataggactgtcagaaatccccatcgtcagtgagttcggagatgtgtttccggaagaactacccggtatgccgcccaagcgagagattgagttccggatagatcttgctccaggaaccactcctctgtacaagcgactctaccgtatggcagcaaatgaactggccgaagtcaagaaacagttggaagagttgaaagaaaaggggtatatacggccgagcacttccccctggggtgctcccgtgatttttgtggaaaagaaggacaagacaaagaggatgtgtgttgactacagagctctcaatgaagttactatcaaaaacaagtaccctcttccccggattgatgatctgttcgatcagcttaaaggtgccactgtcttttctaaaatcgatcttcgttccggatatcaccaattgcgtattcgtgaagaggatatcccgaagaccgcattcaccacgcgatacggactgtatgaattcacggtaatgtcgttcggtctgaccaatgctcctgccttcttcatgaacttaatgaacaaagtgttcatggaatacttggataagtttgttgtggttttcattgatgacattttggtgtactcacaatcagaggaagaccatcagcagcatctccgtctggtgttgggaaagttgcgggaacatcaattgtatgccaagcttagcaagtgtgagttctggttgtccgaagtcaaattcttagggcacgtgatatctgctaaaggagttgctgtggaccccgaaacagtgaccgccgtcactgattggaagcaacccaagacagtcactcaggttcgcagctttttgggtttggcaggatactaccggaggttcatcgagaacttctccaaaatcgctcgacccatgacacagttgttgaagaaagaaaaaaaatttgtgtggagcccgcaatgcgagaaggcgttccaaactctcaaggaaaagctggtttcctcgccagttttaatcttaccggatactcgcaaggacttcatggtgtgctgtgatgcttcgcgccaaggattggggtgcgtgctcatgcaggaaggtcatgtggtagcctatgcctcacgccagctacgacatcatgaaggcaactaccctacccatgatttggagttggccgctgtggttcatgctctaaaaatctggcggcattatctcattgggaatcgctgcgaaatatataccgatcataagagtttgaaatacatcttcacccagtcggatctgaatcttcggcagagaagatggttagaactcatcaaggattatgatgtgggaatcctttatcaccctggtaaggccaacgtggtcgccgacgctctaagtcgaaaaagccgttgcaacactcttggcgtccgtggcattccaccggaacttcatcaacagatggaagccctgaacctaagcatagttggtcgtggattcttggctacactggaagccaagcctaccttgctcgatcaaatccgcgaggctcagaagaatgatccagatatgcatgggatcctcaagaatatgaaacaaggtaaagccgctggtttcacagaagatgaacatggaaccctatggaacggaagtcgtgtatgcgttccggacgacaaggaacttaaacagctgatagttcaggaagctcacgaaagtccttattccatccaccctggcagtacgaagatgtacttagacttgaaagggacatactggtgggttagtatgaagtgggaaattgcagagttcgtggccctttgtgatgtgtgccagcgtgtcaaggcagaaaacggccggccggacttctccaacctctacaagtaccagaatggaaatgggatgaaattgggatggatttcatcaccggacttccaaaaacccaaggcggtagctcggtttattcctgtgaagaccacctatggagggaacaaactagctgaactctacttcgctaggatcgtgagtctccatggcgttcctaagaaaattgtatctgatcggggaagccagttcacctctcatttctggaagaagctccaagaagagttgggtacccgcttaaatttcagcaccgcgtatcacccgcagacagatggacagaccgagcgtctaaatcagatcctagaagatatgctccgcgcatgtgtccaagattttaggaagacatgggataagagtctcccctacgccgagttctcctacaataacagctaccaagccagcatacagatggcactgtacgaagcgttgtatggccgcaaatgccggacaccactattgtgggaccaagttggggaaagccaagtgttcgggaccgatatcttgagagaagctgaagcgaaggtcaggaccattagggagaatttaaaggtggcccagtctcggcagaagagttatgcagacaaccgacgccgtgacctggaattcgcagtggatgactttgtgtatctccgggtcacgccgttgcgaggcgtacaccggtttcagacgaaagggaagctcgcacctcggtttgtgggtcctttccgtatcattgctcgacacggagaagtcgctaaccagctggagctgcctgcctccttgggcaacgtgcatgatgtgttccatgtgtcgcaactcaagaaatgccttcgagtgctgtccgagcaggccgactcagagcagattgaagttcgcgaatacttgacctacgtggagaggccagtgaaaatcctggacgccatggagcgcaggaccaggaaacgggtaatccgtttttgcaaggtccaatggagcaaccacgccgaggaagaagctacttgggagcgtgaagacgagctgaaggcagcccatcccgatctcttcgccagttcttccgaatctcggggtcgagattccgtttaa

SEQ ID NO: 48916 - DNA, 3999 bp, Oryza sativa
  Clone ID: PAT_MRT4530_51546C.1
atgaagatcaccgcccgcaagagtacctccaggcccgagcttgttcgtcagtccttggcatggacctgcttcgtcgagacccctcgcgccgagcccgcgccctcgatggtgacaaccaggagaagtgctgctaccggtgaaggcagtcaccccgaaggcagcaaccacaacaaccatggcagcccacctccacctcctcccccgccaccaccaccaccaccaccagacaccaactccatcctcacccaaatcctcgcccagcaggccaacatgatggctgctttcctccatcacatccaaaatccgccacagcataatgttccacctccatcaccacccccgcaacattctaaactcgccgagttcctccgcatccgtccgcctaccttctctagttccaataaccccgtggatgccttggattggttgcatgccgtggggaaaaagttggataccgtgcagtgcaacgatgaggaaaaagtcatctttgccgctcaccaactgcagggacccgcatctctatggtgggacaacttccaggctatgcagccagaaggacagcctattacttgggcccgcttcaccgccgctttccggaggacccatgtgcccgccggagttatggcccttaagaaaagggaattccgggagttgaagcaaggcaaccgctccgtgatggagtatttgcatgagtttaacgacttggcccggtatgccccagaggatgttcgggaagatgaggaaaagcaggagaagtttttggcaggaatggaccctgagctgtccgtgcgtctggtctccggggattatcctgatttccagcgtctggtggacaagagcatccgcttggaagccaagcacaaggaactggagtcacacaagcgtcgcttggcaaatttccgcaatcaacaaggggctaaccaaaggatccgctacaccaatccctatccagggggatcctcctcgcagcagcagcagcagcagcaaccacgctccgcgccccgacctcaattcgtggtgcgtgtcccacagccgcagcaacagcagagtcagcaagggacccgtgcgccccgtcctcatgtgccagccgtgcagcctggacaaggccgcagagacgctcaaggtcagcagcgtctgtgcttcaactgcttcgagcccgggcactttgcggataaatgcccgaagccgcgacgccagcaaggccaagcgcctccccgccccaacaacggtggtaaggatgtcattcggggtcgtgtgaaccatgtgactgccgaggatgtgctgacgactccggacgtcatcgttggtacgtttctcattcattccatccctgctaccattttgttcgactctggagcttcccactcgtttatatctgtgccattcatggggagaaatcagttgggggtagaaaggcttaggaaccctctgctcatcaccacccctggaggggttatgacagcaaagtattatagccctgccgttcctatagaaatccagggaattcctttcccctcggatttgattcttctagacaccaagaacttggatgtgatcctcgggatgaattggttggcacaattccaaggagtagtggattgcgcaaggcgcactgtcactctgtaccgggggcctgatcaaccggttgttttctttgcacccccaacctctgtcgacaattcagaacttcatcagattggactgtcaaaaatccccatcgtccgtgagttcggagatgtgtttctggaggaactacccggtatgacgcccaagcgagagattgagttccggatagatcttgctccaggaaccactcctctatacaagcgaccctaccgtatggcagccaatgaactggccgaagtcaagagacagttggaagagttgaaagaaaagggagctctcaatgaagttactatcaaaaacaagtaccctcttccccggatcgatgatttgttcgaccagcttaaaggtgccactgtcttttcaaaaatcgatcttcgttccggatatcaccaattgcgtattcgtgaagaagatatcccgaagaccgcattcaccacgcgatacggactgtatgaattcacggtgatgtcgttcggtctgaccaatgctcctgccttcttcatgaacttaatgaacaaagtgttcatggaatacctagataagtttgttgtggttttcattgacgacatcctggtgtactcacaatcagaggaagaccatcagcagcatctctgtctggtgttgggaaagttgcgggaacaccacttgtatgccaagcttagcaagtgtgagttctggttgtccgaagtcaagttcctagggcacgtgatatctgctaaaggagttgctgtggatcccgaaacggtgaccgccgtcactgattggaagcaacccaagacagtcactcaagtccgtagctttttgggtttggccgggtactaccgaagattcatcgagaatttctccaaaattgccagacccatgacgcagttgctgaagaaggaagaaaaatttgtgtggagcccgcaatgcgagaaggcgttccaaactctcaaagagaagctggaaggccacgtggtagcctatgcctcacgccagcttcggccccatgaaggcaactaccctacccatgatttggacttggccgctgtggttcatgctctaaagatctggcggcactatctcattgggaatcgctgtgaaatatatactgatcataagagtttgaaatacatcttcactcagtcggatctgaatcttcggcagaggagatggttagaactcatcaaggattatgatgtgggaattcactatcatcctggtaaggccaacgtggtcgccgactctctaagtcgaaaaagccgttgcaacactctcggcgtccgtggtattccactggaacttaatcaacagatggaagccctgaacctaagcatagttggtcgtggattcttggctacgctggaagccaagcctaccttgcttgatcaaatccgcgaggctcataagaatgatccagatatgcatggactcctcaagaatatgaaacagggtaaagccgctggtttcacagaggatgaacacggaaccctatggaacggaaatcggagttcgtggccctttgtgatgtgtgccagcgtgtcaagggagagcaccaacgaccggccggacttctccaacctctccaagtaccagaatggaaatgggatgaaattgggatggatttcatcaccggacttccaaaaacccagggcgacctgggataagagtctcccctataccgagttctcctacaataacagctaccaagccagcatacaaatggcaccctacgaagcgttgtatggctgcaaatgccggacaccgctattgtgggaccaagttggggaaagccaagtgttcgggactgatatcctgagagaagctgaagataaagtcagaaccattcgggataatctaaaggtggcacagtcccggcagaagagttatgcagataaccgacgccgtaacctggaattcgcagtggacgattttgtgtacctatgggtcacgccattgcgaggagtacacaggtttcagacgaaagggaagctcgcacctcggttcgtgggtcctttccgtatcattgctcgacgcggagaagtagcttaccagttggagctgcccgcctccttcggcaacatgcatgatgtgttccatgtgtcgcaactcaagaaatgtcttcgagtgccatccgagcaggccgattcagagcaaattgaagttcgcgaagacttgacctacgtggagaggacagtgaaaatcctggacaccatggagcgcaggaccaggaactgggtaatccgtttttgcaaggtccaatggagcaaccacgctgaggaagaagcaacttgggaacgtgaagacgagctgaaggcagcccatcccgatctcttcgccaacgctgcagcttcagaagatccgctcttcgtggaggttgaagccgacgtttag

SEQ ID NO: 48917 - DNA, 2640 bp, Oryza sativa
  Clone ID: PAT_MRT4530_51547C.1
atggcccttaagaaaagggaattccgggagttgaagcaaggcaaccactccgtgatggaatatttgcatgagtttaacaacttggcccggtacgccccggaggatgttcgggaagatgaggaaaagcaggagaagttcttggcaagaatggaccctgagctgtccgtgcgtctgggggatcctcctcgcagcagcagcagcagcggcaacctcgctccgcgccccgacctcaattcgtggtgcgcgtcccacagccgcagcaacagcagagtcagcaagggacccgtgcaccccgtcctcctacgccagccgtgcagcctggacaaggccgcagagatgctcaaggtcaacagcgtctgtgattcaactgcttcgagcccgggcactttgcggataaatgcccaaagccgaggcgccagcaaggccaagcgcctccccgtcccaacaacggtgataggactgtcagaaatccccatcgtcagtgagttcagagatgtgtttccggaagaactacccggtatgccgcccaagcgagagattgagttccggatagatcttgctccaggaaccactcctctatacaagcgaccctaccgtatggccgcgaatgaactggccgaagtcaagaagcagttggaagagctgaaggaaaaggggtacatacggcagagcacttccccctggggtgctcccgtgatttttgtggaaaagaaggacaagacaaagaggatgtgtgttgactacagagctctcaatgaagttactataaaaaacaagtatcctcttgcccggatcgatgatctgttcgatcagcttaaaggtgccaccatcttttctaaaatcgatcttcgctccggatatcaccaattgcgtattcgtgaagaagatatcccgaagaccgcattcaccacgcgttatgggctgtatgaattcacggtgatgtcgttcggtctgaccaatgctcctgccttcttcatgaacttaatgaacaaagtgttcatggaatacttggatacgtttgttgtggtcttcatcgacgacattctggtgtactcacaatcagaggaagaccatcagcagcatctccgtctagtgttgggaaagttgcgggaacatcaactgtatgccaagtttagcaagtgtgagttctggttgtccgaagtcaagttcttaggacacgtgatatctgctaaaggagttgccgtggatcccgaaacggtgaccgccgtcactgattggaagcaacctaagacagtcactcaggaaggtcatgtggtagcctatgcctcacgccagctacggccccacgaaggcaactaccctacccatgatttggagttggccgctgtggttcatgctctaaagatctggcggcactatctcattgggaatcgctgtgaaatatatactgatcataagagtttgaaatacatcttcactcagtcagatctgaatcttaggcagagaagatggttagaactcattaaggattatgatgtgggaattcactatcatcctggtaaggccaacgtggtcgccgacgctctaagtcaaaaaagccgttgcaacactcttagcgtccgtggcattccaccggaacttaatcaacagatggaagccctgaacctaagcatagttggtcgtggatccttggctacgctggaagccaagcttaccttgctcgatgaaatccgcgaggctcagaagaatgatccggatatgcatggactcctcaagaatatgaaacagggtaaagccgctggtttcacagaggatgaacacagaaccctatggaacggaaatcggagttcgtggccctttgtgatgtgtgccagcgtgtcaaggcagagcaccaacgaccggccggaattctccaacctctccaagtaccagaatggaaatgggatgaaattgggatggatttcatcaccggacttccaaaaacctagggcggttatgattctatatggcaccgcgtatcacccgcagacagatggacagaccgagcgtctaaatcagatcctagaagatatgctccgtgcctgtgttctagatttcgggaagacctgggataagagtctcccctatgccgagttctcctacaataacagctaccaagccagcttacaaatggcaccctatgaagcgttgtatggtcgcaaatgccggacaccgctattgtgggaccaagttggggaaagccaagtgttcgggactgatatcctgagagaagctgaagctaaaacgaaagggaagctcgcacctcggttcgtgggtccttttcgcatcattgctcgacgcggagaagtcgcttaccagttggagctgcccgcatccttgggcaacatgcatgatgtgttccatgtgtcgcaactcaagaaatgtcttcgagtgccgtccgagcaggccgactcagagcagattgaagttcgcgaagacttgatctacgtggagagaccagtgaaaatcctggacaccatggagcgcaggaccaggaaccgggtcatccgtttttgcaacgttcaatggagcaaccatgccgaggaagaagctacttgggagcatgaagacgagctgaaggcagcccatcccgatctcttcgccagttcttccgaatctcggggtcgagattccgtttaa

SEQ ID NO: 48918 - DNA, 3678 bp, Oryza sativa
  Clone ID: PAT_MRT4530_51548C.1
atgccccacacgactccagcagaaaaaacaaacgagaagaacacacgcgcaagcctactaactgctcgtctacttctgcaacgggctagggcggaagccgagcaacagcacatcctccgagctaccaacgccagaggctccctcctcctgaggaaccgagggcgcgggctcggcgcgaggggtctccacgaagcaagtccatgccaaggactgacgaacaagctcagacctggaggtactcttgcgggcggtgatcttcaggctgcggcagacgcggcggcgcttggggtgacagacctctgcgtgagcgatcttgagctgacacagctgcgcctccactgcgtccaagtccttcttcagctacaagttctcctgacgcagctccaggatcttcatgttgttctcgaccaacccacggcgcaccatatgatggaagtcgatacgggccgcatcgtacgcctccaccatgcgcgccaggtgcatgatggtagcgtcatcctccgagctagcatccctgaaggtggcatagttgcgggctccttctcggcgagggtggtagcggtaggacgagtgctgcaactcgttcgggtagcgctggtgaagagtgccgatggcgaggagtgcggcgttctggcaagcggcggagaaagaatctccacccgcggtgactgccaacgaagtcctctcgggagagccgcaagacggagagagactagaggattttcacaaataagaaaggatttttatttcgaaaatattgctaaagcttgggatctaaggctcgtcctatggtcaaggaggctagagtcacacaagcgtcgcctggcgaatttccgcaaccaacagggggctaaccaaagggtccgctacactaatccctacccagggggatcctcctcgcagcagcagcaacaacctcgctccgcgccccgacctcaattcgtggtgcgcgtcccgcagccgcagcaacagcagaatcagcaagggaaccgtgcaccccgtcctcctgcgccagctgtgcagcctggtcaaggccgcagagacgctcaagacgtcatcgttggtacgttcctcattcattccatccctgctaccattttgttcgactctggagcttcccactcgtttatatctgtgccattcgtggggagaaatcagctgggggtagaacggcttcggaaccctctgctcatcaccacccctggaggggttatgacagcaaagtattatagccctgccgttcctatagaaatccagagaatccctttcccctcagatttgattcttctagacgccaagaacttggatgtgatcctcgggatgaattggttggctcaattccaaggagtagtggattacgcaagacgcactgtcactctgtaccgggggcctgatcaaccggttgttttctttgcacccccaacctctgtcggcagttcagaacttcatcagataggactgtcagaaatacccatcgtcagtgagttcgaagatgtgttcccggaagagctacctggaaccactctgtacaagcgaccctatcgtatggcagcaaatgaactggccgaagtcaagaaacagttggaagagttgaaagaaaaggggtatatacggccaagcacttccccatggggtgctcccgtgatttttgtggaaaagaaggacaagacaaagaggatgtgtgttgactacagagctctcaatgaagttactatcaaaaacaagtaccctcttccccggattgacgatctgttcgatcagcttaaaggtgccactgtcttttcaaaaatcgatcttcgctccggatatcaccaattgcgtattcgtgaagaagatatcccgaagaccacgttcaccacgcgttatggactgtatgaattcacggtgatgtcgttcggtctgaccaatgcgcctgccttcttcatgaacttaatgaacaaagtgttcatggaatacttcgataagtttgttgtggttttcattgacgacatcctggtgtactcacaatcagaggaagaccatcagcagcatctccgtctggtattgggaaagttgcgggaacaccaattgtatgccaagctcagcaagtgtgagttctggttgtccgaagtcaagttcttagggcacgtgatctcagctaaaggagttgctgtgcaccccgaaacagtgaccgccgtcactgattggaagcaacccaagacagtcacccaagtccgcagccttttgggtttggccgggtactaccggaggttcatcgagaacttctccaaaatcgctcgacccatgacacagttgttgaagaaagaagaaaaatttgtgtggggcccgcaatgcgagaaggcgttccaaactctcaaagagaagctagtttcctcgccagtgttaatactaccggatactcgtaaggacttcctggtgtactgtgacgcttcgcgccaaggattggggtgtgtgctcatgcaggaagccctgaacctaagcatagttggtcgtggattcttggctatgctggaagccaagcctaccttgctcaatcaaatccgcgaggctcagaagaatgatccagatatgcatgggatcctcaagaatatgaaacagggtaaagccgctggtttcacagaggatgaacacggaaccctatggaacggaaatcgggtatgcgttccagacgacagagaacttaaacagttgatacttcaggaagctcacgaaagtccctattccatccatcctggcagcacgaagatgtacttagacttgaaagagaaatactggtggaaaattgtatctgatcggggaagccaattcacctctcacttctggaagaagctccaagaagagttgggcacccgattaaatttcagcaccgcgtatcacccgcagacagatctacagaccgagcgtctaaatcagatcctagaagatatgcttcgcgcatgtgtcctagattttgggaagacctgtgataagagtctcccctatgccgagttctcctataataacagctaccaagccagcatacaaatggcaccctatgaagcgttgtatggccgcaaatggcggacaccgctattgtgggaccaagttggggaaagccaagtgttcgggactgatatcctgagagaagctgaagctaaagtcagaaccattcgggataatctaaaggtggcacagtcccggcagaagagttatgcagacaaccgacgccgtaacctagaattcacagtggacgattttgtgtaccttcgggtcacgccattgcggggcgtacacaggtttcagacgaaagggaagctcgcacctcggttcgtgggacctttccgcatcattgctcgacacggagaagttgcttaccaattggagctgcccgcctccttgggcaacgtgcatgatgttttccatgtgtcgcaactcaagaaatgtcctcgagtaccgtccgagcaggccgattcagagcaaattgaagttcgcgaagacttgacctatgtagagaagccggtgaagattctggacagcatggagcgcaggaccaggaaccgggtaatccgtttttgcaaggtccaatggagcaaccatgccgaggaagaagctacttgggagcgtgaagacgagctgaaggcagcccatccagatctcttcgccagttcctccgaatctcggggtcaagattccgtttaa

SEQ ID NO: 48919 - DNA, 315 bp, Oryza sativa
  Clone ID: PAT_MRT4530_51549C.1
atgtcgagcagccggaggtcgcgctcacggcgagccgggagctcggtgccgtcgtcgtcgtcgtcgtcgaggacgtcgatctcggaggaccagatcgccgagcttctctccaagcttcaggccctgctcccggagtctcaggctcgcaatggcgcccataggggctcggcggcgagggttttgcaggagacgtgcagctacatcaggagcctgcaccaggaggtggacaacctcagcgagacgctcgctcagctgctcgcctcccccgacgtcaccagcgaccaggcggccgtcatcaggagcctcctcatgtga

SEQ ID NO: 48920 - DNA, 775 bp, Oryza sativa
  Clone ID: PAT_MRT4530_5154C.1
tggaaattaggcttagtactttgtgatgggcatgctcttatggttatccataagttaattagcataaagatatagttggtgcattccttcttgtcagtgcttctttctatcactttaagaggttctgaagctagccgaaccaccaaatattaagaggcaccacttatgtatctcctctcctccttgggcggccgcctttcactatacccaacacccagtgaaaaatatccaaaatagcaattaggagatatacaagtgatataaggagaaagagctagctactctatcactccatgcacataccttgtctcaagcttgagttcagatacactactcgacgtatagtaattgtttcatcccaatatcgttcgatataggaatggtaagcatcagaaatccagctgttagcccagctagaaaacagtggagaacccctcttcgtatggcacccgtaatggttttatgtctcgctcagcgagggccctaagcagagtgttacgagggactggagtagcagcggtcgcagggtgtgactataatcgatcgaattgctgatcctcctgcatcgaggacaaggtgacaatagtggaccgtcctccaacgccttgatttcatttggggccttgagggctctccgctcaagatgatcataaccggcgcatacgtttgtctagtagagcaggcacaaaaataccacgtctgattctttgggtgtgctgaaagatagagagggctagatcatgtatactatacggtttaagcaggcgatagcgca

SEQ ID NO: 48921 - DNA, 5463 bp, Oryza sativa
  Clone ID: PAT_MRT4530_51550C.1
atgatgactgcttttctccaccacctccaaaatccgccacaacataatgctccaccaccacctccccaacactctaaactcgccgagttcctccgcatccgtccacctaccttctctagctccaacaaccccgtggatgcgttggattggttgcatgccgtggggaaaaagctagacactgtggagtgcagcgatgaggagaaagtcatcttcgccgcccatcagctgcaggggcccgcatctctatggtgggaccatttccaggctacgcagccagagggacagcctattacttgggcccgtttcaccgccgctttccggagaacccatgtgcccgccggagtcgtggcccttaagaaaagggaattccgagagttgaagcaaggcaaccgctccgtgatggagtatttgcatgagttcaacaacctggcccgttacgccccggaggatgtgcgggaagatgaggagaagcaagagaagttcttggcaggaatggaccctgagctgtccgtccgtctagtctccggggactatctggatttccaacgtctggtggacaagagcatccgcttggaagccaagcacaaggaactggagtcgcacaagcgccgcttggcgaatttccgcaatcaacagggagctaaccaaagggtccgctacaccaatccctatccagggggatcctcctcgcagcagcaacaacagcagcagcaacctcgctccgcgccccgccctcaattcgtggtgcgcgtcccacagccgcagcaacagcagagtcagcaagggacccgtgcgcctcgtcctcctacgccaactgtgcagcctggccaaggccgcagggacgcttcaggtccgcagcgtctgtgcttcaattgcttcgagcccgggcactttgcggataaatgcccaaagccgaggcatcagcaaggccaagcgcctccctgctccaacaacggtggtaaggatgtcattcggggtcgtgtgaaccatgtgacggccgaggacgtgctgacaactccagacgtcatcgttgaactgcatcagataggtctgtcagaaatccccatagtcagagagttcggagacgtgtttccggaagaactacctggtatgccgcccaagcgagagattgagttccagatagatcttgctccaggaaccactcctctgtgcaagcgaccctaccgtatggcagcaaatgaactggccgaagtcaagaaacagctggaagagttgaaagaaaaggggtacatacgtccgagcacttccccctggggtgctcctgtgatttttgtggagaagaaagacaagacgaagaggatgtgcgttgactatagagctctcaatgaagtcaccataaaaaacaagtaccctcttccccggatcgatgatctgttcgatcagcttaaaggtgccactgtattttccaagattgatcttcgttccggatatcaccaactgcgtattcgtgatgaagatattccgaagaccgcattcaccacgcgatacggactgtatgaattcacggtgatgtcattcggtttaaccaatgcacccgccttcttcatgaacttaatgaacaaagtgttcatggaatacttggataaatttgttgtggttttcattgatgacattctgatatactcacaatccgaggaagaccatcagcaccatctcggtctggtattgggaaagttgcgggaacatcaattgtatgccaaacttagcaagtgtgagttctggttgtccgaagtcaaattcttagggcacgtgatatctgctaaaggagttgctgtggaccccgaaacagtgaccgccgtcactgattggaagcaacccaagacagtcactcaagtccgcagtttcttaggtttggcaggatactaccggaggttcatcgagaacttctccaaaatcgctcgacccatgacacagttgttgaagaaagaagagaaatttgtgtggagcccgcaatgcgagaaggcgttcaaaaccctcaaagaaaagctggttgcctcgccagtgttaatcttgccggatactcgcaaggatttcatggtgtattgtgacgcttcgcgccaaggattggggtgcgtgctcatgcaggatggtcatgtggtggcctatgcctcacgccagctacggcctcatgaaggcaactaccctacccatgatttggagttagccgcggtggttcatgctctaaaaatctggcggcactatctcattgggaatcgctgtgaaatatatactgatcataagagtttgaaatacatcttcactcagtcggacctgaatcttcggcagaggagatggttagaactcatcaaggattatgatgtgggaattcactatcatcctggtaaggccaacgtggttgccgacgctctaagtcgaaaaagccattgcaacactcttaacatccgtggcattccaccggaacttaatcaacagatggcagccctgaacctaaacatagttagtcgcggattcttggctgcgttggaagccaagcctaccttgctcgatcaaatccgcgaggctcagaagaacgatccggacatgcatggactcctcaagaatatgaaacagggtaaagccgctggtttcacagaggatgaacacggaaccctatggaatggaaatcggtacgaagatgtacttagacttgaaggagaaatactgagcaccaacgaccggccggacttctccaacctctccaagtaccagaatggaaaagggatgaaattgggatggatttcatcaccggacttccaaaaacccaaggtggatatgattctatatgggatcgtaagtctgcatggcgtccccaagaaaatcgtatctgataggggaagccaattcacctctcacttttggaagaagctccaagaagagctgggtacccgattaaacttcagcaccgcataccacccgcagacagatgggcagaccgagcgtctaaatcagatcctagaagatatgcttcgcgcatgtgtcctggatttcgggaagacctgggataagagtctcccctatgccgagttctcctacaataacagctaccaagccagtatacaaatggcaccttatgaagcgttgtatggacgcaagtgccggacaccgctattgtgggaccaagttggggaaagccaagtgttcgggactgatatcctgagacaagctgaagcgaaggtcagaaccattcgggataatctaaaggtggcacagtcccggcagaaaagttatgcagataaccatcgccgtgacctggaattcgcagtggatgactttgtgtaccttcgggtcacaccattgcgagctgtacacagctttcggacaaaagggaagctcgcacctcggttcgtgggtcctttccgtatcattgctcggcgcggagaagtcgcttaccagctggaactgcccgcctccttgggcaacgtgcatgatgtgttccatgtgtcgcaactcaagaaatgccttcgagtgccatccgagcaggccgactcagagcaaattgaagttcgcgaagacttgacctacgtggagaggccagttaaaatcctggacgccatggagcgcaggaccaggagccggcctttcccgtcgtcgccgtcgacccggggtgagccgtggaccgccgtttcgcttcccccttccctcccctctctcgggcgccgctccgccgcgccggtggtcgccggcggcgaccatcggggcgcgggcgtgccgcctcccgtcggctgtgctggcgaggccgccttcgggcgcgccccgcggctgccatgtggggcccggccgtcagccgcccgcgccctcggggcaaatgaaggctacacgagctgcggcccggtagtcgagatgtcatggcacagggccggtgtcctgctgctaggggctcagtcctgcctgcctgtcccgggtgttccggccgtaggtgggattgggtcgaggttcatggagaacttctccaaaatcgctcgacccatgacacagttgttgaagaaagaagagaaatttgtgtggagcccgcaatgtgagaaggcgttcagaactctcaaagaaaagctggttgcctcgccagtgttaatcttgccggatactcgcaaggacttcatagtgtattgtgacgcttcgcgccaaggattggggtgcgtgctcatgcaggacggtcatgtggtggcctatgcctcacgccagcttcgacctcatgaaggcaactaccctacccatgacttggaattagccgcggtggttcatgctctaaaaatctggcggcactatctcattgggaatcgctgtgaaatatatactgatcataagagtttgaaatacatcttcacccagtcggatctgaatcttcggcaaaggagatggttagaactcatcaaggattatgatgtgggaattcactatcatcctggtaaggccaacgtggtcgccgacgctctaagtcgaaagagccattgcaacactcttaacgtccgtggcattccaccggaacttaatcaacagatggaagccctgaacctaagcatagttagtcgtggattcttggctacgctggaagccaagcctaccttgctcgatcaaatctgcaaggctcagaagaatgacccggatatgcatgggctcctcaagaatatgaaacagggtaaagccgctggtttcacagaggatgaacatggaaccctatggaacggaaatcgggaagctcacgaaagtccttattccatccaccctggcagtacgaagatgtacctagacttgaaggagaaatactggtgggttagtatgaagcgggaaattgcagagttcgtggccctctgtgatgtgtgccagcgtgtcaaggcagagcaccaacgaccggccggacttctccaacctctccaagtaccagaatggaaatgggatgaaattgggatggattttatcaccggacttccaaaaacccaaggcggatatgattctatatgggtagtcgtggatcgactaaccaaggtagcacggttcattcccgtaaagaccacctatggagggaacaaactagctgaactctacttcgctaggatcgtcagtctgcatggcgtccccaagaaaattgtatctgatcggggaagccagttcacctctcacttttggaagaagctccaagaagagctgggtacccgattaaatttcagcaccgcgtatcacccgcagacagatggacagaccgagcgtctaaatcagatcctagaggatatgcttcgcgcatgtgtcctagatttcgggaagacctgggataagagtctcccctatgccgagttctcctacaataacagttatcaagccagcatacaaatggcaccttatgaagcgttgtatgggcgcaaatgccggacaccgctattgtgggaccaagttggagaaagccaagtgttcgggactgatatcctgagagaagctgaagcgaaggactga

SEQ ID NO: 48922 - DNA, 2683 bp, Oryza sativa
  Clone ID: PAT_MRT4530_51551C.1
tcaagtccagaccacgacggttgatgctgccggccatctacaaacaaaaacaaaagagaaaagcaacattttaaagcctggtcaaggccgcagagacgttcaaggtcagcagcgtctgtgcttcaactgcttcgagcccgggcactttgcggataaatgcccaaagccgaggcgccagcaaggccaagcgcctccccgccccaacaacggtggtaaggatgtcattcggggtcgtgtgaaccacgtgactgccgaggatgtgctgacaactccagacgtcatcgttggagtagtggattgcgcaagacgcactgtcactctgtaccgagggccggaacaaccggttgttttctttgcacccccaacctctgtcggcagttcagaacttcatcagataggactgtcagaaatccccatcgtcagtgagttcggagatgtgtttccggaagaactacccggtatgccgcccaagcgagagattgagttctggatagatcttgctccaggaaccactcctctgtacaagcgaccctaccgtatggcagcaaatgaactggccgaagtcaagaaacagttggaagagttaaaagaaaaggggtacatatggccgagcacttccccctggggtgctcctgtgatttttgtggagaagaaagacaagacaaagaggatgtgcgttgactacagagctctcaatgaagttactatcaaaaaacaacttaaaggtgccacggtattctccaagattgatcttcgctccggatatcaccaattgcgtatccgtgaagaagatatcccgaagaccgtattcaccacgcgttatggactgtatgaattcacggtgatgtcgttcgggctaaccaatgctcctgccttcttcatgaacttaatgaacaaagtgttcatggtatacttggataagtttgttgtggttttcattgacgacattctggtgtactcacaatcagaggaagaccatcagcaacatctccgtctggtgttgggaaagttgcgggaacatcaattgtatgccaagcttagcaagtgtgagttctggttgtccaaagtcaaattcttagggcacgtgatatctgctaaaggagttgctgtggaccccgaaacagtgaccgccgtcacagattggaagcaacccaagacagttacccaggttcgcaactttttgggtttggcaggatactaccggaggttcatcgagaacttctccaaaatcgctcgacccatgacacagttgttgaagaaagaagaaaaatttgtgtggagcccgcaatgcgagaaggcgttccaaactttcaaggaaaagctggtttccccgccagttttaatcttaccggatactcgcaaggacttcatggtgtactgtgatgcttcgcgccaaggattggggtgcgtgcttatgcaggaaggtcatgtggtagcctatgcctcatgtcagctatggcctcatgaaggcaactaccctacccatgatttggagttggccgctgtgggtaaagccgctggtttcacagaagatgaacacggaaccctatggaacggaaatcgggtatgcgttccgaacgacaaggaacttaaacagttgatacttcaggaagctcacgaaagtccctattccatccaccctggcagtacgaagatgtgcttagacttgaaagaaaaatattggtgggttagtataaagcgggaaattgcagagttcgtggccctttgtgatgtgtgccagcgtgtcaaggcagagcaccaacgaccggccggacttctccaacctctacaggtaccagaatggaaatgggttgaaattgggatgaatttcatcaccggacttccaaaaacccaaggctgttatgactctatatgggtagtcgtggaccgactaaccaaggtagctcggttcattcccgtgaagaccacctatggagggaacaaactagctgaactctacttcgctaggatcgtgagtctccatggcgttcctaagaaaattgtatctgataggggaagccaattcacctctcatttctggaagaagctccaagaagagttggattttgggaagacatgggataagagtctcccctacgccgagttctcctacaataacagctaccaagccagcatacagatggcacagtacgaagcgttgtatggccgcaaatgccggacaccactattgtgggaccaagtcggggaaagccaagtgttcgggaccgacatcttgagagaagctgaagcgaaggtcaggaccattcgggagaatctaaaggtagcccagtctcggcagaagagttatgcagacaaccgacgccgtgacctggaattcgcagtggatgactttgtgtttctccgggtcacgccgttgcgaggcgtacactggtttcagacgaaagggaagctcgcacctcggtttgtgggtcctttccgtatcattgctcgacgcggagaagtcgcttaccagttagagctgcccgcctccttgggcaacgtgcatgatgtgttccatgtgtcgcaactcaagaaatgccttcgagtgccgtccgagcaggccgactcagagaagattgaagttcgcgaagacttgacctacgtggagagaccagtgaaaatcctggacaccatggagcgcaggaccaggaaccaggtaatccgtttttgcaaggtccaatga

SEQ ID NO: 48923 - DNA, 3828 bp, Oryza sativa
  Clone ID: PAT_MRT4530_51552C.1
atgtcatggcagagggttggtgccctgctgctagggggctcagtcctgcctgcctgtcccgggtgtcccggccgtagggggattgggtcggtactcttgtttatggctaggatgggttgggaactatgtcacgtcttccgtccgtataccgtggtgatggtgatgaccaggagaagtgctaacaccggtgatggcaaccaacctgaaggcagcaaccacaaccatcagggcaacccacctccacctcctcctccgcctccaccaccaccaccagataccaacgccattctcacccaaatcctcgcccagcaggccaacatgatgactgctttcctccaccacctccaaaatccgccacaacagaatgctccaccaccacctccccaacactctaaactcgccgagtttctccgcatccgcccacctaccttctctagctccaacaaccccgtggatgcgttggattggttgcatgccgtggggaaaaagctagacactgtgcagtgcagcgatgaggagaaagctacgcagccagagggacagcctattacatgggctcgcttcaccgccgctttccgaagaacccatgtgcccgccggagtcgtggcccttaagaaaagggaattccgagagttgaagcaaggcaaccgctccgtgatggagtatttgcatgagttcaacaacctggcccggtacgccccggaggatgttcgggaagatgaggagaagcaagagaagttcctggcaggaatggaccttgagctgtccgtgcgtccagtctccggggactatccggattttcaacgtctggtggacaagagcatccgcttggaagccaagcacaaggaactggagtcgcacaagcgtcgcttggcgaatttccgcaatcaacagggggctaaccaaagggtccgctacaccaatccctatccagggggatcctcctcgcagcagcagcagcaaccacgctttgcgccccgacctcaattcgtggtgcgcgtcccacagccgcagcacagcagagtcagcaagagacccgtgcgccccgtcctcctgcgcccgttgtgcagcctggtcaagagccgtagagacgttcaaggtcagcagcgtctgtgcttcaactgcttcgagccggggcactttgcggataaatgcccaaagccgaggcgccagcaaggccaagcgcctccccgccccaacaacggtggtaaggacgtcattcggggtcgtgtgaaccacgtgacggccgaggacatgctgacaactccagacgtcatcgttggtacgttcctcattcattccatccctgctaccattttgttcgactctggagcttcccactcgtttatatctgtgccattcgtggggagaaatcagttgggggtagaaaggcttaggaaccctctgctcatcaccacccctggaggggttatgacagcgaagtattatagtcctgccgtccctatagaaattcaggggattccttttccctcggatctgattctgctagacaccaagaacttggatgtgatccttgggatgaattggttggctcaattccaaggagtagtggattgcgcgagacgcactgtcactctgtaccgagggccggaacaaccggttgttttctttgcacccccaacctcagtcagaagttcggaacttcatcagataggactgtcagaaatccccatcgtcagagagttcggagacgtgtttccggaagaactacctggtatgccgcctaagcgagagattgagttccggatagatcttgctccaggaaccactcctctgtacaagcgaccctaccgtatggcagcaaatgaactggccgaagtcaagaaacggctggaagagttgaaagaaaaggggtatatacgtccgagcacttccccctggggtgctcccgtgatttttgtggagaagaaagacaagacgaagaggatgtgcgttgactacagagctctcaatgaagtcaccatcaaaaacaagtaccctcttccccggatcgatgatctgttcgatcagcttaaaggtgccactgtattttccaaaatggatcttcgttccggatatcaccaattacgtattcgcgaagaagatattccgaagaccgcattcaccacgcgttatggactgtatgaattcacggtgatgtcgttcggtctaaccaatgctcctgccttcttcatgaacttaatgaacaaagtgttcatggagtacttggataagtttgttgtggttttcattgacgacattctggtgtactcacaatcagatgaagaccatcaacagcatctccgtctggtgttgggaaagttacgggaacatcaattgtatgccaagcttagcaagtgtgagttcttgttgtccgaagtcaaattcttagggcacgtgatatctgctaaaggagttgcggtggaccccgaaacagtgaccgctgtcactgattggaagcaacccaagacagttactcaggttcgcaactttttgggtttggcaggatactaccggaggttcatcgaaaacttctccaaaatcgctcgacccatgacacagttgttgaagaaagaggaaaaatttgtgtggagcccgcaatgcaagaaggcgttccaaactctcaaggaaaagctggtttccttgccagttttaatcttaccggatactcgcaaggacttcatggtgtgctgtgatgcttcgcgccaaagattgggcgtgtcaaggcagagcaccaacgaccggccggacttctccaacctctccaagtacctgaatgaaaatgggatgaaattgggatggatttcatcaccggacttccaaagacccaaggtagctcgattcattcctgtgaagaccacctatggagggaacaaactagccgagctctacttcgctaggatcgtgagtctccatggcgttcccaagaaaatcgtatctgataggggaagccaattcacctttcacttttggaagaagctccaagaagagctgggtacccgattaaacttcagcaccgcgtatcacccgcagacagatgggcagaccgagcgtctaaatcagatcctagaagatatgcttcgcgcatgtgtcctggatttcgggaagacctgggataagagtctcccctatgccgagttctcctacaacaacagctatcaagccagcatacaaatggcaccttatgaagcgttgtatgggcgcaaatgccggacaccgctaatgtgggatcaagttggggaaagccaagtgttcgggactgatatcctgagagaagctgaagctaaagtcagaaccattcgggataatctaaaggtggcacagtcccggcagaaaagttacgcagataaccgtcgccgtgacctggaattcgcagtggatgattttgtatatcttcgggtcacgccattgcgaggtgtacacaggtttcggacaaaagggaagctcgcacctcggtatgtgggtcctttccatatcgttgctcgacgcggagaagtcgcttaccaattggagctgcccgcctccttgggcaacgtgcatgatgtgttccatgtgtcgcaactcaagaaatgtctccgagtgccatctgagcaggctgacccagagcaaattgaagttcgcgaagacttgacctacgtggagaggccagtgaaaattctggacaccatggagcgcaggaccaggaaccgggtaatccgtttttgcaaggtccagtggagcaaccacgccgaggaagaagctacctgggagcgtgaagacgagctgaaggcagcccatcctgatctcttcgcctgttcttccgaatctcggggtcgagattccgtttaa

SEQ ID NO: 48924 - DNA, 277 bp, Oryza sativa
  Clone ID: PAT_MRT4530_51553C.1
tgcaggaattcggcacgagacacgagaagatgaagctgcttaagagagaaaaagaaaagaaaataaaaacaggaagaagataataacttcaagatgcacaatgtacagccaggttggatggatagctagatttttcgcgtgtggctaatcaccgtgtgtggtgaggtgggctcctttcctgtttcggaatgcttatcgatggatgaacagcctccaagagttaatgttaaccaaatatagcacaacaaaggggttcttttcttcctttggttgtttc

SEQ ID NO: 48925 - DNA, 204 bp, Oryza sativa
  unsure (1)..(204): unsure at all n locations
  Clone ID: PAT_MRT4530_51554C.1
attctntctcatttggtttcncgatctnccgntatagaggnagggcaaggngaagcgntagaaggggttttaggatgnaaaattttgctggttttgctgtcatgttagtgatgatgatgatgatgaaaaatctcggtggtttttgctgtgccgatgagccggcngcgatgatgaagaaaaatttggttaaaaaaaaaaaaaaaa

SEQ ID NO: 48926 - DNA, 4199 bp, Oryza sativa
  Clone ID: PAT_MRT4530_51555C.1
ctgcttcatttatcgtcaaaatctaacctttaaaatgttgcttttctcttttgtttttgtttgtagatggccggcagcatcaaccgtcgtggtctggacctgactgcggggcatgtgcgttgtcttggggtatccgcatggagtggactaccagggcaagcaactcccggagcaagagggtgacgatgcagagccccacgctgcttgggaggtcactgtagtgatcctcactggctcacccgagaggacctcgttggcagtcaccgcgggtggagattctttctccgccgcttgccagaacgccgcacccctcgccatcggcactcttcaccagcgctacccggacgagttgcagcactcgccctaccgctaccaccctcgtcgcggaggagcccacgactacgccaccttcagggatgctagctcggaggatgacgctaccatcatgcacctggcgcgcatggtggacacgtatgacgcggcccgtatcgacttccaccagatggtgcgccgcgggttggtcgagaacaacatgaagatcctggagctgcgtcaggagaatctgcagctgaagaaggacctagacgtagtggaggcgcagctgtgtcagctcaagatcgcccagggagaggtctgtcgccccaagcgccgccgcgtctaccgcagcctgaagatcaccgcccgcaagagtacctccaggcctgagcttgttcgtcagtccttggcatggacctgttttgtcgagacccctcgtgccgagcccgcgcccgtggttcctcaggaggagggagcctctggcgttggcagcatggaggatgcgctactgctcaccttccgccctggcccgtcgcagaatctgttctctctcttggctggttctgtatgggatatttcagatggtgacaaccaggagaagtgctgctaccggtgatgacaaccaacccgaaggtagcaaccccaacatccaaggcagcccacctccacctcctcccccacctccaccaccaccaccagacaccaactccatcctcacccaaatcctcgcccagcaggccaacatgatggctgctttcctccatcacatccaaaatccgccacagcataatgctccacctccaccaccacccccacaacactctaaactcgccgagttcctccgcatctgtccgcctaccttctctagttccaataaccccgttgatgcgttggattggttgcatgccgtggggaaaaagttggataccgtgcagtgcaatgatgaggagaaagtcatctttgccgctcaccaactgcagggcccgcatctctagggtggaccacttccaggctacgcagccagaaggacagcctattacttgggcccgcttcaccgcggctttccggaggacccatgtgcccgccggagtcatggcccttaagaaaagggaattccgagagttgaagcaaggcaaccgctctgtgatggagtatttgcatgagtttaacaacctggcccggtacgccccagaggatgttcgtgaagatgaggagaagcaagagaagttcttggcaggaatggaccctgacctgtccgtgcgtctggactccggggactatccggatttccaacatctggtggacaagagcatctgcttggaagccaagcacaaggaactggagtcgcacaagcatcgcttggcgaatttccacaatcaacaggttgctaaccaaagggtccgctacaccaatccctatccagggggatcctcctcgcagcagcagcagcagcagcacccacgctccgcgccccgacctcaattcgtggtgcgcgtcccacagccgcagcaacagcagagtcagcaagggacccatgcgccccgtcctcctgcgcccgttgtgcagcctggtcaaggccgcagagacattcaaggtcagcagcgtctgtgcttcaactgcttcgagcccgggcactttgcggataaatgcccaaagccgaggcgctcgtaaggccaagcgcctccccgccccaacaacggtggtaaggatgtcattcgggatcgtgtgaaccacgtgactgccgaggatgtgctgacaactccagacgtcattgttggtacgttcctcattcattccatccctgctaccattttgttcgactctggagcttcccactcgtttatgtctgtgccattcgtggggagaaatcagttgggggtagaaaggcttaggaaccctctgctcatcaccacccctagaggggttatgacagcaaagtattatagccctaccattcctatagaaatccagggaattccttttccctcggatttgattcttctagacaccaagaatttggatgtgatcattgggatgaattggttggctcaattccaaggagtagtggattgcgcaagacgcactgtcactctgtaccgagggccagatcaactggttgttttctttgcacccccaacctctgtcggcagttcagaacttcatcagataggactgtcagaaatccccatcgtcagtgagttcggagatgtgtttccggaagaactacccggtatgccgcccaagcgagagattgaattctggatagatcttgctccaggaaccactcctctgtacaagcgacccaaccgtatggcagcaaatgaactggccgaagtcaagaaacagttggaagagttgaaagaaaaggggtacatacgaccgagcacttccccctagggtgctcccgtgatttttgtggaaaagaaggacaagacaaagaggatgtgtgttgactacagagctcttaatgaagttactatcaaaaacaagtaccctcttccccagatcgatgatctgttcgatcagcttaaaggtgccactgtgttttctaaaatcgatcttcgttccagatatcaccaattgtgtattcgtgaagaagatatcccgaagaccgcattcaccacgcgatatgggctgtatgaattcacggtgatgtcgttcggtctgactaatgctcctgccttcttcatgaacttaatgaacaaagtgttcatggaatacttggataagtttgttgtggtcttcatcgacgacatcctggtatactcacaatcagaggaagaccatcaacagcatctccgtctggtgttgggaaagttgcgggaacatcaattgtatgccaagcttagcaagtgtgagttctggttgtccgaagtcaaattcttagggcacgtgatatctgctaaaggagttgctatggaccccgaaacagtgaccgccgtcactgatgggaagcaacccaagacagttactcaggttcgcagctttttgggtttggcaggatactaccggaggttcatcgagaacttctccaaaatcgctcgacccatgacacagttgttgaagaaagaagaaaaatttgtgtggagcccgcaatgcgagaaggcgttccaaactctcaaggaaaagctggtttcctcgccagttttaatcttaccggatactcgcaaggacttcatggtgtactgtgacgcttcgcgccaaggattggggtgcgtgctcatgcaggaaggtcatgtggtagcctatgcctcacgccagctacggcctcatgaaggcaactaccctacccatgatttggagttagccgctgtggttcatgctctaaagatctggcggcactatctcattgggaatcgctatgaaatatatactgatcataagagtttgaaatacatcttcacccagtcggatctgaatcttcggcagagaagatggttagagctcatcaaggattatgatgtgggaatccactatcaccctggtaaggccaacgtggtcgcagacgcgctgagtcgaaaaagccgttgcaacactcttggcgtccgtggcattccaccggaacttcatcaacagatggaagccctgaacctaagcatagttggtcatggattcttggctacgctggaagccaagcctaccttgctcgatcaaatccgcgaggttcagaagaatgatccagatatgcatgggatcctcaagaatatgaaacaaggtaaagccgctggtttcacagaagatgaacatggaaccctatggaacggaaatcgtgtatgcgttccggacgacaaggaacttaaacagctgatacttcaggaagctcacgaaagtccttattccatccaccctggcagtttccatcccctccggccgctctctccccc

SEQ ID NO: 48927 - DNA, 4406 bp, Oryza sativa
  Clone ID: PAT_MRT4530_51556C.1
cgggctgacggcgaaccaggcgggaaaagcaccgcccggcgccctcagatgcagatgacgggtgggaacccacggcgccggccggtgtgagcccgggtgcgcccgggtccaccgtggaccgtggggctgccgcgtgggccccaccccccgtggacccggtccgcgcgcccctcccctcggcgccccctctattcaaaatccccaaaaatggttttaggctgggctcggggtgcatggttttgatagtagcacctcggccatataaggaccggtcttcgggcctctgttgcaaagcactaccgtacttccacatgtctagtgggtaaggcttagtttttggctcagtctggttataaacaaaagtacacggatggagatggacgaagtcgggggtcgatggacatcttcctttcttatttgtgaaaatcctctagtctctctctgtcctgctgcttcatttatcgtcaatatctgacctttaaaatgttgcttttctcttttgtttttgtttgtagatggccggcagcatcaaccgtcgtcgtctggacctgactggcttcattttggagctgcggggcatgtgcgttgtcttggggtatccgcatggagtggactaccagggcaagcaactcccggagcaagagggtgacgatgcagagccccacgctgcttgggaggtcactgtagtgatcctcactggctcacccgagaggacctcgttggcagtcaccgcgggtggagattctttctccgccgcttgccagaacgccgcacccctcgccatcggcactcttcaccagcgctacccggacgagttgcagcactcgccctaccgctaccaccctcgtcgcggaggagcccacgactacgccaccttcagggatgctagctcggaggatgacgctaccatcatgcacctggcgcgcatggtggacacgtatgacgcggcccgtatcgacttccaccagatggtgcgccgcgggttggtcgagaacaacatgaagatcctggagctgcgtcaggagaatctgcagctgaagaaggacctagacgtagtggaggcgcagctgtgtcagctcaagatcgcccagggagaggtctgtcgccccaagcgccgccgcgtctaccgcagcctgaagatcaccgcccgcaagagtacctccaggcctgagcttgttcgtcagtccttggcatggacctgttttgtcgagacccctcgtgccgagcccgcgcccgtggttcctcaggaggagggagcctctggcgttggcagcatggaggatgcgctactgctcaccttccgccctggcccgtcgcagaaagtcgtgtggggcatggttataccgatggtgacaaccaggagaagtgctgctaccggtgatgacaaccaacccgaaggtagcaaccccaacatccaaggcagcccacctccacctcctcccccacctccaccaccaccaccagacaccaactccatcctcacccaaatcctcgcccagcaggccaacatgatggctgctttcctccatcacatccaaaatccgccacagcataatgctccacctccaccaccacccccacaacactctaaactcgccgagttcctccgcatctgtccgcctaccttctctagttccaataaccccgttgatgcgttggattggttgcatgccgtggggaaaaagttggataccgtgcagtgcaatgatgaggagaaagtcatctttgccgctcaccaactgcaggggcccgcatctctatggtgggaccacttccaggctacgcagccagaaggacagcctattacttgggcccgcttcaccgccgctttccggaggacccatgtgcccgccggagtcatggcccttaagaaaagggaattccgagagttgaagcaaggcaaccgctctgtgatggagtatttgcatgagtttaacaacctggcccggtacgccccagaggatgttcgtgaagatgaggagaagcaagagaagttcttggcaggaatggaccctgacctgtccgtgcgtctggactccggggactatccggatttccaacatctggtggacaagagcatctgcttggaagccaagcacaaggaactggagtcgcacaagcatcgcttggcgaatttccacaatcaacaggttgctaaccaaagggtccgctacaccaatccctatccagggggatcctcctcgcagcagcagcagcagcagcacccacgctccgcgccccgacctcaattcgtggtgcgcgtcccacagccgcagcaacagcagagtcagcaagggacccatgcgccccgtcctcctgcgcccgttgtgcagcctggtcaaggccgcagagacattcaagacgtcattgttggtacgttcctcattcattccatccctgctaccattttgttcgactctggagcttcccactcgtttatgtctgtgccattcgtggggagaaatcagttgggggtagaaaggcttaggaaccctctgctcatcaccacccctagaggggttatgacagcaaagtattatagccctaccattcctatagaaatccagggaattccttttccctcggatttgattcttctagacaccaagaatttggatgtgatcattgggatgaattggttggctcaattccaaggagtagtggattgcgcaagacgcactgtcactctgtaccgagggccagatcaactggttgttttctttgcacccccaacctctgtcggcagttcagaacttcatcagataggactgtcagaaatccccatcgtcagtgagttcggagatgtgtttccggaagaactacccggtatgccgcccaagcgagagattgaattctggatagatcttgctccaggaaccactcctctgtacaagcgacccaaccgtatggcagcaaatgaactggccgaagtcaagaaacagttggaagagttgaaagaaaagggagctcttaatgaagttactatcaaaaacaagtaccctcttccccagatcgatgatctgttcgatcagcttaaaggtgccactgtgttttctaaaatcgatcttcgttccagatatcaccaattgtgtattcgtgaagaagatatcccgaagaccgcattcaccacgcgatatgggctgtatgaattcacggtgatgtcgttcggtctgactaatgctcctgccttcttcatgaacttaatgaacaaagtgttcatggaatacttggataagtttgttgtggtcttcatcgacgacatcctggtatactcacaatcagaggaagaccatcaacagcatctccgtctggtgttgggaaagttgcgggaacatcaattgtatgccaagcttagcaagtgtgagttctggttgtccgaagtcaaattcttagggcacgtgatatctgctaaaggagttgctatggaccccgaaacagtgaccgccgtcactgatgggaagcaacccaagacagttactcaggttcgcagctttttgggtttggcaggatactaccggaggttcatcgagaacttctccaaaatcgctcgacccatgacacagttgttgaagaaagaagaaaaatttgtgtggagcccgcaatgcgagaaggcgttccaaactctcaaggaaaagctggtttcctcgccagttttaatcttaccggatactcgcaaggacttcatggtgtactgtgacgcttcgcgccaaggattggggtgcgtgctcatgcaggaaggtcatgtggtagcctatgcctcacgccagctacggcctcatgaaggcaactaccctacccatgatttggagttagccgctgtggttcatgctctaaagatctggcggcactatctcattgggaatcgctatgaaatatatactgatcataagagtttgaaatacatcttcacccagtcggatctgaatcttcggcagagaagatggttagagctcatcaaggattatgatgtgggaatccactatcaccctggtaaggccaacgtggtcgcagacgcgctgagtcgaaaaagccgttgcaacactcttggcgtccgtggcattccaccggaacttcatcaacagatggaagccctgaacctaagcatagttggtcatggattcttggctacgctggaagccaagcctaccttgctcgatcaaatccgcgaggttcagaagaatgatccagatatgcatgggatcctcaagaatatgaaacaaggtaaagccgctggtttcacagaagatgaacatggaaccctatggaacggaaatcgtgtatgcgttccggacgacaaggaacttaaacagctgatacttcaggaagctcacgaaagtccttattccatccaccctggcagtttccatcccctccggccgctctctcccccttccaaccctatttaa

SEQ ID NO: 48928 - DNA, 2895 bp, Oryza sativa
  Clone ID: PAT_MRT4530_51557C.1
atggcctcgccgccggcgcaccgtcagctcgacgccctccccgacgacctcctggcggaggtcctgatccgcctcccgtccctcgccgacctcggccgcgcctgcgcgtcctgcgcctccttccgccgcgtcgtcaccgaccgggccttcctccgccgcgcgcgcgcgctccatccgccgtcgctcctcgggttctgcggcgcctcacccggcgccggcgggttccacttccaccccgccgagccgccccacccgtccgcccccgcggcccgcggcgtgctccgcgccgccgacttcggcttctcgttcctcccttcccctgatcccctcggctgggtcgtccgtgacgtcctcggcggccgcttcctgctcgaccgcgacgtcgtggaagaaggcgccgccgccgcctcgaggatcctcgccgtgtgcgaccccttgttccggcggcacttgcttctcccccagattcctcaagacctagccgccgcctccgccctccgtcaatcgcgccgcggcgataccttcttcgctccgatcggtgaagaagagtgcgtggcggcggtggctgagacgtcattcaaggtgatctggattgcggagtgcgcagataaactcgtcgccttcgtcttctcttcagtcaccgggcaatggcgagccactgcatctgtctgctggggagatctgagccctgcattctcgcgccccgcttgccgctccatgtcgcggcgcagctacgcatacggctgcttctactggatgatgggtgactcagtgaagaatctgcttgtgctcgacatgcgtaggatggatttctcagttctcgagctcccatcgagcgcgcctggccatgacattgtggaatgcgccatcgtagaggaaggagaaggcaagattgggatgttcgctttccgtaattacatcgcaggctatgcactccagatctattctgcaaagatgcaaaatgaagggaaagctgctgccggcaaatggagttttgagactgccatggtcgtgcctttcgacgaattcggcatcctgggtgcgaccagcagggagttgttcttgaaagttcctccgagtttcgcgcgcgggtgctattcgctggagttcagcacaaacccaagttgcaagtatcttgcgtcgccccgtcggcttcccgccctcactgacgagctcttggaggagatcttcttctgtatcggctctcccgcggacctcgcccgcgcctcctccgcctacgtctccttccgccgactcatcgccggccgccacttcctccgctgctaccgctccgtctaccacccgcctctcctcctcgggttcgtccacctcggcggcttcgagcccgcccagccgccgcacccctccgctcccatcgctcgcgctctcgccgccgctgccgacttccccaccgctccgaagccagctccccaccgctccgaagcccacgtttttaagattgttcgcttttggaaatacatatctgtgtttgagttggattttaagctcgtttgcttttggaactacaaaagaagtcgtataagaaaatctcttgcacaattctccgcttgctatcttgtgcacataaatatccaagtcatacaaagtttcaataaccataacaataaccataacagatactccatctagagtaggatataacctagctcggaagggcttgtccagaattgttgttccaggataggtcaaatccggctcaagctgcaaggtcttgacatccagtgaaaagcattccaaatctggctcctctggtgtatcttcttcgccttcccctcgcgacctggctaacagcaagtgcttctccatcgcacctctaatgtaataccggtagccatgatccagtgggattatcttctccatctgctcgcgacgagtcgccccttcttttccccaaatgctgtagtggagatcaaacgtgccaccaacgctcccccggagagcaaagatcccagtcatgccttcccctgcctcaacaatggcggtcggtcccccaaggcagactggtgggggttcagcaatggagaatttcatcagtcgtgtgtcgagcaccagcaacatggtcctcaaaatcccccagcagaagcagccgcacgcgtatcggcggctggagaacactcgacccggtgacgaaaacactaggctcggtgacgacgacgacggcggcggcgacagaccggcgccattgaacagatcggtggtgctcggggaggcaccggctagccattgaccggtgctcgaattgaagacgaaggcgataatcttggccttgcactgcgccatccagatcaccttgaatgaggtatcgtcctcctcctcttcgatgtggggagcgaggaagggctcgcaccagcggtccaggtggacgcggacagggcggtccaccgaagcggcgaggtcgtcggggatcgggggaaggaggaggaatcgccggcgcagggggtcgcacacggcgatctccgtgaagaccaacggcttctcgctgcctccggtctcggccttggtatctcggtcgacgaggacgcggccgccgcggacgtcgcggaccatccagctgccggctggggaggggaggaaggagagggcgaagtccgcggcgtcggccaccgccctggcgacgggagcggaggggtggggagggagcgccgggtggaagcccctgtggtcgaggaagccgacgaagggcggggcgtggagggagcggaagcggcggaggaaggagcggtcggtggtgacgagacggcggaaggagacgcatgccgcggaggcgcggacgaggtcctccggggtgggtaggcggaggaagatctccgcgatgaggtcgttggtgagcgccgccaccggcggcgacggcgaggccatttcgtcgccggccat

SEQ ID NO: 48929 - DNA, 411 bp, Oryza sativa
  Clone ID: PAT_MRT4530_51558C.1
atgggcgcatggctcatccatctgcccagcgaggaccaccgcacacccatcgacatctcgtccctgacggagctgcagattcgccgcctgcaaacaccgtcctccaatacccattccaccgccgtagaggatgacagccgcaagcgcgcaaccaaatcgagctccagcacctacggcggtggtggtggaggcggcagtgggggcggcgttctccggcgaaggcagcggcacagggacgaagcaactccgagtggagaggcggagctcgccgaagatacatgcgcggggaggagctcgagcgccatgactaccgcgagtttggcgcacccattcgtcgagcttggcggaagcaagctcgagctttactcaatgagcagcgggcacgcctccatcagattgtctacgagctag

SEQ ID NO: 48930 - DNA, 279 bp, Oryza sativa
  Clone ID: PAT_MRT4530_51559C.1
aatataatttgttaagggttaaagaattatcttccgtcttcataaatcacgtacgctcaatatccacaccacaatattggatgtatatatgagtcttgtttgtgttttcagtttctttatataggttgagaagatgtttgtatcctacttggacatgtaattcttattcttggattatgtaggggaattcctgcgttgtaattcgagccatgtaattgtatgactctatttgggattcaaacatttccatgtgccaaaccgggaaaaaaaaaaaaaaaa

SEQ ID NO: 48931 - DNA, 678 bp, Oryza sativa
  unsure (1)..(678): unsure at all n locations
  Clone ID: PAT_MRT4530_5155C.1
ataccatgttcccaatatggcaatatcaagcagtctggaagaatncatagagtcaaacctggacatcttcacaaaagactccctgttccttgcacttgtgctgcaaaaggtaactgtccagacttcagatagctaatcacctctgtttctgctcctactctaggtttgtgcttttttttttttacttcgcttcttaatgtgacacttgagtttgcgggtgaacgattaccctgaattgttccttggggcaaatactggagtaatatgtcatctgccgtgttagttgcgctcaaaaaagctttgcagctttacttttgatctaaacatggcttcagttgatatggagtaacctaacctccttttcggtttttgcaagaatttctgcaacttccaggaaaaattgaaactggaaccagtacactccttagttttgaaattttttccaacacttcctttacggggaaaaatcacgtcataatcttatgtgtatatctatcaagttgctaaaccttatctgcatctggagagttgattgtttaacagcccttgtggctagcacacctgtaaaacctgtacttcttctagaggtcatattggttgttccaaggaatactccatcttttagcacagttcatctagagagaagctattaattattgtcaaaaaaaaaaaaaaaaa

SEQ ID NO: 48932 - DNA, 196 bp, Oryza sativa
  Clone ID: PAT_MRT4530_51560C.1
accactactctgacattcaaaatctcctatatcgagcacagcgccgtctaccacctaactaggaacactttcattcaggagcgggacactcaagataacaactggccctatgagaatcacaaaacaaatggaagagacaatggccctggaccacaccagagctaactaaagcatgggacctaaatgactctactgt

SEQ ID NO: 48933 - DNA, 925 bp, Oryza sativa
  Clone ID: PAT_MRT4530_51561C.1
atggagatggagatggagatggaggagctcattttgcatatcagaaaggaagtggagaaagggaagctgcctgcagatgtcgctgccaatctagaagagctatactacaactacaaggacgcgaatccgtttacctttccgccttatcacaaagctgtcagggagccgttcgactactacatgtttggtcagaactacattaggccccttgtagactatagaaattcatatgttggtaatatatccattttccaagacatggaacagaagctccaacagggccataatgttgttctgatgtctaaccatcagacagaagcagatccagcaatcattgctttgctgcttgaaagaagcaacccatggatcagcgaaaacatagtttatgttgctggtgatagggttgttacagatcctctctgcaagccatttagtatgggaagaaacctcatctgcgtctactccaagaaacacatgtggcggttcacagataatttggatagcaccaagtggtggtagagatcgtccggatcctttgacaggagaatggcatccggcaccatttgatgcatctgcagtggacaacatgaggaggcttctggagcattctggtgttcctgggcacatatatccactctcactgctctgctatgaggttatgcctccaccacagaaggttgagaaagagattggtgagcaaagggttatatccttccatggtgtaggcttgtcagtaactgaagagataaagtacagcgacattacggttcatacccaaaatgtcgacgagtgcagagagaaattctcagagtcattgtacaactcagtcgttgatcagtataatgcgctcaaatctgctatctttagaggtcgaggagcagattcatcggacagtgccatctcactctcacaaccatggcgatga

SEQ ID NO: 48934 - DNA, 186 bp, Oryza sativa
  Clone ID: PAT_MRT4530_51562C.1
atggctgccagtgacgggaacgcgccaccgccgccccacgccttatcgtcgaccacgactcccactactacaaccaccgtcgccgtcaagcacatcgtcgccgccatcctcgacaagcagagcaacgtcaacggcgatggccgggacttcctcctcatccaacgcgtcaaccagtcacatccctaa

SEQ ID NO: 48935 - DNA, 170 bp, Oryza sativa
  Clone ID: PAT_MRT4530_51563C.1
atggcgggggtgggggtgggggaaggggaggtgaggtaccgtggggtgaggaggcggccgtcggggaggtacgcggccgagatccgggacccggcgaagaagaccccgatctggctcggcacgttcgactccgcagaggccgccgcccgcgcctacgacgccgccgcgag

SEQ ID NO: 48936 - DNA, 276 bp, Oryza sativa
  Clone ID: PAT_MRT4530_51564C.1
atggcgattccaaagcaaacccatcgtctggtcgttgccgatgtggagatggaagatgctgtcgcaagcggcacgccggatatgcctttcgaacaaacaacggaagcaggcgcacagctagtcagctatctggtgcacaacacgtcaatacacccgtttcacctcattgggtccccgtacaatgatggaggggatgtgtcttatggatgggatggtgaggttggcattgaagcacttgattcggtgaatgagaaggttgacatacttgatgcatag

SEQ ID NO: 48937 - DNA, 630 bp, Oryza sativa
  Clone ID: PAT_MRT4530_51565C.1
gcacgaggcctcgtgccgaattcggcacgaggcgacctcgtctaaacccccacgctcccatggccgccgccgccgcgtaccccaccgccgccactctccccccgcgccgcgcacctccgccctctctccggccgtcgccgccgctctcgtggtccgcctccatcgcccacctcgcgctctcgccgccgcccgtgcccagcaaccgcgcgtccctggtggtgcgcgcggcgtggacgcggcggtcgcggaaggaggcggaggagaggcccaaccgcaagtcgtggaagcagcgcacggacatgtacatgcggccgttcctgctcaacgtcttcttctccaagcgcttcgtccacgccaaggtcgtgcacaggggcaccagcaaggtcatctccgtcgccagcaccaacgccaaggacctcaggaccacgctgccctccctcgtcgacgacaacgcctgcaggaccatcggccgcctcatcgccgagaggtccatggacgccgacgtcttcgccatgtcctacgagcccaagaagaacgagaggatcgaggggaagcttggcatcgtcatcgacaccattaaggagcacggcattatatttgtttaggcaagttcagcttacaacgttgatt

SEQ ID NO: 48938 - DNA, 453 bp, Oryza sativa
  Clone ID: PAT_MRT4530_51566C.1
atggcgacggatcccgagcgccctggcagcagaagacgacggcggagaggtggcacagagggctggcgtcggcggcaaaagacgacggcggtggtcgacggcgtcttcgacagcaaaacacgatggcggaggggcggccctggccgagaagacaacggcggaggggtggcgcacaggggcggcaccggcggaggagcgacacagaggagtggcgccggcggaaagatgcgccggcgtgctggatctgggggagcggaggagaggatcagtgggagtagtacatgggagggagagagaggaaaagcgtgggacatgcgtggggcccacaaatggctaggcctttttggctggccaaatttggcctgcgcgaggagcaccttggccagccggatggcttggcctgtctattggagcacgaattttagtcaaaatttaacttggagagtagactaa

SEQ ID NO: 48939 - DNA, 201 bp, Oryza sativa
  Clone ID: PAT_MRT4530_51567C.1
acactatcttttttttttaaacaaagttgtttttttttttgaagaatatgagcaaagccgaactgtgtttctctgcgtctgtgttttgtgaaaaaagggggtttttactaatgggcacaaggagaaaaatgaccggtctcttttgcggacgcatgtgtggacacgaaagggggcgcgtgtgtgtacccccgaatattaaag

SEQ ID NO: 48940 - DNA, 306 bp, Oryza sativa
  Clone ID: PAT_MRT4530_51568C.1
atggagacggtagttgagatggacgaggccgcctcgtcgccggggacctcccctccccctcgtcggacggaggaggcggcggtgggggtgaggaggaggaggaggatccccgggttggcggcggaggtggagcagcgggcgctggcgggcggcagggacgcggccgtgctggagttctactccccgtggctccgcctgtgcgcgtcgctgcaggggctcgtgcgagagctcgaggacggcgccggcgggtggaccggcttcgcgatcgccgacgccgaggacgaccggtggctcgccgagagctag

SEQ ID NO: 48941 - DNA, 396 bp, Oryza sativa
  Clone ID: PAT_MRT4530_51569C.1
atgcacccagaggccagccggtgggaggtggttatgaggtggccagggggcctcggggcgccacgtcacacccctcgggcccgtgaggcatactgcctcgaggccctcaccggccaccacgtggcggaatcgcaggcggataggacaagcgatagtgcccccacgtcccaccctgtgtcaggtggagtgggggtagatatgccccgtcccatcggcacactgccaagtgcgccccatgtacatggtgaatccaccaaagtctccatacatttaagagggaatggaagggatgtcccccgtgtcaggcggaggacggcgttgggccgcacctggcggcggacaaccactttgcttccagttgaaggcacggatggtgatctgactcaggccaagtga

SEQ ID NO: 48942 - DNA, 267 bp, Oryza sativa
  Clone ID: PAT_MRT4530_5156C.1
agcaaaatgaaatgcacaataaaattccctcacctttattgccaagcccatatccttttgaatacagcaatccaaaaaataagggattccaaatctgacacaacaaccatttcttccccattgcttgcttggagatgaaaagagctcctcactatgaacattttttttatgaacatcaacatgatccattggagaacaaataaccctccaaacaaaactgttcacacaatgtgttaagtctaatgagccaagactatgccctacatc

SEQ ID NO: 48943 - DNA, 474 bp, Oryza sativa
  Clone ID: PAT_MRT4530_51570C.1
ttatagaaccggagggagtactttcttattgtatttgtcggtgatatgggtccgggggtacgcatggtagaggggaatgaccttcccatctagccacgtggccgtgcggcctgccttttccccaccccctcggggggaggtcaggtggttatgaggtggccagggggcctcggggcgccacgtcacacccctcgggcccgtgaggcatactgcctcgaggccctcaccggccaccacgtggcggagtgagtggacggagcaggcggtgccatccagcgtcttaaatgcgcggcgccccaaccatctcttaccacatttaatgtggtgtgggcagacgtgcggtgccgcccgattgacgcatgtcaatcgaccttgaccggtctgcgacagatcgcaggcggataggacaagcgatagtgcccccacgtcccaccctgtgtcaggtggagtgggggtagatatgccccgtcccat

SEQ ID NO: 48944 - DNA, 111 bp, Oryza sativa
  Clone ID: PAT_MRT4530_51571C.1
gcacgagggcttcttcctttctatacattcatctatcttctaaatctgaattagtaagctctaagctcacaataccgaatcatttgcaattgaaaacatagatgactttcc

SEQ ID NO: 48945 - DNA, 679 bp, Oryza sativa
  unsure (1)..(679): unsure at all n locations
  Clone ID: PAT_MRT4530_51572C.1
ataaaaagataaaaatggagtactcgagacgagagtatcttctccttcccctggcgtaaacgaaaatctcccgtctcgtctcctccgctccttgcgcttgcgccaagacgagtcgcggcagccgatggcgagcagagcagtggagggggaaggggagggggaggaggagnggggaggnnaanggtngcctggcttttgcnccggnngacagtctcctgccttgccnnggnganganttngatgctggcccgtcttgctngattcattatcaagacatcatggacaagtgcggtnttgaaatatctgacctaagaaggcggcgatggtcaccacaggaacgttgtttagatttctactttattattttgcttcttgtaattgttgggtttatttatttgttcatcgttatgtccactaacancntgacnttctctctgattccaggaggatgagtcacttattctcttgattaccatatctgggcatcccaactgggaaactgttgcacgcgctattcctggtcggattgctcttcactgcggagtttggtggaaattcaatctataccctgctttctgctttccggccgtggtcccgcgaggcggagcctcgtattgattcatgtccaacaaatttttggaacttcgtggtgtcgaattggctgatctttttccaggga

SEQ ID NO: 48946 - DNA, 178 bp, Oryza sativa
  unsure (1)..(178): unsure at all n locations
  Clone ID: PAT_MRT4530_51573C.1
cccacgcgtccgcccacgcgtccgcgcctttttcgtcttcagccacggttgtgagnagaacggttaagaagccgaggacgccgaggtcgtctgaggggcaggctagggtgccgcatcggaggaggtcgctgtagagggcgttacttttttctattgcattacttttgtttttttattt

SEQ ID NO: 48947 - DNA, 996 bp, Oryza sativa
  Clone ID: PAT_MRT4530_51574C.1
tccgtccgtatcataacccggtccctttcgtgatgatagatgttccagagccggcttagagaagggtgtctagaatgatctgtggcggcctcatgctcagttcttagggagatcagtcccaattagaatatatacctcttagaaccgatgctggggcacacgcgggcggccgcggtgaccgccgcggacccggcgctcgccgcgctggtcgagtcaggcgcactggtgcgcgttccccggcggcggttcgggcccgtcccggcgtggcggccgccggagttcgtggagccagaggacgtctggatcctcgggacgtcccacctctccgaggagtccgtcgccgacgtcgagcgggtgctccgcgccgtccgcccggacaacgtcgtcgtcgagctctgccggagcaggcaagatcgtcgtgggcagactgcacttgctctgcgtctgcttcttgccgttttctcctcaaagatctcttctggtgcaaaccggcccttcggagaagagctgaacgagcttggaaatcccttagctgggatgagaagactaaattggtagtttcattgttccgtggaattacctctacaactgacacaagtcaggatgagaaagctgcaggtagcccctacgagttgtatgagaaactgagcatctcatatccctcactactgcaacctctgatacatgagcgtgacatgttccttgcatggtctctgaagaggagcaaagctgtaaacaagagcaaaactgtcgttgggatcattggaaagggacatatgaatggtgtggtgtatgcactgatttctgatcaaggagacttgagattccgtgatcttgttggtagagcatcatctgatacctgggcaagctcactcatcaaagggctggttagggacacaataatagggattgtactttgggggttgtatgaacagctgcatgctgtcttctaagtataaatgcagctctaacccaacatggcatgattttatcttg

SEQ ID NO: 48948 - DNA, 747 bp, Oryza sativa
  Clone ID: PAT_MRT4530_51575C.1
gcacgaggggagaatcaagaacaaaaccgctctcctctcccactcccacccaagtgcaagtgcgcctactacccaactggcaactgctgctgccgctgtacacgcgcggacccaagaacgcgcctcctctcaccgcccgggaggaagaaggaagaatctctcgcgaagcatctccagagtctcccccgctgcctccgtctccggcggctcaccccgtttctgtggagcaatgcagctatatcaccacccgtattcgctggatagtcagaaagtgcggatggcactggaagagaagggtattgactacacctcataccatgtcaatccactgaccgggaagaacatgaacgtggccttctttcgcatgaacccttctgcgaaactccccgtcttccagaacggcgcccatgtcatttatcgggccttcgatataattcagtaccttgacaggctttcggtgcatttaagtggtgaaatcgtccctgtgaacactgaggtttaccaatggatgcagaaagttgatagttggaatccgaagatgttcactctcactcacaccccgatcaagtaccgcacgtttgtctccaagttcatacggcgagtgctgattgctcgcatggctgaagccccagatttagccagcatgtaccatgctaagctccgtgaggcttatgagaccgaagacaaattgaaggatcctgacattatgaagcaaagcgaggaggagctgagcaaactcctcgatga

SEQ ID NO: 48949 - DNA, 408 bp, Oryza sativa
  Clone ID: PAT_MRT4530_51576C.1
aaatgattctgcccctcgcgatggacgacaagtgcgggtttttttcaaagtttgcggtttttcaacaccaaaccatggtgaataatatagtgcccctggctaagctcatccgcgtgatgaggacaacaattcctattgaatgatgccttcaacactctggtggtccatcatcgcaagaacacatggttggaaaagaagttatgtttactcgtttattaaacccctatgattctcttgttggaaagggatccctgatgtgatcaaactggatgactttattgagtggcactaatttgtgtcctgattgatgtgaagtatgggtgaataacgtgctgaaacgggcttctgcattcacttggccgtatgggaacatgaacttcattttcgatgctgttggaacgttttttt

SEQ ID NO: 48950 - DNA, 277 bp, Oryza sativa
  Clone ID: PAT_MRT4530_51577C.1
aaacccaagtttctctatttccaacccagggatattgtttactgatcatatactcccatcacacagacaataaatctaaaaacctactcattgttgaccatgcgggatctatacaaagattcgcaaactgacaaacaaaaaccaaacgctttcaactgcttcttcactcaacaagactgactaaagtttatactatccacacacactgacacgctatacaactagagatcgaaccgtattaattgaaatcaatcaatggatttggagctttaactgg

SEQ ID NO: 48951 - DNA, 874 bp, Oryza sativa
  unsure (1)..(874): unsure at all n locations
  Clone ID: PAT_MRT4530_51578C.1
ccggccgggccttccatgcctccccattgctcctactctcccttgaggccttgacccacccccaggaaaagcaagggaagcatgcccagcaaaatcgaacccacaaaacctcaggaattaccatcgcctagcaaggaatcaacaatccgtggtcaatccatggcagatcaggatgtggccgagccatggggcttgtcggcatggccccccttgacctccctcctcctccgagccatgaggaagcggcgcacctgggcggccctcttcctcgccgtgtacgcctctctgctctgctcgtcgtggcgcctggtggagtccgtgcgcgcctggtactactccgcggccggcggggctggcgccgtcgcggcgtggccggcggctttctacgcgtccgtgatgtacggtgccgtcttcgggctcctgtcgatgggagccgcgttagccgtggcggcgccggccatgctcatcacatggatcaccgtgttggtgctactcgcgttcgccggaaagccgcggaggtcgctggtcgcagaggggcggcgcgccacggccgatatcgcgcggctcgcgctccgcgtcttgctgcgcgagggcaacgcagtcgctgcgctctgcgccgccgccagcttcgcggccctcctcctcggccgccgcgacgacgacccggcggaggggagcggcagctgatgtnacgcttcctgcaaaattgttcaattccatgtttttttctttcagttaatatccgttttggggtttcagtgtttcaccaaccaatcctccctcaacatcctttttttttttctgtagaggtaaattattgnggaaaaaacagattaatttaacagtactacataattgcnaaattgcaaaaaaa

SEQ ID NO: 48952 - DNA, 343 bp, Oryza sativa
  unsure (1)..(343): unsure at all n locations
  Clone ID: PAT_MRT4530_51579C.1
cggacgtggacaanaggctttcactcgaccgacctcccagcttacaggagaccaggagtngacagaaatatatcgtagaattaatggaggtggagaagaagacgtcggcgtggagcggcggcggcggcggcggggggaacatggtgcgggacgcggtggactaccggggatgcccggcggacaggtcgccgccaacgtcgtcaccgacttcatgggcacctccttcctcctctgcctcctcggcggcttcctcgccgactccttcctcggccgctacctcancatcgccgtcttcgccctcgtccantccatcggcaccgcctcctcgcggcttcaacctcgt

SEQ ID NO: 48953 - DNA, 243 bp, Oryza sativa
  Clone ID: PAT_MRT4530_5157C.1
ttattattacatttggggttttttttttttttttttatagaagccttattttaacccattttttttataggtcagcacaaatttcaaatcctcaaatccctggcacgacacttcgactgaggacaccaaaagcaccggttggtggcctcccttaaccccttttttaaaaccttttccttccttccttcctagctggccgggggtccccagtttacacacaggaaatgcattctttttttgacc

SEQ ID NO: 48954 - DNA, 2593 bp, Oryza sativa
  unsure (1)..(2593): unsure at all n locations
  Clone ID: PAT_MRT4530_51580C.1
atgcagcatctgttcttgcattctgcagcttgtaagttcatacaagaaacaagaatagtacagtttttgtaagcctataattttggtactgctaaattttggcatatttctttctgcaatacaatggcgcaaggccaacaaaaaatactcaagagtctgcaagtggcagctctcttgttagttggnggggtttgcaccagctagaccagcattaagcgaattaaccatgtgaaaacacatcataaacaagaacaagaacaccatcaataacatactatatattatgcctcttcccaagccctcctccccgcttgaatgcacaagattctttatgtcttttgcatcaatcagaatggccgaatctatggacactgggcaatcacccagatcagatttgtagctttgtactgggggactcctcgcagaagctgatggtccttggctggcctaatgacaatgattgtncgcgggtgcttgagagggcaatgtccgtgcaagatgccctgttgcaacaatgagaactgaaaagcgatcttattaacttaatctcagacgttcttagtttcagcagtatgataacctggagtgaacactgaactgaccttggttcttacatcagggctgcacgcgcactgaatctagaaaagcctctggagtagtactaattaattaactaacgatatatagccaatgactactggtgcaaaccttatacattataggagtgtgtaattaattaactgtgtgtgtgtgtgatgagttctatagctagcatttctcgtcggcgtcggcgacggcggtgtgctgctgctgctgctcccgcgaggtggcggcggcggtggcggcccacttggcgcagacgaggtaggcggcgaggttgaggacgctgaggacggcgaggagccagtagaagtagtcgaggcggctgcggtcgatggtgtcgccgagccaggtggtggcgcccttgacgagcgacacgagcacgctgctgaagaagaagccgagcgagagcgtcgtcaggaagagccccgtgctcatcgtcttcatccccttgggcgacctcgtgatgaagaagtccagctgccccgtgtagatgaacgcctcgccggcgagctctgaaccctgaacatcggattgttcgggttgaacggcgacgaggccggaatcactctagccccattcagaacatgcggtggcaggaacacgctgatcggcgtggagtcccggtggtggcggcgacgacgacggcgacgcgcttcttctcgcagagcgcggcggcggccatgccgaggatggagagggcgaggccgatgccgatcttctccaggttggtgaagccttgcttgccggtgagtacgcggcagagcgggatgaagacgcggtcgtagacggcgagggtgagcatgatggcgccgacgaagaagacggtgagcgaggcggccgggatctcgaagccggcgccgacgcggcggtccatggtggtggcctgctccacggagaaggtgatcatctgcgcgtagatggtccagaagaggatcgtcgtcgcccacaccggcatcagcctcgccaccatcttcacctcctccacgcgcgacaccgagcagagcttccacgggttgggcgccgccggcccgcccggcccggccacctcgttgtcctcttcgccggccaccaccgccgccatgtccaggcacgggaactgcgcggtgtgcgcgatccgggcgtgctcggggcggtcgtcctcgtagagctccgccgcggtgggcgggcgcttgacgaccccgcgcttccgcgccgcggcgacgagcacctggaggatgtggacgatggggctcccggagctccgcttgtagcggtacctcctggtcccggagaggaagacggcgatggcggcgagcatggcggcggagcagatgccgtaggcccagctccggccgacgtggtcctggacgtagacgagcacggtgacggcgagcagcgtgccgaggctgatgaagaagaagaagcggttgaagaagaggcccatggcggcgcgctcccggccgtcgcggtcgtcgaactggtcggtgccgaagccggagacgctggacttgaggccgccggtgccgagggcgatgaggtagaggcaggcgtagagcacggccatctgcaccggcgtcggctgctccccgggcggcgggcggaggtgggtgacgagggtggaggcggcgaggagggcggtgccgatggactggacgagggcgaagacggcgatggtgaggtagcggccgaggaaggagtcggcgaggaagccgccgaggaggcagaggaggaaggaggtgcccatgaagtcggtgacgacgttggcggcggcggcgctggggaggtgcatggtgcccgtcaggtacgtcaccaggttcaccgcgatccccatcgtcgacagccgctcgcacagctcgatccccagcaccagcgccgccgccacccacccccccgtcgccgacctgtccgccgggcatccccggtagtccaccgcgtcccgcaccatgttccccccgccgccgccgccgccgctccacgccgacgtcttcttctccacctccaggtcctccat

SEQ ID NO: 48955 - DNA, 200 bp, Oryza sativa
  unsure (1)..(200): unsure at all n locations
  Clone ID: PAT_MRT4530_51581C.1
aaaacattcccaaacccaggattttaagcaattaagaatcaacaatacgatcacggacaacgttaaccaagattctcacgattaaacttggccaaacacagatcattngtgccacagggctagctatatcttaaacgaggaacaaacagtgcctataagggtcatacataacacctgtgtcntccaaaaacacacaagtg

SEQ ID NO: 48956 - DNA, 2271 bp, Oryza sativa
  Clone ID: PAT_MRT4530_51582C.1
atggcagctgcgaagctcaccgcctctgctgtgtttaggagcaaccaggagctcacgtcgctggcgcgctcgggccagctggccgccgcgcgccgcctgttcgaggagatgccccgccgcaacgtggtctcctacaacgcgatggtctccgcgctggcccaccacggccgcctcgccgaggcgcgcaggctgttcgacgagatgccgcgccgcaaccccgtgtcctggaacaccatgatggtggcatgctctcagcacgggcgcgtcgaggatgcgcgagggctattcgatgcaatgcccgcccgaaacgagtactcctggacaatcatggtatcctgctacgtgcgggctggtgagctcaccctcgcaagggagctgctcgaccgcatgcccggggagaagtgcgcggcgtgctacaacaccatgatctccgggtatgccaagaacggcaggtttgaggatgcaattgctttgttgcaggagatgccggcccctgatattgtttcatggaactcagtgttgggggggctcatccggaatgaggaaatctctcgatcagtgcagttctttgatgagatgccagataaggacttggtgtcctggaacttgatgctagaggggtatgtgcgtgctggggatttggatgtggccagtgcattcttttcaaggatcccctcacctaatgttatttcttgggttaacttggtcaatgggtattgtcaggcagggaggatgggcgaggcaagagaattgtttgatagaatgcctgagcgtaatgttgtggcttggaatgtgctgctttctgggtatgtgcagttctctcaggtggaggcggcctataatctgtttatagagatgccagagaagaattcaatctcatggacaacgatggtgagtggttttgtacgttctgggaagctccaagaagcgaaggatgtgctcagcaagatgccttccgacaatgtcggagcaaagactgcactgatgcatggctatttgaaaagcaacctgattgatgacgcccgtcaactatttgatggaattgtggttcgggatgcagtgtgctggaatacaatgatatcaggatatgttcagtgtggtatgcttgatgaggccatggttttattccagcaaatgccgaacaaggatatgatttcttggaacaccatgattgctggctgtgctcagggtggacaaattcgcaaggcagccagtattttcaggaaaatgaagaggagaaatacagtttcatggaattcaattatctctggatttgttcaaaatggtctatttgttgaagcactgcagcattttatgcttatgagaagggatgcaaagagcgctgactggtgtacatatgcatgttgtctaagtgcaagtgcaaatttggctactctgcaaatagggagacaattccacagtcttcttgtcaggactgggtttatcagtgattcttctcctggaaatgccttgatttctgcctatgctaagtgtggaaggatgttggaagcaagacaagtctttgatgagatggtagtacaagacatcgtttcatggaatgcactcatcgatggctatgcttctaatggtaatgggtctgaggtgatagcagtattccgggaaatggaagctaacagtgtcagacctgatgagatcacgttggtagttgtgttatcagcttgcagtcatgctgggttaattgatgaaggattgcatttcttcaattcgatgataaaattgtactcgttaaagcctgtggctgagcattatacctgtatggttgatcttcttggaagagctgggagactaagagaggcatttgaacttgttcagggaatgcagatccaaccaaatgctggtgtctggggtgcattgcttggagcatgccgcgtacacaagaatcacgagatagcatggcttgcagctgagaagttatttgaattggaaccttgcaaggcctcaaattatgtcttgctgtcaaacatctgtgtggaggcagggaaatgggatgatgctgacaaggtgagggttttgatgaaagagagcatattacgatcatgcaatattcatatcagcaataaaatgttggataattctggatataggtgttatggagcttcctggaagcctaggcattgtttgtggaagtggcaagaacaaaaggatttcaaggcattgcttgagctatctttggagtttggatccaagaaagatgatgcagtgcaacaatacgatgatcatgggctcatggatggcagaataaaacaatga

SEQ ID NO: 48957 - DNA, 123 bp, Oryza sativa
  Clone ID: PAT_MRT4530_51583C.1
gggtgccactcgtgctttcttgctccgtagctgcgagaggctccacgccagagggggagggtcgggcatgggacgcggcgttgcggcgggccaacacggatgagcgacctttctgacacgtcg

SEQ ID NO: 48958 - DNA, 576 bp, Oryza sativa
  Clone ID: PAT_MRT4530_51584C.1
atggagaagtcaccggccatgcacttcctcctggaactggagtcccaagaaccggtttgcctcctcatcctcttcaccatgtttacctggttcatctcgaaggttcagatgatcctccctagttcttgccaacactgcaattatgccgtcaccaaggtgacctcgacaccggttctcgccgacagaaagatatcaaagaatctaagtaagcataaagatgatgggatagagatgacacatgaagatgttgagtctgtgatgacaaagatggggcctgattttgatcacggaaaaactatggtttacaaggagattggttctaactgcatgtcagagttgttcgatgacgatgaaccgagcttggacgaagtaaagcaggcatttttggtgtttgatgaggataatgatgggtacattgatgcattggatttgtatagagtccttaggaatctaggattaagagaaggtgtaggggttgatgagtgtgagcaaatgattgccaaatatgacatgaacagagataggaggatagatatggtagagttcattagggttctggaggccagttttttctga

SEQ ID NO: 48959 - DNA, 730 bp, Oryza sativa
  Clone ID: PAT_MRT4530_51585C.1
ttttttttttttttgtgaattctgaatgataagagcaattcgaatcggccttagcaccaaacaactcaagtagctctcacatcagaccttgataaagtgcacacaggcacgcagtcggcttaacagaattctagccatgtactgaagacttaacctaacccaaaacataggtagtatatactacttaactaggttaatgaccagggtgatgatctgctaatgataactaggaaaaatgccatttgcggagccgttcacaggtgtcccagcacattctgcaaaaacagcttcacttgctgtggtctcatctgatgatcttgcagcatccttttgtagcattcatccttaagatcttccatgccgagaacaatcgcagcccttgtgaggtggccgagggtgtcgaggtcgttgactctctgcgcgaagatggtctgcacgttcaggaccccctggggaagcagcccgccggtggcgcggctcgtgaagcgctcggcgttcctgcggtagagctgcacggtgtcgtagatgtcgccggactcgatggcgggcaggtcccatacgtgtcgcggcgcgagctccgccagccgccgggcctgcaccgagaactccacgccgtcgcctccccgcaacttcaccatgggcaaccccgcccccgcccccgcccccgccgccgccgccgcgccctccatagagggagagggagaggaagggggagggattcctgcaggtg

SEQ ID NO: 48960 - DNA, 330 bp, Oryza sativa
  Clone ID: PAT_MRT4530_51586C.1
atggagctcggccttctcctggcgcctagcccaagggcttcgacctctatggctgggcgtacagtgagggactccatcggcaccacggcagatcatcgggacgctgaccgacttgacgctgcgcgccatcatggggagtgcggcttccggtggcgtgaggagttcctggagacgctgggcgaggcgcagaagaaggcgattaggttcggcgtcgctgacctgttcccgtcgtcgaggctcctccccgccgtcgagagccagagtggtgacggccggcgggagctgacacgggagctagctggagcggtggcggaagtgggctggagctga

SEQ ID NO: 48961 - DNA, 870 bp, Oryza sativa
  Clone ID: PAT_MRT4530_51587C.1
atgtcatcctctctctttcttcttcctccccctctttctcccttctctctttctctccccttccaccgtccacggggagcacggctggagcggcggcagggcgggggccgaagtgctggcggtcggcgggagctgaagcggcggcagctcccgccggccgtcaccactctggctctcgacggcggggaggagcctcgacgacgggaacaggtcagcgacgccgaacctaatcgccttcttctgcgcctcgcccagcgtctccaggaactcctcacgccaccggaagccgcactccccatgatggcgcgcagcgtcaagtcgtgccggcagcggcggcgatggcgccaacgagcacacccgccaaagagtatcctcaccgtggtgccgatggagtccctcactgtacgcccagccatagaggtcgaagcccttgggctaggcgccaggagaaggccgagctccatcctcgcctttggccatgatgctatacacatcctcttgcttgctcgccttctcctatgctgctacattggtgtgtttgttgtactgctgctcgactctgccgaggctgacccgtggagcattgtgggggttggccggattgccgggctgggttcgtggactgcatcctcggagaccgccgccatcacgcatgcggatacgccgaggtcaaggtcgatggcgatggggaagctggcgcccgcccgctgctaccgcgtcagccatcgccgccgccgccgccgccactccggctcccgcttgccgtcgccgcccttgcatgcagattacgctacgagagagaaggtgaagagaaatgggggagataaagagagagaacgtggagagagggagggggaaggagagagtgaa

SEQ ID NO: 48962 - DNA, 570 bp, Oryza sativa
  Clone ID: PAT_MRT4530_51588C.1
gaagaagacgagaaagcgaagctgcttgcgggtagagaggggtgcagtcgagtcgcctccccgtccgtctccggggtaaaagcctcgcccccgccgcgccatggagcccaagtcgtcggcgtcggcggctcatcaggggggcgacgcgccggccgaggcgccgcgcaggcgcggcggcggcgggaagcgcaagtcgggcgggtcgtcgttcaccccgtcgaagaggcacgccaaggagcggaacgcggccttccacgtgccccctcacctgctgcacagcgggccgctcacccgcgccgcgcgccagtcgccgcacaagctcgcggaggaggcggcggccgcggcggcggcggggaccggcggatcggaggcgggcggcgggaagggtggcggggacgtgatccggctcgaaggggaggaggcgcccaccgaggagacgcctctggtggacgaggtgttcgaggccgtccgatcccgcggcgccggcgtccatgtggtccctaccttcgccggatggttttcatggaaggaaatccacccaattgagaagcaaatgttgccttctttttt

SEQ ID NO: 48963 - DNA, 865 bp, Oryza sativa
  Clone ID: PAT_MRT4530_51589C.1
ctacatgtcattcactctctccttccccttccctctctccccgttctctcccccctttctcttcaccttctctctcgtagtgtaatttgcaggcaagggcggcgacggcaagcgggagccggagtggtggcggcggcgatggctgacgcggcagcagcgggcgggcgccagcttccccatcgccatcgacctcgacctcggcgtatccgcatgcgtgatggcggcggtcttcgaggatgcagtccacgaacccagcccggcaatccggccaacccccacaatgctccacgggtcagcctcggcagagtcgagcagcagtacaacaaacacaccaatgtagcagcataggagaaggcgagcaagcaagaggatgtgtatagcatcatggccaaaggcgaggatggagctcggcctccttctggcgcctggcccaggggcttcgacctctatggctgagcgtacagtgagggactccatcggcaccacggtggggatactctttggcgggtgtgctcgttggcaccatcgccgccgctgtcggcacgacttgacactgcgcgccatcatgtgggagtgcggcttccggtggcgtgaggagttcctggagacgctgggagaggcgcagaagaaggcgactaggttcggcgttgctgacctgttcctgtcgtcgaggctcctccccgccgtcgggagccggagtggtgacggccggtgggagctgacgccgcttcagctcccgccggccgccagcacttcggcccctgccccgccgccgctccagccgtgctccccgtggacggtggaaggggagagaaagagagaagggagaaagagggggaggaagaagaaagagagaggatgacat

SEQ ID NO: 48964 - DNA, 336 bp, Oryza sativa
  unsure (1)..(336): unsure at all n locations
  Clone ID: PAT_MRT4530_5158C.1
tcaaagcaaatggtgaagctgcttgcgccgatgaggaggcaactcttctggtgtcagctaaactggctgaacacaacgaggagaaccaaatggtaggctgaacaaaacttagtactattaacttgtctgaaattcaagaagctccattgctgtctggagagagtgagattgctaagaaaggctcgtggacaacaacaaacttgaaggacaccatccaccatgttgtcgaggagctgatggcaccaccaactctatctgcgatactnggatttgtttttgggctagttccatggttgaaatctcttgtcatcggtgatggcgcccctctcagagtca

SEQ ID NO: 48965 - DNA, 425 bp, Oryza sativa
  Clone ID: PAT_MRT4530_51590C.1
caaagtcaacgctcgtactcccagcaaagccatccataatcggagcgggatgatgcaaccattcaccacatccccagtggctcacgctcctagagcaggcaggctctcatggaccggcgcttcgtgccggcccagcagatgctgggtgagagtacggtccatgaggaacgggtctaccgagagcctggaccatctgcagagggcctcaaaggctagaccgcggcagagcaggggactcccagcgccaggaggagagtcatccaaaccacgccatttgggtcgtggggcagctgcccggtggcggggtcgcttcgacctggtgttgccgtccttgggccgcgtctgggtcggcggcggcgacaagccgcccactgcttcggcggcttctcctttaccggaccgtaagaaatgccctagtctggtgt

SEQ ID NO: 48966 - DNA, 490 bp, Oryza sativa
  unsure (1)..(490): unsure at all n locations
  Clone ID: PAT_MRT4530_51591C.1
ccgtgtccgtggggaacttgtgcgtacaaggggtgtcgtccataaaangtntctgtgtgtatagtccgtgtatgtaccgtaaggggtgaatgctcccgttagttgtgtgtatacgtgtgtgtcttgctcaagttattncagtagtaggtntgtgttgtggtgttgaagtgtgtgtccaaagntatgtgtgttgtgtcgtaaggaangtccgtatgaaagtaaaatgtggacgggaagtagtcgtatgtgtanggtttatgccgaatttccccacacccccgcgtgtccccgtatacgtgcgttcaaagtgtccacccacagacgccacgtgtaatgtatgtggcccacgtcgtccgtgccgtggtaagtagtgtgtatgttggtggtagtgagtgtgtcggtagatgtagtgccgtggaaagcactaatgataatgggccattgcttcgccccacatcgtggtttattgtaaaaaaaaaaaaaaaaaaaa

SEQ ID NO: 48967 - DNA, 866 bp, Oryza sativa
  Clone ID: PAT_MRT4530_51592C.1
ttcactctctccttccccttccctctctccccgttctctctctttatctcccccctttctcttcaccttctctctcgtagcgtaatctgcaggcaagggcggcgacggcaagcgggagccggagtggcggcgacggcgatggctgacgcggcagcagcaggcgggcgccagcttccccatcgacatcgacgttgacctcgagcgtatccgcatgcgtgatgtcggcagtctccgcggatgcagtccataaacccagcctggcaatccggccaacccccacaatgctccacgggtcagcctcggcagaatcgagcagcagtacaacaaacacaccaatgtagcagcataggagaaggcgagcaagcaagaggatgtgtatagcatcatggccaaaggcgaggatggagctcggcctcctcctggcgcttggcccaggggcttcgacctctatggctgggcgtacagtgagggactccatcggcaccacggtggggatactctttggcgggtgtgctcgttggcgccatcgccgccgctgtcggcacgacttgacgttgcacgccatcatgggggagtgcggcttccggtggcatgaggagttcctggagacgctgggcgaggcacagaagaaggcgactaggttcggcgtcgctgacctgttcccgtcgtcgaggctcctccccgccgtcgggagccggagtggtgacattagctccaacccgccgccgcttcagctcccgctgtccgccagcacttcggcccctgccccaccgccgctccagccgtgctccccgcggacggtggaaagggagagaaagagagaagggagaaagtgggggaggaagaagaaagagagaggatgacat

SEQ ID NO: 48968 - DNA, 857 bp, Oryza sativa
  Clone ID: PAT_MRT4530_51593C.1
atggagcgggacgggccctgcgacggcctctgtcgcttccggattcacctaggcatgagaggggactgcccgctgccttgcgaggagtggggtcttgctctatttttcccaaccccagagtacgagtatatgtcagatggaggcaagggcggcgacggcaagcgggagccggagtggcggcgacggcgatggctgacgcggcagcagcaggcgggcgccagcttccccatcgccatcgacctcgacctcggcgtatccgcatgcgtgatggcggcggtctctgtcacgcccagaaattcccgaatagaattccaagcagaatgtgcattaaaatccccgtccaggaccagccaggggctgacgtcagcacggagggagtgcggcgccgacatgcggggcccaccggtcagcgacccgggagagggcggtccacggcggatcgggtccacggaccggggaggagcggcgccgacatgcggggcccactggggcttcgacctctatggctgggcgtacagtgagggactccatcggcaccacggtggggatactctttggcgggtgtgctcgttggcgccatcgccgccgctgtcggcactgaacgtgagctggcagatcaccgggacgctgaccgacttgacgttgcacgccatcatgggggagtgcggcttccggtggcatgaggagttcctggagacgctgggcgaggcacagaagaaggcgactaggttcggcgtcgctgacctgttcccgtcgtcgaggctcctccccgccgtcgggagccggagtggtgactggccgtgcaggagctgacacgggagctagctggagcggcggtggaagtgggctggagctga

SEQ ID NO: 48969 - DNA, 2916 bp, Oryza sativa
  Clone ID: PAT_MRT4530_51594C.1
gcgtgaaacaaatctttttttttttttgcaatatgttgaaaggtcgcgtgatttgctattaagtgcaaaatttcaatcagtttcagaaggtcacaagtgcttatcatgttacaaggtcatttgaaactacctaggcaactcaatctaaatcaaagccattctaggtacatcaagatcttaaacacaaagggaagatgaatggcatgcgtcgtttacaggatgcacatctgattttgaatacaaggatctaacacaaaagcaaagcatgcgccgcactcgctcagaactcactatggtactctaatggtgagcttttcctagctcaccaaacaacagggaaaaaggaaccgggcaccacatcgcttcatgtttgcggggggggtgtgctgtcacagcctgctggcttctttcctacagctttggcttggctgccttttgcacctctatcatcctcatcagcctcatcgtcaatcagcgatccggagcgcatcagctccttcaccttgaggaattcatcatagtgagcacgacgatgttccttgaaactcagtcttgacttttcagcttctggatcatcatcttgttccatggcatctgcatcatcatctgaggatgcccaaccatcatcctttggatcagttttgcttgaagaagccacaccatttaaagcagttaaaatagcttcagcattaacagtctcatccagacacttgtcaacagtacgtcatcccactgtacctttgccagataagaaggagaattcttagagattgacatgtcagtgcgcatgtaaacaatacaggccatgaagaggagaaagaagccagttatcaacatcatcggttctctgagtagagagatgttgttgaacctgtagtaaacctggaaatatagattatgctctggaaaacatcaagcttctccaagacaaccatggccttccagaaatatcaaggtgtgaatacttcacctcttgctcttgctttgttggaaatggatccaccgccgctccgttctctccgctctctccgccgccgtcctcgccgttttgaaccttcacaacttgctctatcgctgccgccatcgccctcgctgctcgagcccatccgattccagcagtcgctgccctagtcgcctcagccgccgccgtcgcaaccgcaacactgcactccgtgtgcccgtcgccgtcgcaggcgtcccccagtagcagcagcagcagcaggcggcggccgcggcgagggtgcggagccccgaggtggagatagcgctgcagtcgcaggcgtccccctaacggcagtgtgaggtggagggagatgcagatgtcgcgtgcaaaataacgctcttgcctcagggcagcaactttctgctgctgggcagcaatcctgttctccacatcttgccctcgcaacttcttttcaaagctgtcaaccacagtggaatgccttgtcatgagcttatcctgcaactctctctccttggcaaccaattcctctacctcatcccactgcacctttgccagataagaaggagaattcttagagattgacatgtcagtgcgcatgtaaacaatacaggccatgaagaggagaaagaagccagttatcaacatcatcggttctctgagtagagagatgttgttgaacctgtagttctgactctgcaagtatagagtttgctttgtgtataacatcaagcttctacaagacaacctgatactaagtgtctgtaccttaacagggtaaggtgacagatactgagcactgtcctgatagacaacaagctgcgattcagcttgtgtgatttcttcggggaatggctggacagagtgcgtaaatacggtcaggacatctaagtgaagagtcttccccttctccaaaggtttggataaagatgccgaaaagaatgtaagttctgggggcactccagaaggctgaacaacttcaatcggaaggaccatacttggacctttcaccttttcctcagtaccaaatgctcttatagctgctaagttctttgcttggacattgggaaacgccagtagaaattgagaaacagcctccggtccactattctcaaccttgagcgaagtgaggacacgaacgatgtgcgaagtcaggtcaaccttccgatccgccctggtgacgacgagatcggcccgtgcggtgggggtggaggcggcggcgacgaggaggaggaggagggcggcgacgcggcggagcggcggtggcgtcgccatgttggggggcggagggcagatcggtgggtctcgcggcccataggggagtaggaaaacggtggaagatcttcatatggtccatattttagttctgactctgcaagttttgtgtttgggtactttgtgtaggactcaactcttccaccaggcaatctgatactaagtgtctgtaccttaacagggtaaggtgacagatactgagcactgtcctgatagacaacaagctgcgattcagcttgtgtgatttcttcggggaatggctggacagagtgcgtaaatacggtcaggacatctaagtgaagagtcttccccttctccaaaggtttggataaagatgccgaaaagaatgtaagttctgggggcactccagaaggctgaacaacttcaatcggaaggaccatacttggacctttcaccttttcctcagtaccaaatgctcttatagctgctaagttctttgcttggacattgggaaacgccagtagaaattgagaaacagcctccggtccactattctcaaccttgagcgaagtgaggacacgaacgatgtgcgaagtcaggtcaaccttccgatccgccctggtgacgacgagatcggcccgtgcggtgggggtggaggcggcggcgacgaggaggaggaggagggcggcgacgcggcggagcggcggtggcgtcgccat
